United States Patent Application Publication US 2015/0315605 A1 - sequence listing, part 8

SEQ ID NO: 10188 - DNA, 2161 bp, Zea Mays
ttttttttacaacttctccctctcagtttactgttgaaaaggcaaacaaaatcacttagccgcgctgcctctgtgtctgtcttttcgtttaattagggtttccggatctgctctgcgtcgccgccgaccaacctccaccgcgcgacgccatggacttcgacgagtacgagtatctggagaagacggtggaagcgttcgcagcgccggccaacggttcgtcgccgcccgggtcggggtacaaggacaaggagcgcagctcacgccgccgctcaacgggcggtgacgaagagcgcgacaacgtagaacgcagatcgaagcgttctcgccccgaggaaggccgcgaccgcgatagagagcggcacaggtaccgcgacggcgaccggcaccgcagcagtcgggagcggcgggaccgtgaccgtgacgtcaaggagaaagagcagggcagggagaacgacaaggacaggaggagccgcgaccgcgaacgggagaaggaggagagggagaaggataggcagcggaggagtcggagccggtccgagcggcgccgtgatgacgaagagcgtgatcgctaccgtgaacgcgatgtcagacgtaggaaagaggaagttgctgaacctgaagttgatccagaaagagatcagaggactgtgtttgcttaccagttatctttgaaggcagatgaaagagatgtatatgagttcttttctagggctggaaaggtccgggatgttcgcctgattatggatcgaaattcacgacgttctaaaggtgtcgggtatattgaattctatgatgctatgtctgttccaatggcgatagctctttctggtcagttgcttcttggtcaacaagtgatggttaagccttcagaggctgaaaagaatttagttcagtcaaatgcttcaagtggagctgcttcaggtggagcaaggaagttgtatgttggaaatcttcactcaaacattaatgaagaccagttgcgacaggtctttgaaccatttggacaagtggagcttgttcagttgccattagatccgctcagtgggctatgcaaaggttttggttttgtgcagtttgcacgtcttgaagatgcaaaagcggcccagagtttgaatgggcaacttgagattgctggaagagtaatcaaggtttcagctgtgacagaccaagcaggcatgcaagttagtggagctacgggagatttggatgatgaagaagctggaggcttggcactgaatgccagttccagagctcttctaatgcagaaattggaccgcagcggcattacgaccaggattcaaccaccactacagcaacactgtttccatatatatctagcttatcaaggtctttgactggtgggacgggcattgctggtttgactactccagtggcaataccaactgtatctgtccttggtgctgccccagctgcagcccctcttctgcaccctacagtgcctggtcttgcaattcccggggcaactcttccaattactaccccatctattgatttggctccacctagtcaatgcctattgctcaagaatatgtttgatccagctttggagacagatcctgatttcgatttggacatcagagatgatgttcaggaggaatgttccaagtttggtcaattaaaacatatttttgtagacaaaagtactgccggttttgtgtacctgcggtttgatagtataacagccgctatgagcgcacagaaagcactccatggaagatggttcgcagggaagatgatcacagcaacttttatgaccccacaacagtatgaaatgaagttcccgagctagtgaacagatgcatgattaatatggacgtagttgcttgggctcggtgggtgctggcatttctatattttagcgttttgagcttgtgtcaacttattactggaggtaattataaaaaaaactagtggaggaaaatttagtggaagctagtgtatcgggaaatggctaacgaaaaatggtgaaagaaagagtttccttgccctgtgggttagtgctcgaattgaaactgtactgtgtaatggagtttctccctgaagtgctagtactaatacctaaaatgatggaagaaagagttgacttgcgttgcgcttgttgatttgattatactcgtccgtaccctttgcattattgttt

SEQ ID NO: 10189 - DNA, 2336 bp, Zea Mays
ttttttttacaacttctccctctcagtttactgttgaaaaggcaaacaaaatcacttagccgcgctgcctctgtgtctgtcttttcgtttaattagggtttccggatctgctctgcgtcgccgccgaccaacctccaccgcgcgacgccatggacttcgacgagtacgagtatctggagaagacggtggaagcgttcgcagcgccggccaacggttcgtcgccgcccgggtcggggtacaaggacaaggagcgcagctcacgccgccgctcaacgggcggtgacgaagagcgcgacaacgtagaacgcagatcgaagcgttctcgccccgaggaaggccgcgaccgcgatagagagcggcacaggtaccgcgacggcgaccggcaccgcagcagtcgggagcggcgggaccgtgaccgtgacgtcaaggagaaagagcagggcagggagaacgacaaggacaggaggagccgcgaccgcgaacgggagaaggaggagagggagaaggataggcagcggaggagtcggagccggtccgagcggcgccgtgatgacgaagagcgtgatcgctaccgtgaacgcgatgtcagacgtaggaaagaggaagttgctgaacctgaagttgatccagaaagagatcagaggactgtgtttgcttaccagttatctttgaaggcagatgaaagagatgtatatgagttcttttctagggctggaaaggtccgggatgttcgcctgattatggatcgaaattcacgacgttctaaaggtgtcgggaatatttgtaatatggtgtacctgctgggatactcagcaacttattaagatggaaaacaagatcatattggtatattgaattctatgatgctatgtctgttccaatggcgatagctctttctggtcagttgcttcttggtcaacaagtgatggttaagccttcagaggctgaaaagaatttagttcagtcaaatgcttcaagtggagctgcttcaggtggagcaaggaagttgtatgttggaaatcttcactcaaacattaatgaagaccagttgcgacaggtctttgaaccatttggacaagtggagcttgttcagttgccattagatccgctcagtgggctatgcaaaggttttggttttgtgcagtttgcacgtcttgaagatgcaaaagcggcccagagtttgaatgggcaacttgagattgctggaagagtaatcaaggtttcagctgtgacagaccaagcaggcatgcaagttagtggagctacgggagatttggatgatgaagaagctggaggcttggcactgaatgccagttccagagctcttctaatgcagaaattggaccgcagcggcattacgaccaggattcaaccaccactacagcaacactgtttccatatatatctagcttatcaaggatggcgaattgatgatgtttgaaagtggacataagagaggaatcttgttacaatgcccttaccattttgatgcagatttcaatgattggctccataagaaacttgatttgactggtgggacgggcattgctggtttgactactccagtggcaataccaactgtatctgtccttggtgctgccccagctgcagcccctcttctgcaccctacagtgcctggtcttgcaattcccggggcaactcttccaattactaccccatctattgatttggctccacctagtcaatgcctattgctcaagaatatgtttgatccagctttggagacagatcctgatttcgatttggacatcagagatgatgttcaggaggaatgttccaagtttggtcaattaaaacatatttttgtagacaaaagtactgccggttttgtgtacctgcggtttgatagtataacagccgctatgagcgcacagaaagcactccatggaagatggttcgcagggaagatgatcacagcaacttttatgaccccacaacagtatgaaatgaagttcccgagctagtgaacagatgcatgattaatatggacgtagttgcttgggctcggtgggtgctggcatttctatattttagcgttttgagcttgtgtcaacttattactggaggtaattataaaaaaaactagtggaggaaaatttagtggaagctagtgtatcgggaaatggctaacgaaaaatggtgaaagaaagagtttccttgccctgtgggttagtgctcgaattgaaactgtactgtgtaatggagtttctccctgaagtgctagtactaatacctaaaatgatggaagaaagagttgacttgcgttgcgcttgttgatttgattatactcgtccgtaccctttgcattattgttt

SEQ ID NO: 10190 - DNA, 2440 bp, Zea Mays
ttttttttacaacttctccctctcagtttactgttgaaaaggcaaacaaaatcacttagccgcgctgcctctgtgtctgtcttttcgtttaattagggtttccggatctgctctgcgtcgccgccgaccaacctccaccgcgcgacgccatggacttcgacgagtacgagtatctggagaagacggtggaagcgttcgcagcgccggccaacggttcgtcgccgcccgggtcggggtacaaggacaaggagcgcagctcacgccgccgctcaacgggcggtgacgaagagcgcgacaacgtagaacgcagatcgaagcgttctcgccccgaggaaggccgcgaccgcgatagagagcggcacaggtaccgcgacggcgaccggcaccgcagcagtcgggagcggcgggaccgtgaccgtgacgtcaaggagaaagagcagggcagggagaacgacaaggacaggaggagccgcgaccgcgaacgggagaaggaggagagggagaaggataggcagcggaggagtcggagccggtccgagcggcgccgtgatgacgaagagcgtgatcgctaccgtgaacgcgatgtcagacgtaggaaagaggaagttgctgaacctgaagttgatccagaaagagatcagaggactgtgtttgcttaccagttatctttgaaggcagatgaaagagatgtatatgagttcttttctagggctggaaaggtccgggatgttcgcctgattatggatcgaaattcacgacgttctaaaggtgtcgggaatatttgtaatatggtgtacctgctgggatactcagcaacttattaagatggaaaacaagatcatattggtatattgaattctatgatgctatgtctgttccaatggcgatagctctttctggtcagttgcttcttggtcaacaagtgatggttaagccttcagaggctgaaaagaatttagttcagtcaaatgcttcaagtggagctgcttcaggtggagcaaggaagttgtatgttggaaatcttcactcaaacattaatgaagaccagttgcgacaggtctttgaaccatttggacaagtggagcttgttcagttgccattagatccgctcagtgggctatgcaaaggttttggttttgtgcagatgcaaaagcggcccagagtttgaatgggcaacttgagattgctggaagagtaatcaaggtttcagctgtgacagaccaagcaggcatgcaagttagtggagctacgggagatttggatgatgaagaagctggaggcttggcactgaatgccagttccagagctcttctaatgcagaaattggaccgcagcggcattacgaccaggattcaaccaccactacagcaacactgtttccatatatatctagcttatcaagttctagtatttagtgccagttgcattgattgcaaatttcaggatggcgaattgatgatgtttgaaagtggacataagagaggaatcttgttacaatgcccttaccattttgatgcagatttcaatgattggctccataagaaacttgagttaaattttgttatagtagatgtacccttttatgtgtagcttactcactggacacgccaaccttttgtgttcctgcagtttgactggtgggacgggcattgctggtttgactactccagtggcaataccaactgtatctgtccttggtgctgccccagctgcagcccctcttctgcaccctacagtgcctggtcttgcaattcccggggcaactcttccaattactaccccatctattgatttggctccacctagtcaatgcctattgctcaagaatatgtttgatccagctttggagacagatcctgatttcgatttggacatcagagatgatgttcaggaggaatgttccaagtttggtcaattaaaacatatttttgtagacaaaagtactgccggttttgtgtacctgcggtttgatagtataacagccgctatgagcgcacagaaagcactccatggaagatggttcgcagggaagatgatcacagcaacttttatgaccccacaacagtatgaaatgaagttcccgagctagtgaacagatgcatgattaatatggacgtagttgcttgggctcggtgggtgctggcatttctatattttagcgttttgagcttgtgtcaacttattactggaggtaattataaaaaaaactagtggaggaaaatttagtggaagctagtgtatcgggaaatggctaacgaaaaatggtgaaagaaagagtttccttgccctgtgggttagtgctcgaattgaaactgtactgtgtaatggagtttctccctgaagtgctagtactaatacctaaaatgatggaagaaagagttgacttgcgttgcgcttgttgatttgattatactcgtccgtaccctttgcattattgttt

SEQ ID NO: 10191 - DNA, 2719 bp, Zea Mays
ttttttttacaacttctccctctcagtttactgttgaaaaggcaaacaaaatcacttagccgcgctgcctctgtgtctgtcttttcgtttaattagggtttccggatctgctctgcgtcgccgccgaccaacctccaccgcgcgacgccatggacttcgacgagtacgagtatctggagaagacggtggaagcgttcgcagcgccggccaacggttcgtcgccgcccgggtcggggtacaaggacaaggagcgcagctcacgccgccgctcaacgggcggtgacgaagagcgcgacaacgtagaacgcagatcgaagcgttctcgccccgaggaaggccgcgaccgcgatagagagcggcacaggtaccgcgacggcgaccggcaccgcagcagtcgggagcggcgggaccgtgaccgtgacgtcaaggagaaagagcagggcagggagaacgacaaggacaggaggagccgcgaccgcgaacgggagaaggaggagagggagaaggataggcagcggaggagtcggagccggtccgagcggcgccgtgatgacgaagagcgtgatcgctaccgtgaacgcgatgtcagacgtaggaaagaggaagttgctgaacctgaagttgatccagaaagagatcagaggactgtgtttgcttaccagttatctttgaaggcagatgaaagagatgtatatgagttcttttctagggctggaaaggtccgggatgttcgcctgattatggatcgaaattcacgacgttctaaaggtgtcgggaatatttgtaatatggtgtacctgctgggatactcagcaacttattaagatggaaaacaagatcatattggtatattgaattctatgatgctatgtctgttccaatggcgatagctctttctggtcagttgcttcttggtcaacaagtgatggttaagccttcagaggctgaaaagaatttagttcagtcaaatgcttcaagtggagctgcttcaggtggagcaaggaagttgtatgttggaaatcttcactcaaacattaatgaagaccagttgcgacaggtctttgaaccatttggacaagtggagcttgttcagttgccattagatccgctcagtgggctatgcaaaggttttggttttgtgcagtttgcacgtcttgaagatgcaaaagcggcccagagtttgaatgggcaacttgagattgctggaagagtaatcaaggtttcagctgtgacagaccaagcaggcatgcaagttagtggagctacgggagatttggatgatgaagaagctggaggcttggcactgaatgccagttccagagctcttctaatgcagaaattggaccgcagcggcattacgaccaggtacctttttggggttgattgcataataataattctgacattttgataagtataggtctttaaaaaactatttagtatagcaccgatatttggagtatatttatttatttgttaattaattggtaacagagctgcacatttgattactgaggtgctgaatggactattcctccataatttgttttttttgtggcgctgcagagacttcatttcattttagaattccattatcttgcttgcttgtatgagtgccatcatttgtacccaaatctctcattattgacctctactatattatcgtcaggattcaaccaccactacagcaacactgtttccatatatatctagcttatcaaggatggcgaattgatgatgtttgaaagtggacataagagaggaatcttgttacaatgcccttaccattttgatgcagatttcaatgattggctccataagaaacttgagttaaattttgttatagtagatgtacccttttatgtgtagcttactcactggacacgccaaccttttgtgttcctgcagtttgactggtgggacgggcattgctggtttgactactccagtggcaataccaactgtatctgtccttggtgctgccccagctgcagcccctcttctgcaccctacagtgcctggtcttgcaattcccggggcaactcttccaattactaccccatctattgatttggctccacctagtcaatgcctattgctcaagaatatgtttgatccagctttggagacagatcctgatttcgatttggacatcagagatgatgttcaggaggaatgttccaagtttggtcaattaaaacatatttttgtagacaaaagtactgccggttttgtgtacctgcggtttgatagtataacagccgctatgagcgcacagaaagcactccatggaagatggttcgcagggaagatgatcacagcaacttttatgaccccacaacagtatgaaatgaagttcccgagctagtgaacagatgcatgattaatatggacgtagttgcttgggctcggtgggtgctggcatttctatattttagcgttttgagcttgtgtcaacttattactggaggtaattataaaaaaaactagtggaggaaaatttagtggaagctagtgtatcgggaaatggctaacgaaaaatggtgaaagaaagagtttccttgccctgtgggttagtgctcgaattgaaactgtactgtgtaatggagtttctccctgaagtgctagtactaatacctaaaatgatggaagaaagagttgacttgcgttgcgcttgttgatttgattatactcgtccgtaccctttgcattattgttt

SEQ ID NO: 10192 - DNA, 2815 bp, Zea Mays
ttttttttacaacttctccctctcagtttactgttgaaaaggcaaacaaaatcacttagccgcgctgcctctgtgtctgtcttttcgtttaattagggtttccggatctgctctgcgtcgccgccgaccaacctccaccgcgcgacgccatggacttcgacgagtacgagtatctggagaagacggtggaagcgttcgcagcgccggccaacggttcgtcgccgcccgggtcggggtacaaggacaaggagcgcagctcacgccgccgctcaacgggcggtgacgaagagcgcgacaacgtagaacgcagatcgaagcgttctcgccccgaggaaggccgcgaccgcgatagagagcggcacaggtaccgcgacggcgaccggcaccgcagcagtcgggagcggcgggaccgtgaccgtgacgtcaaggagaaagagcagggcagggagaacgacaaggacaggaggagccgcgaccgcgaacgggagaaggaggagagggagaaggataggcagcggaggagtcggagccggtccgagcggcgccgtgatgacgaagagcgtgatcgctaccgtgaacgcgatgtcagacgtaggaaagaggaagttgctgaacctgaagttgatccagaaagagatcagaggactgtgtttgcttaccagttatctttgaaggcagatgaaagagatgtatatgagttcttttctagggctggaaaggtccgggatgttcgcctgattatggatcgaaattcacgacgttctaaaggtgtcgggaatatttgtaatatggtgtacctgctgggatactcagcaacttattaagatggaaaacaagatcatattggtatattgaattctatgatgctatgtctgttccaatggcgatagctctttctggtcagttgcttcttggtcaacaagtgatggttaagccttcagaggctgaaaagaatttagttcagtcaaatgcttcaagtggagctgcttcaggtggagcaaggaagttgtatgttggaaatcttcactcaaacattaatgaagaccagttgcgacaggtctttgaaccatttggacaagtggagcttgttcagttgccattagatccgctcagtgggctatgcaaaggttttggttttgtgcagatgcaaaagcggcccagagtttgaatgggcaacttgagattgctggaagagtaatcaaggtttcagctgtgacagaccaagcaggcatgcaagttagtggagctacgggagatttggatgatgaagaagctggaggcttggcactgaatgccagttccagagctcttctaatgcagaaattggaccgcagcggcattacgaccaggtacctttttggggttgattgcataataataattctgacattttgataagtataggtctttaaaaaactatttagtatagcaccgatatttggagtatatttatttatttgttaattaattggtaacagagctgcacatttgattactgaggtgctgaatggactattcctccataatttgttttttttgtggcgctgcagagacttcatttcattttagaattccattatcttgcttgcttgtatgagtgccatcatttgtacccaaatctctcattattgacctctactatattatcgtcaggattcaaccaccactacagcaacactgtttccatatatatctagcttatcaaggtcgttctccatggacctcctccagttctttggtgtaaagtggtttggctgaaatattttgtttactgcagttctagtatttagtgccagttgcattgattgcaaatttcaggatggcgaattgatgatgtttgaaagtggacataagagaggaatcttgttacaatgcccttaccattttgatgcagatttcaatgattggctccataagaaacttgagttaaattttgttatagtagatgtacccttttatgtgtagcttactcactggacacgccaaccttttgtgttcctgcagtttgactggtgggacgggcattgctggtttgactactccagtggcaataccaactgtatctgtccttggtgctgccccagctgcagcccctcttctgcaccctacagtgcctggtcttgcaattcccggggcaactcttccaattactaccccatctattgatttggctccacctagtcaatgcctattgctcaagaatatgtttgatccagctttggagacagatcctgatttcgatttggacatcagagatgatgttcaggaggaatgttccaagtttggtcaattaaaacatatttttgtagacaaaagtactgccggttttgtgtacctgcggtttgatagtataacagccgctatgagcgcacagaaagcactccatggaagatggttcgcagggaagatgatcacagcaacttttatgaccccacaacagtatgaaatgaagttcccgagctagtgaacagatgcatgattaatatggacgtagttgcttgggctcggtgggtgctggcatttctatattttagcgttttgagcttgtgtcaacttattactggaggtaattataaaaaaaactagtggaggaaaatttagtggaagctagtgtatcgggaaatggctaacgaaaaatggtgaaagaaagagtttccttgccctgtgggttagtgctcgaattgaaactgtactgtgtaatggagtttctccctgaagtgctagtactaatacctaaaatgatggaagaaagagttgacttgcgttgcgcttgttgatttgattatactcgtccgtaccctttgcattattgttt

SEQ ID NO: 10193 - DNA, 452 bp, Zea Mays
tccaattacagacagcttgattcaaaaaaccttaaagaaaccttaaagtcttgcttctggataacggtgaaattgcagagcatgacgccccagcaaaactgctagaggacagttcatccctattctccaaacttgtatctgagtataccatgggatctgataagtggcgaatgcaagaaagcagctaaatcaatactctacagataatacaggacaaacgccctaggaagtgtgagtatctacgtgtcaccaattttatagcttaataaaaagcaaatttttaaaaaacaaaaaaaaaactatgaatatccatattccccaaggcccttggaagtgtgatatatttgtttcattgtatactagttaggggcctgtgcgttgctacagtttctatatatcacattgataaacttgctttattgagataacttttgaaacatgttcaattgagc

SEQ ID NO: 10194 - DNA, 2322 bp, Zea Mays
gtgaaaagtccatagcctggcatcgtgctgcggtgtccgagtgattcatcgtcttcccggaaccaacaggccgctgtttgactttgacccaaccacaccacgcgggacggggctccgcctccgaccccgcgccgacctaacgtgaccaactcactcaacctcgctgccgtgacgtgccgtaccgtgccgccctgtccatcgggtcaaatccctcgtcgcttcctctccgcctcctcgccacttctccgctaatccccaatccggaacctcaccgcggagaaccccagatcaaacccttccccgcccattcccacttccatccttccagtacgatccgtttcttccttacttccctgctcatccgagggtgaggaaggagtcgggcgaggaatccaccgccggggtttcttgatccgggcgcgtgattcgccgcgcccaggcaccagtgagaaatcaaatcaagaacggggtgggggaagtgagacgagggcgcggggagcaatcaagatcgcttcttggagctttcggcccccccgagccaatgccggatccggttagcggcgccccccgctcccacggcgccgggctggcatgccccctctgagcgcccccgcctgcctccgcggctcccgatgctcgtgtggtcttcgggagcaggagagggagcagcggccgtcgtgggcggcggccaggagcgaggatgcagatccggctgtcgccgagcatgaggagcatcaccatctccactagccatggcctgctagacttgatgaggttcaaggtcgccgcgcgacacttctcctaccgcaccgtcttccacaccgtcctaatcctcgccttcctcctgcctttcgtcttcatactcaccgccgtcatgactctcgagggcttcaacaagtgctcttcactagattgtcttggaagacgtttgggtccgcgccttcttggtaggggaaatgatggttccatgaggcttgtgagggatttatatgtgatgcttgatgaagtaaattctgaggaagcacctcttaatttgaaggttccagaaacttttgatgaatttatctgggacatgaagaataatgattatgatttaaggtcatttgcttttaagttgaaggctacgatggagagcatggataaggaattgaggtcatcaaggttatcggagcagttgaacaagcactatgctgcaattgctattcctaaaggcctttattgcctttcattgcgtttaactgatgaatactcctcaaatgcccttgcaaggaaacaactaccacccccggagttggtgcctagtctttcggacaactcctattaccattttgttttagcatcagataacatccttgcagcctcagttgtggtcagatcaacagttagatcatcactgaaacctgagagaatagttttccatgttattactgacaaaaagacctatcctgccatgcactcatggtttgctttaaattctctcagtcctgctattgttgaggtgaaaggtgttcaccaatttgattggttaacaaaagaaaatgttcctgtacttgaagctatagaaactcagcgcactgctagagatcgttaccatggaagtcaccgtccaagaaccagtgctagtgataacccaagggtttttgcggccaagctgcaggcaggaagtccaacatacactaatgtactcaatcatattcgaatatacttgcctgagttgttcccaagcctcaacaaggtcgtatttcttgatgatgatgttgttgtccagcatgacctatcaccactttgggatatcgatctagctgggaaggttaatggtgctgttgagacttgcataggtggagacagtcgggtgatgtctaagaggttcaggaattatttcaacttttctcatcccctcattgcaaaaaactttgacccttcagagtgtgcttgggcatatggtatgaatatttttgacctgaaagcatggaggaagacaacaatcaaagatcagtatcatcattgggtcaaggagggagtttatcaagtgcaactggggagctcagtaatcccttaacatggttacatgcgctgtggagaatattcaatgaacagaaaggaaatgttattttttccccatttactgtagggcccttttcctttaatttattccatttgtatcatagctcatgaaattaagatattgcttaggatggttcttttgtattttatggagcaatataagttgggttgatggtagtcccatcgttattgtaattgatgaagagcatacacatttcaccatgtgaaaagcatggattttgattatgcaaagcaaac

SEQ ID NO: 10195 - DNA, 2511 bp, Zea Mays
ctttgacccaaccacaccacgcgggacggggctccgcctccgaccccgcgccgacctaacgtgaccaactcactcaacctcgctgccgtgacgtgccgtaccgtgccgccctgtccatcgggtcaaatccctcgtcgcttcctctccgcctcctcgccacttctccgctaatccccaatccggaacctcaccgcggagaaccccagatcaaacccttccccgcccattcccacttccatccttccagtacgatccgtttcttccttacttccctgctcatccgagggtgaggaaggagtcgggcgaggaatccaccgccggggtttcttgatccgggcgcgtgattcgccgcgcccaggcaccagtgagaaatcaaatcaagaacggggtgggggaagtgagacgagggcgcggggagcaatcaagatcgcttcttggagctttcggcccccccgagccaatgccggatccggttagcggcgccccccgctcccacggcgccgggctggcatgccccctctgagcgcccccgcctgcctccgcggctcccgatgctcgtgtggtcttcgggagcaggagagggagcagcggccgtcgtgggcggcggccaggagcgaggatgcagatccggctgtcgccgagcatgaggagcatcaccatctccactagccatggcctgctagacttgatgaggttcaaggtcgccgcgcgacacttctcctaccgcaccgtcttccacaccgtcctaatcctcgccttcctcctgcctttcgtcttcatactcaccgccgtcatgactctcgagggcttcaacaagtgctcttcactagattgtcttggaagacgtttgggtccgcgccttcttggttccagaaacttttgatgaatttatctgggacatgaagaataatgattatgatttaaggtcatttgcttttaagttgaaggctacgatggagagcatggataaggaattgaggtcatcaaggttatcggagcagttgaacaagcactatgctgcaattgctattcctaaaggcctttattgcctttcattgcgtttaactgatgaatactcctcaaatgcccttgcaaggaaacaactaccacccccggagttggtgcctagtctttcggacaactcctattaccattttgttttagcatcagataacatccttgcagcctcagttgtggtcagatcaacagttagatcatcactgaaacctgagagaatagttttccatgttattactgacaaaaagacctatcctgccatgcactcatggtttgctttaaattctctcagtcctgctattgttgaggtgaaaggtgttcaccaatttgattggttaacaaaagaaaatgttcctgtacttgaagctatagaaactcagcgcactgctagagatcgttaccatggaagtcaccgtccaagaaccagtgctagtgataacccaagggtttttgcggccaagctgcaggcaggaagtccaacatacactaatgtactcaatcatattcgaatatacttgcctgagttgttcccaagcctcaacaaggtcgtatttcttgatgatgatgttgttgtccagcatgacctatcaccactttgggatatcgatctagctgggaaggttaatggtgctgttgagacttgcataggtggagacagtcgggtgatgtctaagaggttcaggaattatttcaacttttctcatcccctcattgcaaaaaactttgacccttcagagtgtgcttgggcatatggtatgaatatttttgacctgaaagcatggaggaagacaacaatcaaagatcagtatcatcattgggtcaaggagaacttgaagtcaaacttcacactttggaggcttggaacattgccaccaggccttattgcctttaaaggccatgttcacccaattgatccatcatggcatctgttaggcttgggttatcaggaaaagacagatgtcagtagcgttgaacaagcagcagttatacattataacgggcaaagtaaaccgtggctggagattggttttaaacatcttcagccattttggacaaaatatgtgaactactcaaatgaattcataagaaactgtcatataatggagcctcagtttagattgtcttgacaatatatataaaagcatatagtaagtgaaattaaattcgttattttggaaatcaacagcagggagtttatcaagtgcaactggggagctcagtaatcccttaacatggttacatgcgctgtggagaatattcaatgaacagaaaggaaatgttattttttccccatttactgtagggcccttttcctttaatttattccatttgtatcatagctcatgaaattaagatattgcttaggatggttcttttgtattttatggagcaatataagttgggttgatggtagtcccatcgttattgtaattgatgaagagcatacacatttcaccatgtgaaaagcatggattttgattatgcaaagcaaac

SEQ ID NO: 10196 - DNA, 2321 bp, Zea Mays
tgaacacacacaccgtttgtgagcaagacaagacaaatcgctagtggaggagcaacgcgctcaccgcctagcagcaagacacctccgctaggtttttccgccgctgaccggggcattgcggaggcagcaagccacgctacagcgcggcggaacgggagctcggcggcggcggagcgccagtccgggtggcggcggctgatttggatggtgggttgcccagctggggttcagatctgaagatggccgacggcgggggcgaagaggggaatgcttcggcgcacaagggctccgcgcgccgccggggcccggtgcaggcgggcctggacgcggacgacctcctcactctcatgcacggctcggatcccgtcaaggtcgagcttaaccggctcgagaacgaagtcagggataaggatagggagctgggcgaggcgcacgcggagataaaggcgctgcggctgtcggagagggcacgggagaaggcagtcgaggagctcactgctgaattagagaaggtggatgagaagctcaagttgacagagtctctccttgaaagcaaaaacctagaactgaagaaaacaaatgatgagaaaaaggctgctatggctgctcagtttgcggcggaagcaacactacgaagagtacatggagctcagaaagatgatgatatgccacctattgaagccatccttgcgccgcttgaagcagagttaaagctttgtaggaaggagattgcaaagcttcaagacgacaatagagctttggaccgtttaacaaagcaaaaggaggcagcactgctagaagcggaaaggactgtacaaatcgcaatggctaaagctgctatggttgatgacatgcaaaataagaaccaagagttgatgaagcaaattgaaatttgccaggaggaaaataagatcttggataggctgcaccgccaaaaagttgcggaagtggaaaagctgagtcaaactgtgagagagttggaagaggatgttctgcaaggtggtgcagctgccaatgtcgttagggattaccaacgaaaagttcaagaaatgaatgaagaaaagaaaattcgtgaccgtgaacttgctcgagctaaagttactgcaaatagggttgctgttgtggtcgcaaacgagtggaaagatgctaatgacaaagtaatgcctgttaaacagtggctggaagagcgaaggttcctgcagggtgagatgcagcagcttcgtgacaaacttgctattgcagagagaactgctcgatcggaagctcaattaaaggaaaagtatcagttgcgcttaaaagttttagaagatggcttgaggggcactccaagtggatcttgtcgtccttccatggaaggaaaatgtataagtaatggacctccccgtcgactttcactaggtggtgctgatagtatatccaaaatctctccaaacggtgtgttaatgaggaggtctccatctttcaattcaagatcccccctctctaccagcagttgtttggtcctgaagcatgcaggaagaacttcaaagtcatttgatggtggtaccaggtcattagaccagggaaaagttctggggagtggacctcattcactcaatagatctacggatgcagttagagattgtgagacagctgatagttggaaggctaatgcagaagaaaaaagtaatgaaaccgcaaacaatgattcagctgacatggtctctggtgtactctatgacgtgttgcaaaaggaggtggtttccttgagaaaggcatgccatgagaaagaccaaactctaaaggacaaagaagatgcaatggagatgctagcaaagaaagtagatacattacataaagcaaaggaagtggaggctaaaaagaagaggcaagagatagctgctttggagaaaaaatttgccgcggtgtgccttgaacaagaacggcttggtaatttgagaggacctggaacttctcagactgtttcgggaagaactgcatcacgaggtggattgacgcgcaacctccaatagcatacatctaacttcaggcagatgaccctgcgatacctagatggggggaaagagtaggttttcatctgacatgacttgcttgtagtgaaggtaaatccttcggtcggtgaggtttaaccttgcggcccgccctcattttgtggaggcagtgctgtagtggttgtataggttggacgagcctgtgcctttctataggtagggtgaggtactgtgtttgtgttgttgcatcttgcatgttcgggttgtgaatatatcattgtattctgctgtggtttctcctttccactcaattcgtttgcctttggttgt

SEQ ID NO: 10197 - DNA, 1369 bp, Zea Mays
agatacggaggggcaaggtacgtggtgccttaccttggctaaggcactgaatctggatccctcctccacctccacgcgagcggacgacacgaagcggccatagccgcacgttgggatcccctccgctacgcctctcgatggtctccgccagcgcgccgccgccgcaggcccagtccgacgcggccgggtcgggggaggaagtgagcaagaaggtgcggaagccgtacacaatcaccaagtcccgggagagctggacggagcaggagcacgacaagttcctcgaggccctgcagctctttgatcgtgactggaagaagatagaggcttttgttggctccaagactgtcatccagattaggagccatgcacagaagtaccttttgaaggttcagaaaaatggaaccagcgaacatgtcccacctccacgaccaaagcgaaaagctgcccatccatatcctcagaaggcttccaagaatgttatgccagattttgcgggagtgtacagcttcttaggtagtgttttcgatccaagtacaagtggtcatctgcagaaacttaaggagatgaatccaattgacgttgagacggcactgttgttgatgaggaatctctccatcaatttaaccagtcctgattttgaagatcaagtcttgccaattcgtgatgccagtactcagcagagcaggcctgaagtccgaaccactatcttatagcatagactcttatctcctgacacccacaaagggatgaaagtgaggaagttgttgtccttatacagcgcttctgatggacctgggctagggagctcaagaagttcagctctagcgacgagcgcgcctttcatgtaaggaagcgtgcacccttcctggcctttcctatccccaaaagctcggccatctaggctcgtgaaatgctgcttcagatcaaggctgtccttggaaatgggaagatgaaaggagaatctgggtaatgccggttgctccctttcccattctttgttgagttcagctttctgattggtttctggtggccctcttgatacggaacttgtgcgctccgtctgagaaagcatgtgtgcaaagtttcatttgaggagttgaggcgatcatggcgctgtaaaatgcggcttatcttcccccttcagggctggtttggtggaccaaccctcaaacatttgcaattcctatgtacgtctgtagtgcatcaggtgttgttgcccacgtgtaaaaggaaaataaattcacaatgtaaaggagacttgtgcgttagcactaccatttgaatttatgaaatgtcaaagcagcccagcgagtttgtacttgccacatttttttgtcgctgtatcagcagtctggctactctggcatcg

SEQ ID NO: 10198 - DNA, 1689 bp, Zea Mays
agatacggaggggcaaggtacgtggtgccttaccttggctaaggcactgaatctggatccctcctccacctccacgcgagcggacgacacgaagcggccatagccgcacgttgggatcccctccgctacgcctctcgatggtctccgccagcgcgccgccgccgcaggcccagtccgacgcggccgggtcgggggaggaagtgagcaagaaggtgcggaagccgtacacaatcaccaagtcccgggagagctggacggagcaggagcacgacaagttcctcgaggccctgcagctctttgatcgtgactggaagaagatagaggcttttgttggctccaagactgtcatccagattaggagccatgcacagaagtaccttttgaaggttcagaaaaatggaaccagcgaacatgtcccacctccacgaccaaagcgaaaagctgcccatccatatcctcagaaggcttccaagaatgattcatcttccatccataggaactctggcatgaacgtgcctgtttcttcatgggctcatagttccatcccacaagctgttgcttcatcaatggtgaaagaagatttaggtgctggaacaccaggttcaaacaatttttgctcaagtagtactgaaggccttccaagaacttggcaacctgttatgccagattttgcgggagtgtacagcttcttaggtagtgttttcgatccaagtacaagtggtcatctgcagaaacttaaggagatgaatccaattgacgttgagacggcactgttgttgatgaggaatctctccatcaatttaaccagtcctgattttgaagatcaagtcttgccaattcgtgatgccagtactcagcagagcaggcctgaagtccgaaccactatcttatagcatagactcttatctcctgacacccacaaagggatgaaagtgaggaagttgttgtccttatacagcgcttctgatggacctgggctagggagctcaagaagttcagctctagcgacgagcgcgcctttcatgtaaggtctctcggcatataatttcagttcgacagacctcaggaggatagtgcctgccctggcgtagtagcaccgatgagtgatgaaggaggcgtttgcaccttttgtgcttctcgctagctccatgccttcggctgacgattgtgaagcgtgcacccttcctggcctttcctatccccaaaagctcggccatctaggctcgtgaaatgctgcttcagatcaaggctgtccttggaaatgggaagatgaaaggagaatctgggtaatgccggttgctccctttcccattctttgttgagttcagctttctgattggtttctggtggccctcttgatacggaacttgtgcgctccgtctgagaaagcatgtgtgcaaagtttcatttgaggagttgaggcgatcatggcgctgtaaaatgcggcttatcttcccccttcagggctggtttggtggaccaaccctcaaacatttgcaattcctatgtacgtctgtagtgcatcaggtgttgttgcccacgtgtaaaaggaaaataaattcacaatgtaaaggagacttgtgcgttagcactaccatttgaatttatgaaatgtcaaagcagcccagcgagtttgtacttgccacatttttttgtcgctgtatcagcagtctggctactctggcatcg

SEQ ID NO: 10199 - DNA, 2646 bp, Zea Mays
aaaccaacaagatgttgttcgaggcgttcccctcctccacgcaaccttctcccctccagatccaggattgccgggctccttgactcgttacctcgcgcgccctcggtgagctactttgtttcgatttagcgacaaatcagtttgcttcatgttgcgcaggcttagatctgaatgccggattcttcgtcttacggcttgaatcgagctgggaggctgtggatctgagcacgggaggtacaacaaatccgcgtgttctagagctagcgaaatcgcaaggctattagggttcctttcggagcgcgtctgaagcgatgatggctgaagtcggcggtgggatcgggatcttctctgccctgctccactcgggatgatgaatctgctgcgctgataattattggatgaatttcgataattattagatctaagagatgcgccgacttgaagaggcgaggtaaggtgcaacatgtataagacgtgacatgctatagaggcctttgccatggtgggtgcgctcgcatggcaggccacggtaataaaagaagatatttttgtgtcctgggggtggagatcgcacgggggattgttttttggccccgggttctcctccctcgtggtgttccgtgtccctatgtgcattggtctttgcgtggtttgcgatctcagctcacctacacgcttcggatttctgcatctaacacggagatctacaacaaaaacaaacatggagctacaacgagattcttaaggtacaatcgttaatttactgtaacaattaagtttcttttctcatctctgacgccacacttgtatccttatgttctctctctgcacattcaaagaaaccgttaaacccccatgaataatgacattcgacgtccactttgcccagctgtgttgaatttaatagttcaacaatttcagactcccatgaactcagtgaaacaagcgttactgatgtcctaagtgaaattttatgtcgcacttaagatggcgctgcgtctttatttcgttgtatattttattttcaacaactccaatctgattatgtcgtggcatttcatttgtatttatcatgtcaattgggatatttggtccttgtaagcttttggcatgtttgttagttaagccattgcaattgttggacttgtggagggttgcaaaatcgcagtgattctactattcatcatgtcatcatgtgaaatcttctaccacggagcacgtcaatcgtggctgggctgatggacgactgtgctgatggaactgattcgttacgtgggttgaagattttgtgccaaatatgcgatctggttggttactccgccctgctgacgttgttttagcccaggtgtttctgctgctcattccttgcattttttatggcactgtacatacaattggacaacctaatttttggcagttcaactcatttagaagttagaagggtttgagaaacattctcccctagaaatacatggaggtgtatctgatgattgttttttttgttacaaagtttcctagtttaatttgtatgatattctggaaattcattgtgctgtagggaggattttcagtaagcgctagtttgggttagatatatagatggattatgataagggctagctatatagattatgataatctatatactggtaagggcttatggattgtaataatctatatgtctagcccttactgaaatgtaatatagattatgggtttaggcctagcttatggattatataagcacctattatgtagattacagtgtttacagattgaaacggtagaatgggcgagttctgcatttctattaggactagtttttaaactcgaattctttttggaattaccctcaaatcaaacaagctcttagggtggttaggagtggattgaagagaatttgaggctagtcaaaattgaatagaaaagaatttaattttcttcaatcttctctaatgcacatgcaactgaacacggccttgattggtgcctcaaattttagaccatattggccatcattgtattctatttttagtagattatgcatatgcatatactcagtggagtttgaaatatgagtgagataggtaatggatatgggaggtgctggagatatagcattaatacctaaaaattattctcataagttaaggctcctgaatgttgatgcatgtgtaaagggccgttggacccttcatttcggaggaattagagtgcacttaataaagtaggctatttagtgtaaaatttgatattccatcattttcaaagttgaaatataagcttggagggataaaaattggtctctatatttttatactataatttatagtaaaatttgatactccattttccaaagttcaaatataagcttttcttcaattcattaagtggagggataaaatttggtttctatatttttatactacaatttataataacgctccaactaagggcctatgtggttcttggtgttaaaatttagcactacatttttaacacttagattgaaatatgagtgttaaaaggtgctacaagtgaagtgctaaattttagcatctaatagaactttagctccaaagtgtgctaacctttagtacttgttaaagtttagcatataacatccaagcatgtcttcagtatttc

SEQ ID NO: 10200 - DNA, 1569 bp, Zea Mays
ccacatctgaatctcacccacccacccacccccgcgtcccccacctcatggcgccggcgatggggctgaagcggcctgcggcgggagcaggggcggcagcagcgcagaccgtcacgctgtccgcgcctgccgtgcgggacgcggtgcgcaccgccgtaagggaggccgaggccacggcgaaggctaccgccccggccgccagggtcccggcgacggcggcagtgccggcggagatcgctagggatggggtgctgtgcctggaggaggtcgacgggaggcggtggagctatgtggtcgacgccgccggcgccgcggtcaaggccaagggaagggcgtccgtcggcggcgccttcaaggccgtcccgctccagtccccgatgccgcccgtcgaggaaatcatgtcctttataagatcatatgttgtgcccgaaggctttccagatagtgtcacaccttcatatgttccatacatgacatggagagcattgaagcatttctttggtggagcaatgggtgtgtttacaacaaggaccttgctcaactctgttggagtctcccaaagcagggctgcatctggtgctgtggctatcaactggattctcaaggatggggctgggcgtgttggaaagatgctttttgcccgccaagggaagaaatttgattatgacctgaagcagctacgcttttctggtgatctcttgatggagttaggagctgggatagaattagctactgcagctttcccacagcttttcctaccaatggcatgcatagcaaatgttgttaagaatgttgctgctgtcacttccacctctactcgaacaccaatttacaaggcgtatgcaaaaggagaaaacatcggtgatgttactgctaaaggagaaagtgttggaaacattgctgatctgttgggaactggaatgagcatactaatctcaaagagcaatccatcactggtaacttcatttgccttcttgtcgtgtggatatcttctcagttcatatcatgaggtgagatctgttgtactaaacaccctgaatagggcaaggttcactgtggctgtggattctttcatcaggactgggtatgtaccctcgctgaaggatggaaactcacaagagacaatatttaatccaccttggcgacatgagccagttgcaataggatcaagatttggagatgcgtttcaagaacctgcttcgtttcttgctataaaacctttgttcgaggatgagaggtatattgttacatataacccaacaaaggacaaggtatatgctttgctcaaggaccaagcaaagccagatgacattctcaaagctgcttttcatgcacatgtgttactgcatttcatcaatgcctcacatgctaacctgaatgcacggaagcgcatgaactccaaccggtcgtaccagtatgacccactgaacatggactttgtaccacacatcgaagagtcgtgcaagatcgttatgtcatcttatggagttttcaagaagaaagcaagagaacagggatggataatgtctgaatcacttcttaacccgggacgagcaagattgttatgac

SEQ ID NO: 10201 - DNA, 3066 bp, Zea Mays
ctcagaggcaggcgtgtagtacgcagtacacacccacaaagtcgcaactcgcgagcaatggacgcagcgggaggcgccaaagggagggatggcgtggacaagaaggaagtggggagcgggagcgggaacggcggcggcgacgccgggaagaaggtgccgttcacggggctgttccggtacgccgacggcacggacgtgctgctcatgctcctcggcacggtgggggcgctggccaacggcgtctcgcagcccgtcatgacggtcatcttcggccaggtcatcaacgccttcggcgacgccaccatcgacgacgtcctcaaccgcgttaaccaggcagttctgaacttcgtctacctaggcattgcaacagcggttgtttcctttcttcccatacttgctgtttatgcagaggtgtcatgttggacaatgacgggagaaaggcaggcaacgcgcattcgatctctgtacctcaaatctgtcctgagacaagagatagcattcttcgatgtagaaatgacaaccgggcaaatagtttcaaggatgtctggtgataccgtgctagttcaggatgccattggtgagaaggttggcaagttccaacagcttgtggcaaccttcatcggcggtttcgtgatagcattcgtgaaaggatggcttctatctcttgtcatgctggcatgcatccctccagttgtcatcgctggcggaatcgtctcaaaaatgcttgctaaaatatctaccaagggccaagcatcgtacagtgacgcaggcaatattgttgagcagacacttggggctataaaaacagttgtctccttcaacggggagaagcaggctattgcactgtacaataaactcatacacaagtcatacaaagctgctgttgaagaagggatcaccaatggttttggcatgggttctgttttctgcatttttttctcgagctacggtttggccatatggtatggcggaaagttggttcttagtaaaggttactctggaggagatgtcatcaacatcttgtttgctataatgaccggggcaatgtctttaggtaacgcaacaccctgcatggcagcctttgcagaaggacaatccgcggcatacagactgttcacaacgatcaagaggaaaccagagattgacccagacgaccaaaccggtaagcagctagaagacatcaagggtgacgttgacttaaatgacgtgtacttcagctacccggcgagaccagaacagctaatatttgatgggttctcgctgcatgtgtctagcggcactacaatggccatagttggggagagtgggagtggcaagtcaactgtgataagcctcgtggagagattctatgatccacaggctggtgaggttttgattgatggggttaacattaagagtttgcagcttgattggataagagggaagattggtttggttaaccaagagccgttgctctttatgacatctatcaaagataatataacatacgggaaagaggacgcgacgattgaagagatcaaaagggcagctgagcttgctaatgcagcaaatttcatcgataagttgcccaatggctatgacacgatggttggtcagcgtggtgctcagctatcagggggacaaaagcaaaggatcgctatcgcaagagcgatcatcaaaaaccccagaattctcttgttagacgaggctactagcgcactggacgtggagtcggagcggattgttcaggaagcgttgaataggatcatgctggacaggacaacacttgtggttgcacatcgcctgagtactgtgagaaatgctgattgcatatcagttgttcagcaagggaaaatagttgaacaaggtccccacgatgagctggtaatgaaccctgacggtgcttattctcaactcattcgtctccaagaaagcaaagaagaagaggaacagaaaccagagcggcacgtgtctgattcaaggtctaaaagtagaagcctctcactgaaacggtcgataagcagaggttccatggggaacagtagccagcattttttgaccctccccattggcatgcctggctcagttgaattgctggaaggcaacgatgagaattgggaggaggacgagaaagagcaggctcgtgacggtgaccgtgaggccccaaagaaagctccgatgggacggctagccagcctaaacaagccagaggtaccgatacttgtgttagggtcgctagccgctggagtccatggagtgctcttcccgttgtttggcctgatgatctccaacgccatcaagacgttctacgagccgccgcaccagctgaaaaaggacgcgagcttctggggcttgatgtgtgttgtgcttggcatcgtgtcgatactgtcaataccggtggagtatttcttgtttggggtagccggcgggaagcttatcgagcgcatccgtgccctgtcgtttcggagcatcgtgcaccaagaggttgcctggttcgatgatcccaaaaattccagtggagcacttggcgcaaggctgtcggttgatgctctgaatgtgcgacgtctagtgggtgataacttggccttggcagttcaggtcacctcgacgctgatcgcgggattcgtcattgcttttgtggcagattggaagctcacgttgattatcctgtgtgtgatgccactgtcgggtgtgcaaggttatgcacaagtgaagttcttgaagggtttcagccaagacgccaagatactgtacgaagacgcaagccaagtggccaccgacgcagtcagcagtatcaggaccgtagcttctttctgtgctgagaaaagagtgacgacgatttacgatgacaaatgtgaagcctcgaagaaacaaggggtcagaacagggatggttggaggcctcggtttcggcttctcgttcttgatgctgtaccttacatatggactttgtttctatgttggagcgcagttcgttcgtcacaacaagtctacttttggggacgttttcaaggttagaaaaaatgcatcttatcaccagcgttgctctctctctctctctctctctctctctctctctctctctctc

SEQ ID NO: 10202 - DNA, 2063 bp, Zea Mays
cccaacgacgccgtgagcccggcccgcaaggggacaaagcgggaggggtttctgatggcgccgaagcggaagcctgccgcggcggcgaagtcggaccctgatggcatattccgcggcgtctccgctttcatcgttcccaacggcgtccaggctcgccgcctcgtggtcgcgctctgtcttcccccacccccctctcgttggcgcctcgagtcgttattgtgcgcttaggcatttgggggatggtcgatgcaggtgtggaagcagaggctggtgcagatggggggccgagtcgtggagaagcccacgaagggcgagctggcgggggtcaaccacgtgttggccatggacgccaaggcgctactccgggagcttgacgccgcttggctccaccgcttccgcgggagtgtggtgtccttcgaatggattgaggagtgcctcaagtctggggagaggctgcccatccacaactttgcaatcaattacgaaaaggaatttaagccaaagaatgcggtttgcactggaaatctagttgcgtcacggccctctaaaaggaccaaaatgtcgtctgagtatcctggggaccaccagataattagtggaggggatagggagaaggaactagcagctggagggcctccaggtgcaagtgcacatgtggttgaaggatcaagtgcggggaagcagcctaaccagtatgcaagtagccaaagtagctcagcagattccaaggacaccataggttcgcatggtacatttggcatagaggaagcctcttctggaggacccagcatatatgctccagcagacttgaacaagaacatcaccaaaatttttggaaggcttatcgatatatatagggccctgggagatgacagaagatcatttagttattacaaggccataccggtgattgagaaattgccattcaaaatcgaaagtgctgatcaagttaaaggtctccctactatcgggaaatctttgaaagaccatgtatataaatgaaatagtcaccactggaaaactttccaagctggaacactttgagaatgatgaaaagtttattcggtgaagtttggggagttggtcctgcaactgcgctcaagttatatgagaagggacaccgtactcttgatgatctacagagagatgagtcacttacaaatgcacagaggattggattaaagttttttgatgatatcaagcaaagaataccccgacatgacgttagcgagatggagaaacttttacaagatgttgggactgatatcttgcctggggtaacaattgtttgtggaggatcatatagacgcggtaaagcatcttgtggtgacatggatattattataactcatcctgatggagaaaggggactgatagcggggttgacacatactttggtctttgcacataccctgggcgtgagctgcggcaccgcatcgacttaaaggtgtacccgaggaacagatatgcatgtggtctgcttgcatggactggaaatgatgtactaaatcggcgatttaggctactagcagaatccaaaggatatgtacttgacgatactggattatacctagctacacgcggcagtggtggaaagcatgctggcagatcagacgccatagttaactgtcacaccgagaaggatgtgtttgagacgcttggattcccttggctggaaccacatgagcgcaacctttagggcttgtttggaaactcaaacccctagggatcccaacctttactaggtaagcaatccatggggatgtcatttggataagccatttagttctccttataggacttctcattcctagggttgcctccctcttgcttccaaattaggccctagctgtttttgaacgttcatctagagaatgtgttttgtacagttagttatatatgttacctgtatctttaacctacctcgactttctgggtactaacagccttttgtactgattgttgttcatacttcccctttttgtgctgtcactagtaggcagtttttgttcagcttcgctttctatgcttctcccaagtcccaaccttgttgaaagcatgct

SEQ ID NO: 10203 - DNA, 1064 bp, Zea Mays
ctcccacccgacctctctctctcatcccttctcttccctctctcttctctctaccacgacgcgccaaggatcaagcgcacgcgacgcccgacgcccgacgccccgactgcctcgacccgccagcgcccaggaagacccgacgccgccaacgcccaggaagactcgaccgaaccctaacttcttgccgccgccacctcctcttactcgcatgccaccgtcgctcccctgggcgcaaacccgctgtcgctcagcccggcgcacgggatcgggcggtccggggacgccggcagtacacacccgtcgtcggtttccgcaggtggcgcgccctgatgtcacgcggcatgtgcccgatccgctgtcgctgtcgctgtaactgtttccaagattttgctctgcgagcttgctggatcctctgaccgcttccgcgggacgtgttcccgaatttccattttttatttttctttactacctttttctgtttactccattttttctcttaaaaaaataagagctctactatttaaacaagcggggcgtacaaatcgagcactgaaccttgtgagcccaggttcatttcttacgagactaaatatgcactgaaccttgtgtgccttgtagtatctgtagtatctctcttttaaagatcaataggattccaagatcgactatagtagcaccaggcctccactggcctaatcagtctctgacttagcttatattttacctcacatttcattgcatgtctctacaccctaaggtcctaaccactagttttttccacttgcaggtatgttccaatgtttgtggagatagagtacgatccgaactgctagtacacatctgttctaattgaagagcaactggaggctcttggaagagcaatagttgctggcaaggcaattgaaaatgagaattgatcttttttatgggcgaagtgttgaagatggctttggtgaaggaaatgtcttgttagcatcaagtaagtggcgacatcacaacccctacaagcttgtgccttaaaacaagaggatacaagaagttggagtgctttttgtgaagacttt

SEQ ID NO: 10204 - DNA, 1417 bp, Zea Mays
ctgcgttgaaggaagaagagggagatggggactccgatctgttggtgtcagaaggagagacgagtctgcgaaggaaggagtgagatccgatccagtccagtccagtccagtccaacggaaacctttgcgttttttaagcgagccacgccaataacggagaggcatgcaccgacgatcggcatttccttccagtggcggtgagaagggaaagggaggacagcagagcagaggtcgagcatcgcatcgcatcgcatcgcgcgctttgcctgccgcagcggctaacgaacgcgtggatcatcccttctattattaattaattgggaggagtgggagtgatagctgcagcacccagcgcccatcactgagcccatccggaaccctagcctcctcgtcgttgaatccaccacaccatgagcgggagcgcctccaggaagctcttccaggccgccaggtccatcgtcctctccgcttctcaacgctcctccttctccgtcctcgccgccgagggccgcaccgccgcgctcgccaactttggcaggaagatcctccccagcgcctgctcctaccacaggcagggatcccacgccgcgtcgggatggggagccatcgctgccgcagtccccgccgcagtttacatgctccaggaccaggaggctcatgctgcagagatggagcgcactttcatcgccatcaagcccgacggcgtccaaagaggcctgatttctgagattgtgaaccgattcgagagaaaaggctacaagcttgttgccatcaagctgattgtcccatccaaaggattcgctgagaagcactaccatgatctcaaggaaaggcctttcttcaacgggttgtgtgacttcctcagctctggccctgtacttgcaatggagagggtgtcatcaagtatgggagaaaactaattggtgccacagacccacagaaatctgaaccaggaaccatcaggggcgatcttggtgttgttgtgggaagaaacatcattcatggaagtgatggcccggagacagcaaaggatgagatcgccttgtggtttgaacccaaggagctggtctcttataccagcaatgcggagaagtgggtctatggggtgaattaaccagcgactaaatctcttgaggtttgcttttttcttttcagttttcacataattgccgacagaccaaggcaggatgtaataaagtagctaccgtcacctattacttttgagttggattgattgtggtgcagtaaggcacaaggaaaggaaggaatacaccgtgaaatttgttaatcttcatgagtctgtttttgctcttgttttcagtaaggcacaaggagtgcagtgccaagcaagcagaggggagagctgagttttattgccatcttcattcaagcctttgtacaggggctagctaaccaa

SEQ ID NO: 10205 - DNA, 1176 bp, Zea Mays
tgtcgcgccaccgggtcccccatcgatggccggaaccaggtgcagtgtaggtcaggcatgtcgagcccgacgacgacggagcagcagcgtgtcagcttcatcgtcgacggagaggagcatgagcagcagcagaagcatgacgaccttgttagccgcgccgccgtggtggcgagggaggtgagcaagcgggtgtctcgcctggccgtcgagggaggagaaggcgacgccgaccgcaaggccaacttcgacgccggggtggcggcagcgcggcgctcgttcggtggcacgcggacgctgccgccgccgcacgcgtggctggcgatcgaggacacgaggaggaggcagaagcaacagcagcagccggaggagcacggcgacagcgacgacccggaggcggagcagtgggcgcgtctcttccggggcggcgggatgcagcagcagcagcagcaaaggcggagcagcttcagcgtggtgcggcgcgagcgcgcggcgcgggaggcgtggctggaccacgcgtgggaggcgaagcggagctggcaccagcgcaacggcggcgcccccgacgcggacacccccgtggtggtggtggtcggcacgtcgccgaggtcgtcgtcatcgtcccactcccagcatcagcaggccggtggcggggtggccatggacgtggaggaggtccgcgcgtgccgggacctcgggctggagctgccctccgactgcaccgtggagatccagtgctacgggctgtccggaggcgccggcagccccggcagcggccccgactcaccgtgcgacggcgccgactcctgccctgatgcagcaggaggaggagcggatccgatggacgtgaaggctcggctcaaggtgtgggcgcaggcggtggcgcttgcatccaccaccacccatctcgcctcatgactccatataccgccgcaacctccagctcggccgggacagcactgcactcaaacgaatcgaagcaaagtagccgagaaaacaggagtgtcgtctctagctataacgaatcaaatgtagactcccattttatatccatatacactactaagtacttactcttcgatttcgaataatgtaaacccctagtgtgagagatatctaagcgtctgtagcttgtgtgtgcaaggaattgtatcaatgtgaggttgcctttttaacaaa

SEQ ID NO: 10206 - DNA, 1141 bp, Zea Mays
ataaatataaatggagttctttgtgtcaaatgaacgctagctgaaccctagccggcggatctccgcgggcggcagtcaggagtggaggcgtggtcgcacgggcgaggtcgcaataggagaggctcagagagatggggcggccttacgcggtgaaggggcggaagaagaagcgcaagctcgaggaggcggcggcggcctcggacgctgccccgcccgtcgaagaagcggaggagctgccaccgccagaggtgagaagcggcgaggaaaagagcagcgaggaggatgaggcagcagcgggggaggaggagcacgcggcggcggacgggctcccaatcctacccaggacggttgatgggaagcggcgacccggcgccatcttcgtactcgagagggcctgcctcgaggtcggcaaagtcggcaagactatgcaaattttgaactctgatgatcatgcgaattatttgaggaagcagaatcgcaatcctgcagattataggcctgatatcattcatcaggctctactagcaatatttgatagccctctaactaaggctggaaggttacaggctgtttatgtgagaactgaaaagggcgtattgtttgaaatcaaacctcatgtccgcatgccaagaacctttaaacgtttctgtggtttaatgtcacaattgttgcaaaaactgagcattacggcagttggaaagcgtgagaagcttctcaacgttgttaaaaatcctgtcactcgttatctacctgttggtgcacgtaagattggttggtgccatggcccatggaaagatcgacaaggaatatacagatgattacatacaaatttgcaactaccctctcagtgctgcctgctgtttaaatcggatatgcagtgccctggagcagaagtggaacatccaatgaggaacttttgacaagcatgggaatcttgttttattatatacatcttacatgtacttccctctgcttatgtacaatgtttgaaagttaaaaccaaatgtttcagtgtggcattatgacgtgttttagacatcaattcatggctttaaactggtttgttcagagtcattttagcaaaaactgagtgttctgcatgccaaacttcggttaactcaaacattggtgtcagatctta

SEQ ID NO: 10207 - DNA, 1215 bp, Zea Mays
ataaatataaatggagttctttgtgtcaaatgaacgctagctgaaccctagccggcggatctccgcgggcggcagtcaggagtggaggcgtggtcgcacgggcgaggtcgcaataggagaggctcagagagatggggcggccttacgcggtgaaggggcggaagaagaagcgcaagctcgaggaggcggcggcggcctcggacgctgccccgcccgtcgaagaagcggaggagctgccaccgccagaggtgagaagcggcgaggaaaagagcagcgaggaggatgaggcagcagcgggggaggaggagcacgcggcggcggacgggctcccaatcctacccaggacggttgatgggaagcggcgacccggcgccatcttcgtactcgagagggcctgcctcgaggtcggcaaagtcggcaagactatgcaaattttgaactctgatgatcatgcgaattatttgaggaagcagaatcgcaatcctgcagattataggcctgatatcattcatcaggctctactagcaatatttgatagccctctaactaaggctggaaggttacaggctgtttatgtgagaactgaaaagggcgtattgtttgaaatcaaacctcatgtccgcatgccaagaacctttaaacgtttctgtggtttaatgtcacaattgttgcaaaaactgagcattacggcagttggaaagcgtgagaagcttctcaacgttgttaaaaatcctgtcactcgttatctacctgttggtgcacgcctttcatttagtgctgagaagtcagtcaacttgtttgactatgttgccaaatccaatgacgacgaacctcttgtgtttgtggttggtgccatggcccatggaaagatcgacaaggaatatacagatgattacatacaaatttgcaactaccctctcagtgctgcctgctgtttaaatcggatatgcagtgccctggagcagaagtggaacatccaatgaggaacttttgacaagcatgggaatcttgttttattatatacatcttacatgtacttccctctgcttatgtacaatgtttgaaagttaaaaccaaatgtttcagtgtggcattatgacgtgttttagacatcaattcatggctttaaactggtttgttcagagtcattttagcaaaaactgagtgttctgcatgccaaacttcggttaactcaaacattggtgtcagatctta

SEQ ID NO: 10208 - DNA, 2633 bp, Zea Mays
gggtagtgcgcgcgggcgtggtggtggtgggtgctttgactgcaggcctcggcacggtaggcacaaatcattttggccgctgcgtcgcgttgggagcagtattctactgtgcctgcgtcccgacaagcgaaaagaagagacgggggagggtgggagaacggataccgaaaggggtaggagagtgagcagccagagaacagggaggtagagaggaggaggaggtagaaggcgaaagaaggggaaccaaatcttggacgggaacacatagatttctttggtggaggaaggaggagggcaacaagaggaggttacaggtagcccaatagatctactgctgttgagggagttgatgcaaagctgagttgctgcgcgttggctttctttagagatggcttcagctggtgttgccccttctgggtacaagaacagcagcagcaccagcattggtgccgaaaagttgcaagatcacatgaacgagctaaagattagagatgataaggaagttgaagcaaccataattaatgggaaagggaccgaaactgggcacataattgtcaccactactggtggcaagaatggtcaaccaaaacagacagtgagctacatggctgagcgcattgtaggtcaaggttcttttgggattgtcttccaggccaagtgtttggaaacgggtgagactgttgccataaagaaggttcttcaagacaagcgttacaagaaccgcgaactgcagaccatgcgcctccttgaccaccctaatgttgttgctttgaagcattgcttcttttcaacaactgagaaggatgagctttatctaaatttggtccttgagtatgttccggagacagttcatcgagttgtgaaacatcacaacaagatgcaccaacgcatgccacttatttatgtgaagctttatatgtaccagatatgtagagcattggcttacattcatggtactatcggtgtctgccacagagatattaagccacaaaatcttctggtgaacccacacacccaccagcttaaaatatgtgactttggtagtgcaaaagttctggtcaagggggaaccaaacatatcatacatctgctcgcgatactatagggctccagagctcatatttggtgccactgagtataccacagcgattgacatttggtctgctggttgtgttcttgctgagcttatgctagggcaggtgaaagtggtgtggaccaactcgtcgaaatcatcaaggtccttggtactccaacaagggaagaaattaaatgcatgaacccgaattacacagagtttaagttcccacaaatcaaagctcacccatggcacaaggtattcaacaaaaggatgccgccagaagctgttgatctggtctctcggctactccagtactccccaaatctgagatgcactgctgtggaggcgcttgtccacccattctttgacgagcttcgagatcctaatactcgtcttccaaatggccgcttcctgccaccccttttcaacttcaagcctcacgaattgaaaggagtcccagcagacattgttgcgaaattggttccagaacatgcgaagaagcaatgctcttatgttggatcgtgagatgaccgtgccttgggactggaacctgaggtcgcaatcgtgcatttcccctgggatgttggatgatcttgaggcatgcgagcctgtcgttgaagatgcaaggttacctacttgtacgacgtacgccaatgcgacctgtgtagctgtgagtagtctaatgttgcagtgacatgtaatggcgcacccccgtcctactaacagatgcttactggagattgccatagctgatcttgtaatttgttatagggcagtatgaatatatttatggtagcttgaatctatttgtggattcacttcgtttttccatgtttccttgtctccagacctggacttggactgctattgatttttgtttcagaattcctagctacctgttgcctagtgcttcccagcttgctcctgtcgattatttgcacactggcgatggtacctgttcttgattgttgccgaaaaaccttttggttgagatgtagtacattgttatttgatcagtctggaagtatgctgatttgatcgatcttatcagggacgaagccagataacaaagtcgttgggcagttccactaatcatcatctaaatacactagttaacaatatatttgtatagtattttctaaattttataggggtcagctgaccccaacaaaacctcctagctctgccctggctcttatcagaaacttgcactattgcagcgtttgagacgactgaggaaatgtgacgcgcgcagatgctggttcgtaggacttcttttgctcctttgggagagggaggagtcataaactgaagccccggtttgtagaaaaatggcttctcgtgaaatgtttggtatagttcttcggtttcttaaaaactgctcttcgtgaaatggagtatggtgggctcttttatcgaagttggctgggcggctggggcacgtataacccaattaaatgagacattttttgagaggtctctaaagagttaagtgaaaaaaattaaggaacaagctctttgtgaagagtctttctctacataattctctatacata

SEQ ID NO: 10209 - DNA, 1227 bp, Zea Mays
aggccacacagaggggcaaccaaagtcgttgccgcagaaaaaaataataatcacaagcgttctaccggtggaggacaaccattaatcagcaggctttggggccaaaagaaacggagaggagaaaagcgggggcggcaagcaaccacgggcggagctcggagcgtcctcctcctcccgtctataaattcccctccttttcttcctccatatataggggccatcagatccaagaagagggaagagcaccaaggaccttcggcgcccgttcaggatccacatcttcccgagcgagttcttggttgacctcttcctcttcggaccacctccaaggctcttggtgtagcttgccactctcaccaatcaagttttcatgtctgatctcgacattcagatcccaactgccttcgatcccttcgctgaggccaatgctggggactctggtgcggcagcagggtcaaaggactacgtacacgtgcgcatccagcagcgtaatggtcgcaagagcctgaccaccgtccagggattgaagaaggagttcagctacagcaagatcctcaaagatctcaagaaagagttctgctgcaatggtacagtggtccaggacccagaacttggacagctccagggtgatcagaggaagaacgtctcgaatttcctcgtccaggccggcattgtgaagaaggagcacatcaagattcatggtttctgagcaaccgccgggtccatagcaaaccaaccctgcatgcagggccagcttattatatataatatctgaggtggagcatatctatctggctgtgtactgcaagcaggcctagtacgccgcctgcgcgttcctcctattacacatataggcccctccctgcgtgtatgcttgttaccgtcgtgtcgaaccttgtactacgaggctccatcgaacatcgatggcttgcttctttatcagaacatgtttgaataaacgctatttggtaatgctgtgtgtcgaatgcttccgctgaattcaccaagtcctgttggatgggcggtatagtttaccaggctgacttgaagtgtcaaagacaattgatacggttaagcaggtgaagcccgcacagtcgccttgaagcatgctgctggcagaatacgattagatgttaatgaggtgtttgttggaagagtcaattcattcgtgaagcattatgacttcattacgactttattaatttggaggaatgaattcatttcatc

SEQ ID NO: 10210 - DNA, 916 bp, Zea Mays
atgggcgggcgtggggctccggacgcgacaaggatgctggtggtggctgtggtcggcgtcatggtcgccgcggcggctgtcctgtgcccggccccggcggcggctgggaagttaggcaaacaagccaaggcgctggtggccgtcaaggcggcgctgcatgatcccggcaacgctctctgggactgggacctcaagttcggcaacgacccgtgccactggaacatggtcacctgccatgagggacagattcaggagttgtctatgacgaacaagaacctctccggcacactgtcgccggcgatcggaaaaatcaggtcgctgcgttatctgttgttacaccagaatgctatctctggtcctatccctgacaccataggaaggatgaagctgcttgaagtgcttgacctgtcgaacaatcatttcagtggaagcatcccaagtacgctgggcaatctggccaaccttcagtacctgagattgaacaataacagcttatctggacctatacctgaatcactagccacggatgctctcatgatcttcaacctggatgtttccttcaacaacctgagtggtcaccggccggcttttcgaacgtggaatgtctttttcgaaggtaacccattcctaagtgatatcggctcagagtcaattgctgcgcccgtggctccaaaggatgttaaagaagaggatttacaattcatgagtaaaagcatttttatgctgctagtgtgcatagcaattggttgttcactggttgccgtggtgactggagctgtgctgttttggaaaaggcgtcagcgtgagcgagtctttgcagttgcagatgatgaggatcctaatgttacatatgctgggatcgtccagctctatcttcttattaacatgtttgccattacataagaaatttgtttag

SEQ ID NO: 10211 - DNA, 948 bp, Zea Mays
ccctgtgcgcggtggtgcgtcgttgccgagagagaggtagctagccgtaccgcggcgccatgggcgggcgtggggctccggacgcgacaaggatgctggtggtggctgtggtcggcgtcatggtcgccgcggcggctgtcctgtgcccggccccggcggcggctgggaagttaggcaaacaagccaaggcgctggtggccgtcaaggcggcgctgcatgatcccggcaacgctctctgggactgggacctcaagttcggcaacgacccgtgccactggaacatggtcacctgccatgagggacagattcaggagttgtctatgacgaacaagaacctctccggcacactgtcgccggcgatcggaaaaatcaggtcgctgcgttatctgttgttacaccagaatgctatctctggtcctatccctgacaccataggaaggatgaagctgcttgaagtgcttgacctgtcgaacaatcatttcagtggaagcatcccaagtacgctgggcaatctggccaaccttcagtacctgagattgaacaataacagcttatctggacctatacctgaatcactagccacggatgctctcatgatcttcaacctggatgtttccttcaacaacctgagtggtcaccggccggcttttcgaacgtggaatgtctttttcgaaggtaacccattcctaagtgatatcggctcagagtcaattgctgcgcccgtggctccaaaggatgttaaagaagaggatttacaattcatgagtaaaagcatttttatgctgctagtgtgcatagcaattggttgttcactggttgccgtggtgactggagctgtgctgttttggaaaaggcgtcagcgtgagcgagtctttgcagttgcagatggctgaacaccagaaacatcctaaagagaaagaactttaaggttcaaggcgacaattacag

SEQ ID NO: 10212 - DNA, 891 bp, Zea Mays
  misc_feature (890)..(891): n is a, c, g, or t
atctccagttgcagatgctcacttcggcttggcgcaaataattccggcacacaaaaaaaaaacgcaaggatttctcggttcctcttcctcctcgcgcagtcgcgctccccacttcaccgagcatcccgaaaaaaagctcggccactgcgccatctcgcccaccaagcaccagccaccagcagcggcgccatggccaccgcgccctacgcctcctccctcttcctggcttcctcccccatctcaactgcgccacgagccagcgccgggtccttccctccctccgcgcagccgttctccatgcgcctccggcctaggccgtcaccagccgtcgcggccgccgtccaggcggagcaccagcccgcggtggccgcgacgccgaagccgcccgcgctaccgttccgcgtgggccacggcttcgacctccaccgcctggagcccaacctcccgctcatcatcggcggcatcgacatcccccacgaccgcggctgcgaggctcactctgacgattttcccggattccgacccccgttggaagggcgccgattcttcggtgttcatgagggaagctgtgaaattgatgcatgaagcaggctacgagctgggcaaccttgatgctacgctgatcttgcaaaaaccaaaaattagcccgttcaaggagacaatcagattgaatctgtgcaacctacttggggcagatccatctgtggtcaatctcaaggccaaaacgcacgagaaagttgacagtctaggggaaaacaggagcatagctgctcataccgtagttctcctgatgcggaagtagaaaaaaaaacaaatagtacctaattgtatcgtgctacaagaaaaaggtcgttaagttatacttgcccttgttaaatgctctagccagnn

SEQ ID NO: 10213 - DNA, 1001 bp, Zea Mays
  misc_feature (1000)..(1001): n is a, c, g, or t
atctccagttgcagatgctcacttcggcttggcgcaaataattccggcacacaaaaaaaaaacgcaaggatttctcggttcctcttcctcctcgcgcagtcgcgctccccacttcaccgagcatcccgaaaaaaagctcggccactgcgccatctcgcccaccaagcaccagccaccagcagcggcgccatggccaccgcgccctacgcctcctccctcttcctggcttcctcccccatctcaactgcgccacgagccagcgccgggtccttccctccctccgcgcagccgttctccatgcgcctccggcctaggccgtcaccagccgtcgcggccgccgtccaggcggagcaccagcccgcggtggccgcgacgccgaagccgcccgcgctaccgttccgcgtgggccacggcttcgacctccaccgcctggagcccaacctcccgctcatcatcggcggcatcgacatcccccacgaccgcggctgcgaggctcactctgacggagacgtgctgctgcactgcgtggtggacgcgattctcggcgcgctggggctgccggacatcgggcagattttcccggattccgacccccgttggaagggcgccgattcttcggtgttcatgagggaagctgtgccttgtggtatgtggagtggagaacatccttgagaacgcgtgaaattgatgcatgaagcaggctacgagctgggcaaccttgatgctacgctgatcttgcaaaaaccaaaaattagcccgttcaaggagacaatcagattgaatctgtgcaacctacttggggcagatccatctgtggtcaatctcaaggccaaaacgcacgagaaagttgacagtctaggggaaaacaggagcatagctgctcataccgtagttctcctgatgcggaagtagaaaaaaaaacaaatagtacctaattgtatcgtgctacaagaaaaaggtcgttaagttatacttgcccttgttaaatgctctagccagnn

SEQ ID NO: 10214 - DNA, 2342 bp, Zea Mays
cgcaagcggccgcattgacaaaacgcagcagcaccgcaatttggcgtcctagttgccatgtgggggagccgagccgaggtcgggtgggagtgggaggctgtcccctacaccagccccagtcgtcgccgcgcaccatcacagcctcctccatctatcccctccctctcgagtctcgcctgctgctgctcccttcttcttcttcctcctcctcctcttcttggtcttggagctggaccttcctcttcccctcgttgatcgttcgcggttgccgattcgccatcccctccaaatcaagacaagattgagtgggtcttgggcccctgtccctagctgcattgcgaattgaggcgccaatttgggagacgactgcattgatgaatgccggaggccacagcactcactgatttagggattcgatgtcacgggcacccggatgtcattgccgatcgcccttgtagtcggcattgccggtggcgccaccttgctcgcggtggcggccgtgctgctcgcgctctggtgcgctgcgcggatgagggcgcggcgtaaccgcaactccgacactggctcctccgacccctcgacgctagtggagtggggaaaaggggggcgcagctcgttggcaccggacctggagcatcaggttgcgaggcaattctcgctggaggacctggtgcaggccaccaagaacttcagcgacacgaacatcatcggcgcggggagcttcggattggtgtacatgggcctgcttctcgatggcactgttgtcgcgatcaagaggcgcgtgggggcagcgacgcaggtgtttgctgatgaggttaggttgctttcagagattcgtcaccgaaacattgtaactctcattggttactgtcaagaagggggtctacaaatgctggtgtatgagtacctgcccaatggcagtgtctgtggccatctgtatggtaatgtttttatcttgttaggaaaaaagattgtagcctactagcctttcttgctttattacctctgaagcttcatacggtccaccagataacaggaaaggctctgcaacacggcttgagttcaaacaaaggctctcaatagctattggggcagctaaaggttaattagaggatctgacgatgccggcccatcgcgtgggttcagtaacagtgtttaccaagatccagaggtacagtcgatgactcagttctctgaaagcagtgatgtttacagctttggagtttttcttttggagctaattactggcagggaagcagcttccttgatacctacagagtccagagaatatttggcacactgggtaatttctactgacatgtagctgtaagttatctagaaaggaaagttatggagttctgcttaatctccagcaaaatatcattctggtgtttagtgtacctaactgtgaagtcaggccacacatttccaaaacttgaaaacagctagagcataaactgttttcatagttattaggagtgagaagtgtttgtcatgttgtaggatcacataaattcttattaggatatattattgaatactgaaagtccttgttgatgtttgataatggatacaactaattgtaccttagttgagacactttttaagaggaaaataacaatttgaaaaaagtgctgcaattctcgtgcataaggatatttcttttacgcgaaagggccactaccgtaaaggatatttcttttactcactgcttactgaaaaaacattttcttgtcacattgaatgatcgaaagatggaagcgcatttcagttcaaatgaactgattgacccaagattagccggcaacttcactgcagaaggtatgaaggagcttgttggtctggccttccaatgcttgaacccatcatcaagacgccgaccgaggatgaggcttgttgcgactgaactagaccggattctagagacggagatgtccatgacaacgttcatgggcgacggaaccaccattgtcacgctcgggagtcaattgttctcgtcgtgaagcgacgttgggattgatttcatgtctgctatttgatgacatgatgattgtgtgtgagagcctaacaacagctattgtttctgccatgctgttcaggctctgcattgttatgaaatgccatgtatggtcatttttaagcttgtcatggttgataggtaggagtgagaagaaatagagctgtatgtatgtctcttttttcttctttttgttgcatgggagaagaattgtatgtaaatcttttagattgttaactatccttcaatgtatttgcagattgttcttcctttcggtgttttaatttctgaaagggctaacttgtgctaagttttttctgctgat

SEQ ID NO: 10215 - DNA, 562 bp, Zea Mays
agagtcacgctagtcccaaagaaacaagcgagtacccagagcagccgaccctggctagctctagcttgtgtagttgagttcttgtatttgcttgaatctgcaaaaaaaaactagagacaaaaggaggacgggaaacggagagaaggatcatggactacagcatgcagggatccaaggactcgtactcgccgcaagttcacaaccacttgtacccggactctcagccagggctgtatcctcctccgccgcaggggggctacggctacggctaccagtaccagggctaccttggcgaatcggcgaaccctccttattactactacactggcagctggcccgagcagcccccagctccgtccgacggcgccccctttcgctaccgctacctgcaggaccaggacgatgccgactgcatcaccttcctcagaggatggtttcccgtgtgttggagtgctgaatgaaaacttgttcgagtttttgcctgagtcagtcagtcggtcggtcgtctggcaaataaaacaagaaactactacaaactgactgacatgtctgcttgcgcgcg

SEQ ID NO: 10216 - DNA, 2110 bp, Zea Mays
cctctctccgctgcccctcctatctcctcgcgagcaccgctggcctcgcttaacggcctgatctcccagccgccgcttccgcctcgcgtcccaccggtctccatctacatgcagccgcgctcgccaccgccgtcggaggcgcctgcgccctccgacgccatcatgatgcccggcgtgggcggcgtggagccggccgtcacgttgggccaggtgccgcgctggagcgaccccgaccagcgcatcttcctcgcctccacgtccgaagaggcgtccgcggaggacgacggatccggcacgacctctgcgtctggcttcatctctttctccgacccgctcacggtcgacgacggcgccgtcgggggtggccacgccgggggtgcctcgcgcttccccgtcgaccaggagatcaactctaggatctatctctggcgtggccagccctggaacctcgaggtcgacgcggtcgtcaattctaccaacgagagcttggacgaggcgcacagtagcccggggttgcatgctgctgccgggtcagggctcgccgaggagtgcgccaccttgggaggttgccgaactgggatggccaagatgaccaatgcctacgatctgcctgcaaggaaggtcatccataccgtgggccccaaatatgctgtcaagtatcacacagctgcagagaatgcacttagtcactgctatcggtcctgcttggaactgctcattgagaatggtcttgaaagaagctaaaaactaccctcgtgaaccagctgctcatgtggcaataagaactgttagacgtttcctggagaagcaaaaagacaaaatagctggtgttgttttttgtactacatcatcatctgacacagagatatacaaacgattgctcccactatatttccctcgggacaagcaggaggaatatattgcgatagtaaagctcccagctgatgttggggatgagaatggtgagacggcaatagatgaaaggaaaataagaataagacctttgcctgctggtgtgctagacagaacagtgtctgcaaatcttgttgatcttcctctttccaattctggatcggcattgaagaggggttctttcaagttggattcatacttggatccttcatttatgtcaataattaaagatccagatctgcggcgcaaggagcagtgggaaaaatccgctcaagctcaaaagggatttaattatgctaggttatttggatatggggatctaggttgcccttcattatctgcagcagaggaatactcacttcattcacgatacctcactaaagcaaattctcttaatctttcagagattgctgaaatgaaaataatttatcgtggtggagttgatattgaaggacgcccggttatggtggttgttggtgcacactttcttcttcgatgccttgaccttgaacggtttgttcttcatgtagtgaaggagtttgaacctttgattcagaagccatatacaattgtatatttccactccgcagcatcattacaaccgcaaccagatttaggatttatgaagcggttacaacaaatactaggacggaaacatcagcgcaaccttcatgcaatttatgtactccacccaacgttgggtttgagaacagctgttttggcaatgcaaatgtttgtagatggagaggtctggaagaaagttgtatatgtggataggcttgtgcagctgttcagatatgtaccacgcgagcaacttacaattcctgactttgtttttcagcacgatctggaggtgaatggtgggaggggcctaattgtagacccaagaacaaagcacatataccagaggacgtccagttgatatatgccagttctgaggcctgaagtttgttagttcttgcactgtaccattctaatgttcacttgtaatttattccacgtgttcatttctgtacctagttaagttagtctattccattcgttcgttctcctgccttgtgcaagggggatttctcatctgtatctgttgatatgtagaactgaattaaaactggtgtctactctagatgttgttcaaacttcacttgtcctgtacaaattttggcagttgatatgttcaactttatttcaagtttca

SEQ ID NO: 10217 - DNA, 1471 bp, Zea Mays
aagaaataaaccaactgaacactcagttggaaggagctctgagaaaaaaaaagctgctccgggaagaacaaggctttgcagtgtcttgttttggagagcaaaggatcatcgtcaagtgatggccaagtcaggggcgctagaacttgctcggagcaccggagggtcgcttagcaaggaccaagtcaaatccgccgttgatcagtatgtcaaataccacgacctccatggaggcaaacaagaatcaaggaagtcaaattacaccgatttggcaaacaagtactatgatcttgtcactggcttttacgaatatggatggggcgactcattccatcttgctggcggatatccgggtgagacttcccgtgaagccattaagcggcaccagcattttttggcactacaattggggctcaagaagggtatgaaggttttggatgtgggatgtggaattgggggacctttaatagaaatcgccagattcagctcaacatcgataactggactgaacaacaatgactaccacatctcaaggggcaaggagctcattttttcagcaggtttgagtgagcaatgctgcttcttgaagggggacttcatggacatgccaatatctgataacacctttgatgcggcctatgcaatacaggctacatgtcatgcaccagatgcacaaggcgtctatagtgaggtctaccgtgtgctgaaacctgggcagtattttgcactggatgaatggtgcttgaccgaccgatttgatcccaacaacgccaagcatttggccatcaaggctgagattgagctcggtgatggcctacctgacatccgtaccactcgccaatgtgtccaagctatgaaagatgcaggatttgaggtcgtttttgcaaaggatcttgctcaagtttttccttgcccgtggtaccgggtgatggatcccacctacttttcatgggctcacttccaatgcacacgcccaggacggatcgtcacccgtgcaattgtcaatacactagagttcctccgtattgccccagcaggcagcatgggagcctacaacgtcctgatgagtgcctctgatggccttctaaaaggtggccgggaaggtatcttcacagcgaccttcttcgtcctgggccgcaagcctctcaaggaagttgatatagtaagcctctcaaggaagttgatatagtgaacggcggcgtcctttgagctgcaagattagtatggggctgtactcataagagctatgaatcatggccaacgtgttctgtgctgaggtgtgtttactggattgtcttatgggttatggcccttgcgctgtgtgctggcctgctgggtcatgttcccgcagtagcctgtatctgcttgtcagcttgtgtgctgtgtactatgcactatctgaataaaaatgcagttttacgcattgttattaatcgcaccatttcttggcaacacgactttgatcggaccaatg

SEQ ID NO: 10218 - DNA, 1542 bp, Zea Mays
gcttctggcgatctgaggtctgaccatggccgcgccggggtcagcgatcaagcacaccttttcttctctcctgaagcaaaaaccaccaaagactagtcctacaaaatctaggggttctatggctgtttcaatgagggaggtggatcctgtttttcaaggtgcaggtcaaaaagatggattggaaatatggcggattgaaaagttacaggctgttcctgttcccaaggaatcatatgggaaatttttcacaggagattcctacatagtactgaagacaactgcccttaagaatggttcttttcgtcatgatatccattattggcttggcaaagataccagtcaggatgaagctggtacagctgcaattaagactgtggaactcgatgctgcccttggtggaagagctgtccaataccgtgaaatacagggaaatgagactgagaaatttctttcatactttaagccgtgtattataccagaggaaggtggtgttgcatctggtttcaggcatactgaagtaaatgagcgggagcataaaacacgattatttgtctgcagaggaaagcatactgttcatgttaaagagatacaaaatctaagatattccaattcaatggatcaaattcaagtattcaggagagggctaaagcacttgaggttgtgcaacatcttaaagatacaaaccatgaaggaaaatgtgaagttgcggcagttgaggatggaaagttgatggcagatgctgatgctggtgaattctggggtctctttggcggatttgctcctttaccaagaaagacattttctgaactcaacgggaaagattctacttccacttcaaaattgctttgtgtaaacaagggccaatttgcccctattgattgcgaaattctaaaaagggagctattagattcaacaaaatgttacctactagactgtggttctgaaatttatgtctggatgggtagagaaacaactcttgaagaaaggaaacgaggcggctcagctgctgaggaattactacgtgaaggaaaccggcaaaaatctcatattattcggctcatggaaggatttgagactgtcacattcaaatcaaagtttgataaatggcccaagaaagctgatgcagttgtgtcggatgaaagcagaggaaaagtggcagctcttcttaagcgacaaggatttaatttcaaggatccagcaaaagctgctcctgtaaagcaagagcctcaacctcagattgattgcactggcaacttacaggtttggcgcgtaaatggcagtgataagactttcctttcgttttctgagcaatgcaagttttatagtggagactgctatatctttcaatacacctaccctggatatattggagatgaatgtcttattggtacctggtttgggaagaagagtgtccaggtaactgtttaatgcattttctatttgctgtattgcacatatgattgatacattgccatgaatcttactcaacgtctcattatttagtgcatgtttgtactttatcaacaatgtgctttgtgttgt

SEQ ID NO: 10219 - DNA, 221 bp, Zea Mays
accaaatcatctgctccacagaagccatcagcgcctcgaccggacagtgacataggtgatccacagatacttcatgtacacaacaaaagatttggaagagtggtcagaaaatcatgattcctttcgccacgagcagaatttggttcagtggactgagaaaaaacggccatatgttgaagcccttttcatcgtggtaaccaatggtgtcggtaaggattttg

SEQ ID NO: 10220 - DNA, 4555 bp, Zea Mays
tcctcactctcctcgccagttagttggctgtaccccaccattccccgctcttaaccggcaaacaaacaaaacggaaaacaagccacggaaaaaagaggaaaaaaagctcgagaagagcaaaccctaggttcccgtggcaccgacgaaatcctaattcgcccgcattggatcgcccaggcaaggggcttttggcacagatcggcgctcccccgtcctcggattcgattcctctgctcaatttggggccgatccgtggctcggaccttctcgccgctcggcgactctctcatcttttttccccgatccgtctgtgagacactaagcgctttgccgcggtcgcccctgctgacgccaccggcacaaggaggcttgtcgcccactctggtccgccaccgacgcttgacgcctccagggcttcaaggattgctgatgagaggatgattgaaattgtttctgttaacttgattcaactgaatccgtatgctccacgcttccgctcctgatctggggtcgggactctatgtatgatgggaggtgaaattctgcagaaatctgttctcttgacctgtgggctcgtgaatggaatccagtggcggtgataaacccactgcaacagatgctaccgaatcagtggtgggtttagatggcgaggagactttgtctgagagggaatctgttggagcaagacatggccctgccttgtctaatgggggtggaaaggaggctccttcgagcagttcatctgcagggaataagaggaagcacggcatcttgggttctaatcaaatggaactcaatgaaccagggatgccaagttccagctcaggtgattccacatggagtttagatagtctggatgaccgtcaccagatctcattgttgagaagtaagaatgaacactctgaacattcagttacttcagctggagttacagtgatcaggcagcctcgtggcgtcttgaggttaaggaagcgggatcagaatgtcagtactgagagttggactggtggtcataatattccacaagctaatggagttcctaggtcttcccaactcctgaggcggaacaagaaggggaaatcaactgtgttcgagcagaatagaattggtggtgatgaacctgtcagttgcttgagaactgagaatggtacttgtgatcaggataccggctccaagttctgttctgaaactgagttctcagctgaaaagctgtcacatctttcaggtgaagccccaaaagctgttcatgttgacaagggtgggtgtgaccatgtcaaagatgatgatggtgttagtctggaagaaaatgctgctatgatgctttgttctttatcagataacatatgtgctggatcaccaaggaagggaatgaaatcatctgatacgtcatcaaagagatgtattcctcagcattcaaatcattttaagagttcaaacaaaaaaatcaaggatgtacctagtcctgctagattgctgcggaagcgtgatggtaaagttccattcaggaagcgtcgtccgcgtcggcatttttatgaagttagccctagcgacgtggatccattttgcattgtaaaagagaggatcagagttttttggcctcttgatgagacttggtactttggcttggtcaaggaatataatccggacacaaggttacatcatgtcaggtatgatgataaagatgaagaatggatcaatcttcaaaatgagaggattaaactcctgttcttaccagcggaagctcgcaatagatctaaatgcaccaactcaaggtcagtgtttgacctgaagcatgaacagggtgacagagaagacatggatggaagcgaaggcaatacagaaagttctgagtcaggtcccattggctcatggttagctcgatcaaaccaagcaaaatctgctgcactttgtaacatcagcaagcaagatcacagtcattccaatattgttccaatttcatttgaccaaaagcagtgccgtggttctgatgctaaggagtctaatgattatataccatgtgattcatttggaaatgggagtgcaaaagttctcaaggatagaaccacacctgaggacaggaggtttcgctttgtttattctaggaaacggttttgcagaaaaacgaatggttttcttagcatttccgaacagcattctaattgtcagataagagcaagatttgctatggttcttgctgcatgtcctgagaaatcgaaatgggaacaccttcaaggaaagcttcaatatcactgttctaaatcggagttgtctaaagattccacaaaatgtactggtcgaagagccctttcttcaatggatctcttctccaagggttttgatgttcaggactttcttccagagtctaattattcagatcgcgaacctatcatttgttgtttggatgaacattgtagatttactcaaagtgttctggacatgacaactgcaccttcactactgccttggcaccataaaaaaatgttaacagaaagcaatttgactaatggttctcagcaatccatgtcatgtactttggatgaggatcagcagcagttggtaacagaacatgcatctgacacagtttttcatgctccacctcaagtttgttcacttaatctcggttcatcacctgatagtccattggatatggcttctgctagttgtgcaaatccatctagctctgctagtagggaatccaatattgctgaaaggaatgtaagcacagaatgtaatggcagcagtattggtgatgcaaatataattcacaggaagtgtgaagatcaaaatgggccttgtgctggtcctgacaagtcattttcctccaaccttagtgttatttgctcttcacagaagtctgcagagagtcgtctttccataaatattgacaaagcaaatgataaacctcttgacaacgatgaaaaagaaaagcaacctatatctaacttggttcaggaattgaatgaacatccaattggctgtgttacacctactgcccctagaactacttcccataggaaccggtttacatctatatcacgtgcttttggagatggttcaaaattactgccagaagaccacgtgttgactggctttgctggtggttctaagaaaccacgaagtcaagtttcatactcagtttctcctaaaagtgaggaacttggcataaaaaacaaaggtcatttccgcaagatacaatctcatgttagtgcaaagataaatgatgcaaagaaacttcctgatagttctagaagtgggcatagcagcccggagtcattgacttgcgttgcaaatgttcttgttacagtgggtgatagaggttggagggagtatgatacccagatcacaatggattccgatggtcagagtgaaaggaggatatgcgtgaaacttgctgaagggaccaagtatgctcacaaggtctgtcaagttttgcagcctggggccacaaaccgctatacacatgccatgatgtggaaaggtggtgctgaatggtgcctggaatttcctgacagaagccagtggttgattttcaagcaaatgcacgatgagtgctatagccataacatcagagctgcttctgtgagaaacattccaatccctggtgtccatttggttgaaatccatgatgataatgatgtggtatcctttgtgcaatctgaagcttatcttgttcacatcggaacagatgttgaaattgctcttgatcaatcccgtgtgttatatgacatggacagcgatgatgaagagtggatatcaagctggcggaaatccttagtaagagacaacaccaccacacttcagtttgcagaagatttgtttgagagggttatggacaaactagagaagtttgcatatagccacaactgtaatggactcagcattgatcagatgaaggaactggagactgatgatgtacctctgcacactattgaagtgatacatgcatattggcaagacaagaggcagaaaaggggaatgccacttattcgacattttcagtcggctatgtggaagatctacgagcagcagctgcatgaatgggaatcaaaagtatgcagaatgcagagttcgtcaaatgggtaccaagaaaagaaattgcctcccaagcctgcattgtttgccttctgtttgaggcctcgtggactccatgtaccatacaaggggccaaagcagcgttctcataagaagcttatgtccacaggctgccatagcttttcaagagagcatgatggcttttaccggcaagtatcaggcaggagatacaatgaatgcactggggatgggaggataagcgaatcgtatgacactggttctctttactccccaacagggtactctcccaggttctctacaagaacagattctcctcgggcattcgagtcctcagaacgaagctccacaccaagattttccaggaacaacagtagcaccaaaaggagcgcagcccttgctttctccgacgaccaccagccatcaccttcctgccgcccccagagagcgaaacggagcgcgcacgaccactggaacgctgctatccacgactggcagaactcga

SEQ ID NO: 10221 - DNA, 1184 bp, Zea Mays
atggctgtaaagcttgataatgcccatcaagagtattcaaatgcaattgttgttgctcaagctacatcaaatcaaatgtcaaaacgtgacattttgaggccttacatggatattattgataacatgttgtctcaaatgctgcgggaggatccagcctttaaaccttctggtggtagattaggtgaaaatgatatggactatgataccgatgataaatcgatggccacacttcgtcgccaactcaggagggctcatgaggagtactataggtgcaaaagtgagtatatgacttgtgtcatggaagccctcaaactagaggacacaataaaaaattatgaacgccgtgatgctaatggatggaaatatgtatcaagttttagtgaaagtcgctcgggcacacttggatcaattttggacactatcgagttcatttggtgctgtatactgagaaagcagcttcaaaaagcatttgctgttatccttggctgcatgtcagctgctatactgctggctgaagctactttacttccaagtggtgttgatctatctctcttttctattcttataaaagctgtaggaaaacaagaggttttagttcaggttgctgcttttgtccccttgatgtatatgtgcatttgcacatattattcattattcaagattggcatgttgatgttctattctctgactccaagacaaaccagctctgtcagcttgcttatgatctgttcaatggttgcaagatatgcacctcctatttcttataactttctgaatctcatccgccttggtggcaatgctaaaactacatttgagaagagaatggggaacattgatgatgcagttcctttctttggcagaggcttcaacaagatctatccactgattatggttgtttatacactattggttgctagtaatttctttgttcgtgtgattgactttttgggaagatggaaaaggttcaagttccaacgtgaagaagagaatatagatggtttagatccatctggaatgattattctacaaaaagagagatcttggatcgaacaagggtgcaaagtgggcgagcaggttattccattggcaaggaatttcaatggtgtgaacgctgatattgaatcacaaaatgtgccattgcaacgaagaagttgtgtgccccttcttaaatagacaggcgggct

SEQ ID NO: 10222 - DNA, 4049 bp, Zea Mays
ctccacccttcctcagttcctctctcgtctctcatctcatccactcccgtcccagaatctccgtacacgcttcctcctcgccgtcgtgccaccccaccaaaccacgcctgaactgccatttcccccgttttttcccctctcgcgcaaggcgtaaccggtgcgtcgtggggggtagtttcggccgagggaagcgcggcgcgggaccgggcgcgtttcagaattcagaccggccggccggccgcggggagggcgccgcgagatcgcattgtggcggacgcggccgggtcaccgcggcattccgctccgggggtgtccgtggctgctcgaggcttttgcttgtttgtctcttacctcttgcgttgcgtcgggcggcggggctcgaggttggtggccggccaggcgcagcgtctccttttcgcggtcgcctttccggagcggctgccgccgctgctggtgcctggtggggacgcgcttcgcctttccgccgcctcggcgtggcgtgattccgaagcgttgccggggttgtactggttgctggtagatagaaaaacaccgcatcttttttggagggctcgtctcggctggcacgaaggttcctcgcggacaatgccgagcatccgagctccggcgtccaagcagacggccacgctacaggtggctgtcaagtgcaggccattgaccgacaccgagcagcggcgttcgcggcatattatacaggtcattgatgacaagactgtggtcgtgctggaccctgatctgtcaaaggattatctggacctcatccagaaccggaccaaggaaaggagctataccttcgatcatgtgtacgcgcctgggtgctccaattcggacgtgtataagaatatatcctctacaattgctggtgtagtccaaggccttaacgcgacagtctttgcttatggttctactggaagtggcaaaacttacactatggttggaacccatagcgatcctggtctgatggttcttagcttccgtacaatttttgagctgataaaaaaggacgacagtaaggatacgtttgaagtttcatgttcatatctggaagtgtacaatgaggttatctatgatttgcttgagagatcctctggacacctggagcttcgagaagatcctgagcatggcataatagttgctggattgagaagcattaaggttcattccgcagataggattcttgagctgttgaacataggcaacagtaggcgcaagacagagagtacagaagcaaatgctacttcttcacggtcacatgctgtacttgagattaccgtaaagcgaaagcagaaaggccaatatggtaaccaagttcttcgtggaaagcttgccttggttgatcttgcgggcagtgagagggcctctgaaacaaacaacttcggtcaaaagcttagagatggagccaacatcaaccgatcactcctagcattagcaaactgcatcaatgccctaggcaagcaaaataagaaaggtcttgcctatgttccctatcgcaacagctgatgatcagtatcatcacacaacgaatacactcaagtacgcagaccgtgctaaagagataaaaacacatgtccataaaaatattggaacacttgacactcatgttgaagactatcagaggatgatcgacaatcttcaggttgaggtttctcagttgaaaaaggaattagctgagaaggagcatcagttaagtgtaaagcctactgaaaaaactgcagatagtgagctatcttggttaaatgtcttgagccaggaaactggtgagaatgttcaagaacgcataaatcttcagaaggctctgtttgaactcgaagaaaccaataagcgaaaccgcatggaactccagcatcttgatgattctattgcaaggcatcaggtgaaagaaatggactctaccattctccaagctttaacatcaaggagacaagttattcttgacaacatccgtgataatgacgaagctggttctggatatagaaaggacatcgaaatgaatgagagtcgcaggcgacaactccaggatatgattgaagaggccatcagtaacaatggcaataaaacctacctgcacattctcagccagtacagactacttggaatgactaacgctgagcttcaaattgagatggctatgcgggatcaagttatacataatcagagggaagctctaaggagcctgtggaacattctctatggaacagggctaaaccagaagcagattcttaaattggctgcaaagcaagggttaaccgtagaaggctgtcctttgcctagctcaagcccagacgttaccacgccaccttcctgtcaacctcataggtttccatcgtttatgccatttcctggtccgcagtcagagccttattctccatctgcttgctttttccaacatggtttcagcactatgtctttgctgaaaaatcagcatgagacgcccacaatatgtaggcaggagcacctcagttcttactacatgatgtctggctgctcgccttactctggtgatggaaaacagtggtcaagtggaagacctacggcattcttttctactccagaaaaacctaaggaggctcagtcccaacacaacaaggaacattctggcagccatgatttcagtctgcacagaaaggatctgtggtccacggaaaggaaatgacgggcctcgagatccttctggtacttaaaaacacctgtgatggctacaatgcggcctgtctgatgttcctaacctcggtcgctgtgtgcaccatcttctgtctaccaccgacgttcccggggttcctgagatctgaagatatggtagtggtagatttcgcgggagctgttgccttgcccacgtccattttggttgatcctgctgggcgttgcccactccgtccaccatgtacagtagatgcaagtcctctcagtttttttgggggaaggggggtggatatctgatttctggaccaagaacagtgtaaatttgccgcggttctcgccctccttcagtaaatccaccggtaaagctttccggattggtcttcaaatcgggcgggtgacgacgatcaggatgggagttgggtgactgatgaacagtctaagggctacagtagcatgtggtaggaataggatctcatcagtcatctctctagatcattgaataagccctggtgaggctcacctgccctggagaccacattgaagcaggagcagcgctgggcatgatggtccctccctcacattcatgtttctgcgcaacagttgtgctgaatgctacgctggagcagccgaggccgcacggcacgcacatcgcagtcgcgttccacatgcccggcgcagccaaagggctggctggctggcttccgtctgacattccgttccggttcctatattgctacggtggattcatctttgtatatacatctgcgcggttgcccagctctggaggagtggccattgctactgtggcgtgacaatgggagtggcacctgcttcacatttgtatagaggagtggccatgcatggctgcctgtacacgtcaggtgagacgcaaggatctggcacgcaactagcctggtccattgcgttgcgtctggcgggcgtgccggtgcctgcgtcggcagcgagacgactttggtgggtgagggcgtcaggaacagaagaaggcgtgcaagccgtgacctacagacgacaggcctgcaactgcatacgggcctgggggcatgcagctgccaatgctttcctgccctgcactgccggagtctacaggactgcactgacacctcgtggggcaactcgcagcgcttttatctgttgctaatgctaatggcgcatcaagctgccattagagaattaaaagaggtcgtcgtttctacggtctcacgtgaaggtggtttcatgcgtacaacaataaggccaggccttgtgttttaagttgttcctaagattgttttccgtggtggatcgattcgttcgtgcgtgactgtgcgtgtaaagtccaaacaaatcaacctggaaccagaatgaacgtacgtagtactggttcatgg

SEQ ID NO: 10223 - DNA, 1552 bp, Zea Mays
cgcccccgcgcgcacgacttcgcttcccctccccggctacccgtccccgcggctgactcgtccacctcctgtccatattttcccctcgtgtccgccgcacgcaccgccggaaccctagcctcagccgccacaggcagccgggatggagaaaggagcctcggaggcgtcggccccctgcgctcgctgcggcaagcccgcgcagctccaatgccccaaatgtgctgaacttaagctaccgcgtgagaacgcagctttctgcacacaggactgttttagggcagcatggagctctcacaaatctgttcacccaaagcctggtgcactggcatcccagcagtctccggaaggttggaaatattgtttgagaaaagggcggggacgtgcattgcaacttcctcgttttgaatggacaggtccattgagaccatatccgatatcaaagatgcgtgtggtgccagatgaaattgagaagcctgattgggcgcttgatggaattcccaagatagaaccagatagtgacttgcagaaaagagtagagattaagacccctgaactaatagaaaggatgagagaaacatgtcgaattgcaagagaggttttagatgcagctgctcgtgtaattaaaccaggaattacaacagatgaaattgatagagttgtccatgaagagacaattgctagaggtctgtcaatgaagtcatttgccatggaattccagatgccaggaaacttgaggatggtgacattgtaaatgttgatgtaactgtatactataaaggtgttcatggtgatttaaatgagacatattttgttggaaatgtcgatgaagcttccaaacagcttgtacgttgtacctatgagtgcttggagaaagctattgcaatagttaaacctggagttcggttccgagaggtcggggaaatcataaatagacatgcttcgatgtcaggtttatctgtggtgaaatcctattgtggccatggcataggggaactgtttcactgtgccccaaacattcctcattattcaagaaacaaggctgttggtatcatgaaagctgggcagacatttacaattgaaccaatgataaatgcaggggtttggaatgatcggctctggcctgatgattggactgcagtcaccacagatggtaaacggagtgctcaatttgaacatacacttttggtgacagacacaggatgcgaagttttgacggcacggttaccctcatcaccagacgtttttccatggttgaaaccgtgatcgggcaccccaacagcaacaagaaagtgatactgacaaaccggggctgcaaaatttttgttctactctttatcagtcagtcaagctgaatattttgaaaattttcagaccaaacagtgataagcatgctactgctggacagtcgccctaattgtctgtcctgcggaattgtttctgggagtgtattgttaagtcggttttctccgagttatacgagacatatggcttgagttgtgtcaccaatatgattatgccataggactatcagagtttacttttaatttcagag

SEQ ID NO: 10224 - DNA, 614 bp, Zea Mays
ttagatatatttcgcccatttgttggttttcgtgaagttcgtcttgtcaacaaggagtccagacatcctggtggagatccacatgtgttgtgtttcgttgattttgacaaccctgctcaggctacaattgctctggaagcattacaaggttataagtttgacgaacacgagcgtgattcagcccatttgcgtctgcaattctcacgctttcccggtccaaggtcagctggtgggcctcgcggtaggcgttaagacgtgcggacctcgtggttgccgaacctatcgtttatacgagcgatccaactacggtgggctaacgcttcgatatgcgctgaatttcggggcggtggctttttagggttcgtcagctcatttcgtgaatgcgtgaaagggacaatgcaataagtgatattctgccatatgttattagatgccgtataatgtgttaggcatggaaagttattcgacatactgtatctgctgccttagctattgtggtctactgtaacttcattaccttgcttcacatccgagacaatttgagtttgttatcatgtggattatctgttttgaaaatgaaaactagatgatgttagcctattttagtaaaaata

SEQ ID NO: 10225 - DNA, 1939 bp, Zea Mays
cccctgcagcctctcgctgcccactttccatgtcactgcaccactgccgcgctgccacgacgcccgccatgcccgccaccggcctctcgtccgcgggcgcttccccgttccgcctgcccgcctccagctcctccgcccagggccacctccgtctctccccccctgctgccactgccagtgccaccgcctgccgccgccgcttgcttctccgctgcgccgcctcttctggcggtggcggcggcagcggctccgacccggtcctagaggagcagcggcgccgccaggccgagctcgccgcgcgcattgcgtccggcgagttcaccgtgcaaggccccgggtggattgcgcctctcgtggggaggctctccaagctgggcccgccgggggagctcgccgccgcgctgctcaccagggtagcgggcgctggcggcccggagatcccgcaggcagtggggtcgatcaacgcggtcgtgggccaggccttcttcgtgcccctgtacgacctcttcctcacctacggcggcatctttcgcctcaactttggccctaagtcgtttcttattgtctccgatccggctatcgctaagcacatcctgagggagaactccaaagcttattccaagggaattcttgctgagatattggagtttgtgatgggcacaggtttgatcccagctgatggggagatttggcgtgttcggaggcgtgctatcgtccccgcactgcatcagaagtatgtgactgcgatgattggtctctttggggaagcttcacaacggctctgcgagaaattggacaaggcagcagtggatggggaggacatggagatggagtcgctgttctctcgactcacactggatgtcatcgggaaggcggtgttcaattatgattttgactcattatcttatgataacgggatagtcgagtgtatgtaacactaagggaagcagagatgcgtagcacttctcctataccaacatgggaaatacccatttggaaggacatttccccacggcagaagaaggtcaacgaagctctcaagttgataaatagtactctcgatgaactaattgccatctgcaagagacttgtagagcaagaagatcttcagtttcatgaggaatacatgaacgagcaagacccaagtattcttcacttccttttggcatctggagatgatgtctccagcaagcaactccgtgatgatttgatgaccatgctcattgctggtcatgagacttcagcagctgtcttgacatggacattttatcttctatctaagtatccaaaggtaatggccaagctccaagatgaggctgatagtgttctaggtgatggtttgccaacaattgaggatgtgaagaaactaaagtacacgactcgggttattaatgaatcattgagactatatccacagccgccggttttaattcgtaggtcacttgaggacgatatcctgggagggtacccaattggccgaggagaagatatttttatttctgtctggaatcttcaccactgcccaaagcactgggatgatgcagaagttttcaatccagaaagatggcctttggatggaccaaatccaaacgagataaaccaaaatttcagttacttaccatttggtggcggaccaaggaaatgtgtgggtgacatgtttgctacttttgagactgtggtggcaacagcaatgcttgtcaagcgatttgactttcagatggctccaggagcacctccggttgacatgacaactggagcaacgattcacacgactgagggattaaaaatgactgttactcgaagaacaaggccaccagtaattccaaacctggagatgaaaattattaccgattcacaagaatccacactttctgccccatcgatggttgttagtgctgcttctgttgcttcaggagaagaccaagggggcatctcctga

SEQ ID NO: 10226 - DNA, 1881 bp, Zea Mays
cgtcgtgctgcacccgaccagctaacaagctaacctctgtcttggcagcaacttggttcaaaagattcctagggcatttgctggagctggaaggcggaagcgttcccgttggattacttcttgggctggaaagagtgaaagacccggatgcactaaatcctgtcttggaacagttacggccctggaattgatcccatgctgccgaacgggccctaagttggaacctgttcaggcggggggtcagctcgcagctgactggggatccggcaccgcatcgccagacgccaggaggggactatcagccatggcagcgaggcagccgccgccttcgtccgcgtccgcgcccgcgcccgcggcgggtctctccatgaaggactacctcaagaggtacgtgtcgggcccagggaccgacggcgaccagaagagggcgaagaagaagacgaagaagaagcccaagcccgccggcggggtgctcatcgtcgacgaggacccagtgtggcagaagcccgtgcaggtggacgaggagcccgcgtcgtcaggtgacgacaagcctctggtcgacgaggacatcgaggtcaagcggatgcgtcgcctggaggcaatacgcgccgcaaggccgtacaatgctatcgccgaggatggcagcgggtgggttaccgtggccgccccagaggagcagggcggtgggtccacccaccagcgcaggaacgacacgccgttgccagagcggggacgtgctcctacgagggaggacctttctcctgtgcggcggaggcagcggcgcgacacgccctcacctgtgcatggcgatgctgctgcaaaggatttttcaccacctaggcggccctcacctgtgcatggtgatgctgctgcaaaggatttttcaccacctaggcggaggcagcggcgcaacacgccctcacctgtgcatggcgatgctgctgcaaaggatttttcaccacctaggcggaggcagcggcgcgacacgccctcacctgtgccggacggtgctgctgcaaaggatttttcaccacctaggcggaggcagaggcgtcaggacacgccatcaccaaaggacagtggtgcagcggaccaggacgatatgtcaccaccgcggaagtctaggcagagagaggacctttcgccgccaaggaagggtgctcgtcatatcactgaggagccccgggatatctcgccacgaaagaagagagacatttctccctcaaggaagagtacaaaggaaggagcctcaaaacaggtgaagaaatctggactgatgacagcagaagaagttaaagaggacataagaaagattaaggaggctgagatgattaagtttgcatcacaggatccttctctggttgggaaaggggcaaaggcagtattcagagataaggaaggaagacgaataagtgaagaagaaatgtgcaaggcaaaggaacctgagaagccaaaggaaatacatatagaatggggtaaagggttggttcagaaacgagaagctgagtctaggttgaaagagattgaagctgagaagagtaaaccttttgctcgaacaagggatgatcctgagcttgataatatgctaaaagaaagaatccgatggggtgatcctatggctcatctggtcaagcggaaagatccagaatttattttggaagacttgggagatgatgaaaagatgaaagaatctggcttcatagtaccccaaagtatacctactcacagctggctgaaacgtggagtggatgctcctccaaaccgctatggcataaaacccggtcgtcattgggatggcgtggatcgcagtaatggtcgtcgcacaatgctgatcgtaccaggggtcactgatggcttctctgtgtgtgcggtggcttcatg

SEQ ID NO: 10227 - DNA, 1291 bp, Zea Mays
gcgggcccccacctctggctcggcttccaaatccaaacggccgtgggctcgcctcaggccacttcggtccctcctcgagctccatccgatcctccctccccgtcgtgccggcatcgcgcgcagggaggaccggccggacggccggcccgcccgcccgccgccatgccgggatcgcccaaggtcttcttcgcctcctccgcctcgcgccgctccgggtcgctgcgccggctgctctcgacgccggtcttctccgcggcctgcctcctcttcggcctcgccggcttcgtcgccgccgcgctcgccctctcgcgctccccgtccgtcactcacagccgctgccccgattcctcgcgcccgctctccgtctcagtcgcgtgggaccgcagcccaggggatggctccgcagggggctccgcggagctcccggcctcgctcgccactggatcgcgcggccgccacaaggtcatggccttcgtcgggatcttcaccgggttcggctccatcggccgccgccgcgcgctgcgccggacatggctacccgcggatcgccagggtctacttcggttggaggaagctactggtctggcattccggttcgtgattggaaaaagcaattcaaagaacaagatggccgctcttaatagagaagttgaagaatatgatgattttgtgcttttagatctcgaagaggagtatagcaggctcccgtacaaaacgttagctttctttaaggctgcctatgcattgtttgattctgatttctatgttaaagcggatgatgacatttacttgcgaccagactttccttgcttctggctaaagagcggtcacatccacaaacatacattggatgcatgaagaaggggcctgtttttactgatcctaagttgaaatggtatgagccccaatccttcttactcggatcagaatactttcttcatgcatatgggccaatttatgctttatcagctgacgtggtggctagcttggttgctttgaggaacaacagtttccgtatgtttagcaacgaggacgttacaattggatcgtggatgcttgctatgaacgtcaaccatgagaacacacatgcgctctgtgaacctgactgcacggagtcttcagttgctgtttgggacattccaaaatgctcagtggagccgcgatcgacgtttggaacgttcatcctgtaccgtagcaaaaaaggaattttgttgtatagaaactagaaggaatggatgcatcggcgattgatagacaatgcatacacctagctgtgatcggctggaattag

SEQ ID NO: 10228 - DNA, 2359 bp, Zea Mays
acctctggctcggcttccaaatccaaacggccgtgggctcgcctcaggccacttcggtccctcctcgagctccatccgatcctccctccccgtcgtgccggcatcgcgcgcagggaggaccggccggacggccggcccgcccgcccgccgccatgccgggatcgcccaaggtcttcttcgcctcctccgcctcgcgccgctccgggtcgctgcgccggctgctctcgacgccggtcttctccgcggcctgcctcctcttcggcctcgccggcttcgtcgccgccgcgctcgccctctcgcgctccccgtccgtcactcacagccgctgccccgattcctcgcgcccgctctccgtctcagtcgcgtgggaccgcagcccaggggatggctccgcagggggctccgcggagctcccggcctcgctcgccactggatcgcgcggccgccacaaggtcatggccttcgtcgggatcttcaccgggttcggctccatcggccgccgccgcgcgctgcgccggacatggctacccgcggatcgccagggtctacttcggttggaggaagctactggtctggcattccggttcgtgattggaaaaagcaattcaaagaacaagatggccgctcttaatagagaagttgaagaatatgatgattttgtgcttttagatctcgaagaggagtatagcaggctcccgtacaaaacctttctttaaggctgcctatgcattgtttgattctgatttctatgttaaagcggatgatgacatttacttgcgaccagatagactttccttgcttctggctaaagagcggtcacatccacaaacatacattggatgcatgaagaaggggcctgtttttactgatcctaagttgaaatggtatgagccccaatccttcttactcggatcagaatactttcttcatgcatatgggccaatttatgctttatcagctgacgtggtggctagcttggttgctttgaggaacaacagtttccgtatgtttagcaacgaggacgttacaattggatcgtggatgcttgctatgaacgtcaaccatgagaacacacatgcgctctgtgaacctgactgcacggagtcttcagttgctgtttgggacattccaaaatgctcagggttacggaggtagtacgagtggtaggtttggggtccaggaccaggacctcgacgcttgggcgccgtcgggcggttggatggggaggcgagggctatgccacccagaggtaaaaatgctagagcttcatcaaagaaaagaatgcacaggtggtccaaccgttgcagccgaggtgtccgagtccgaggactgatgatttctcggttggaacacaaactaacggatccgatagttgacctccgccctcactcagtagatgcgtttggagtattcgtttgattcattcatttatcaggtgcaatcaatgtggcagcgctgctcaaggcagcactgtagcaaagccactcattgcatttttttttgcagtggagccgcgatcgacgtttggaacgttcatcctgtaccgtagcaaaaaaggaattttgttgtatagaaactagaaggaatggatgcatcggcgattgatagacaatgcatacacctagctgtgatcggctggaattagggatattccctgaggttctcttttttggagtaaaatctgagccgtctgcttcgcctgatccatccatagctaagtgagcaaagctgagccttgaggtgctcatgttcaccggtcaaccagccttcgctgtccggacaccgaaaggtttgttgtgatggtgtagcggcgatatggatgcaaagaaacagatgcttggagggctcttatgatatatcttctgcaaggacttggtgatggtgcgttggaggcttggagccaagcgcaaagaccctatcacgggccctcctgacgggcgatacggatagcgctttgttcagatatttggactagcgctcagttgcagttgcaatttaattgcaatttataaagacagaatacggtagaaaaagtagaagccgtttccgaataagtcgcagcagacaggctaccttggagagtgattgctgcaaaagttctctataaagccccgaccacatgccttggttccatgaaaaatctataccatttgatttgtaaatgaagaccaccagtataacaagttacaagaggcaacacatgcatgcagctgccgggacacttttttcccggcaacgtaaacacaggtataaataacatggcaacaataaaaaattaatcgccctcccctcgcttagcttagctgtggaggatggcggggcggcagtagggcccgttgagccagccgtcggtgatctg

SEQ ID NO: 10229 - DNA, 1965 bp, Zea Mays
cagaacgcagccagcagcgaagatggcacgctcttcctccgccacaggctcgtgggcgcgacgcttcccgtgctgctgcgacggtgaccgtaggaacaggttcggcggccgcagcctctccggcgatctcctgccgccgccgtcggttggcgcaatggcacagcagcctcccaggctcaggaagaaaaacctcgtgtcgccctacgatccgcgttacaacccacgcagggtctgggagacgtttctgatcctcctggtggtgtactcggcgtggatatgcccgctggagttcgcgttcctgaggtacctgccccgggcccctttcgtcgtggacgacgtcgtcaacggcttcttcgccgtcgacatcgtgctcactttcttcgtcccgtacgtcgacagcaagtcctgcctcgtcgtcgacgatcacaggaaaatagcagccaggtacctgtcgacttggtttgccttcgatgtctgctcgacgttcccgttccagtccatcagcctgctgttcgacgagcacgagcacagcctgggcctcaagttcctcaacgttctcaggctttggcggctgcgcagggtcagctccttgtttgcaaggctcgagaaggacatccggttcaactacgcagtgatccgctgcacgaagctcatctccgtgaccctgttcgccatccactgcgccgggtgcatcaactacctgatcgcggaccggtacccggacccgaggcggacgtggatcggcgccgccatgccggacttccgcgaggccggcctgtggatccgctacgtgacgtccatgtactggtccatcaccacgatgaccaccacggggtacggcgacctgcacgccgagaacagccgggagatgctgttcgggatcgccttcatgctcttcaacctctggctcaccgcctacctcatcggcaacatgacaaacctcgtcgtccacagcaccggccgcaccagggactttagggatatggtccaggtcgcctcggagttcgcggcgaggaaccaactgccgcagcagatcgaggagcagatgctgaaccacatatgcctgaggttcaggacggagggcctcaagcagcaggagacgctggatatgcttcccaaggcgatgcggtccagcatctccctctacctcttcttccccgtcgtgcagggctcctacctgttcaagggagtttcctcaggcttcatccagcagctggcgacggagatgcagcccgagtacttcgccccgaaggaggatatcatgctgcagaatgacaagccgtcagacatgtaccttctcgtatcaggagccgtggacattctgacgttcctagatggaacagagcaggtctacggaaaagcggcagagggagagctgttgggagaggttggggtcatgtccaacaagccacagccattcaccttccggaccacaagactgtctcagattctgaggattgccaggtccaagctgatggacatcatgcgagagaacggagaggacggccagatcatcagaagcaactttcagcagagactccgcgtggagcaaagactgtacatcgcaatgcatcaagacggtccggtccctgcatttgagcggaggatggatccctgagacccctcggctgtcaaagcacgcacgcagcgtggtgaattatttgctcggctatactgacaatatgtattgggtgaaatcgacaaataagtttaagtaggggagaagaaggattttgctgtatcctttttggcgcacaatctgaagagtgaagtagccttcggtagcagtgtagcaggagaacatggaaggaagggccgaaattattgtcagctccggcttctcagccctggaatatcgaacgggctcgatttgtcagatattgggcctctcgcagtttgttttcgtaaagcaggctcgttgcccttctgtcctggctgcttctggccttggcccatgagtatgag

SEQ ID NO: 10230 - DNA, 1618 bp, Zea Mays
atcacactctctctacttgctagctagccgcccttagcttcgcacgcgacatctatcatcggccaagaaacggagcagatcggtcggccgccgacatgggggatcacgctgagatgctgcatgccactccggccatgtacaacggcgccggcgctgcccctcgtggtggctggtggagtacggcggtgcccgcgaccacgtgctcgacggagctggccggcggcttcaccacgtggtcgtccgccctggctgctagctacgacctggcggcggagggggcaaaggccaacaagagcgccaccaccgcctcgtcggagtcgcccgggaacaacagctccgtgaccttccaagaaccggccggcggcgtcggaaccgccgtggtgcagcagcctcttgctggctgcgctgactggaggcatccctatttgagcagcggcgctgctactttgcatgggtttctgcaagatggtcaccagcaggacatgagctcatcgacaactgagcagagccccatggccgcatcaagcctcatgaacccttcatccaataacctagccctggccctgcaacaaggtcaccatcaccaagagccggaccaccagcagatgctgtccaacttcggcggctccgaggccgagctgctcctgtcgccgacgacctcaccctacgggttccagtcgtctctgctgagaagcctcatggagccgacagcggacgcggcgaagccggctttgccggggtaccagcagcagtatgaccagtaccagcagatgggcatgggccaggcgaggtcgtttgcaccggccggcggagctgccagcagggaggcactccagttcaccaacgacgcgccgtcctggaacccttccgctgcggctgggttcggcgtgccgccggcgccggcgccggcgccggcgccggctgaccaagctagcagcagcgtacgttctgtgaaaccatcgccggcggcgcgtgctactgcaacccttgcattaaagactgcgttggaaggagtaggagagtctgctagctccatcatcaccaagaagaaggcaaacggagagctggtgccggccttcaagaaatcgaggctccagacgccgtcgccgttgccaacgttcaaggttaggaaggagaagctaggggacagggtcactgcactccaacaactcgtcgccccttttggaaagacggatacagcatcggtgctccatgagaccgtcgagtacatcaagttcctccacgaccaggtcggggtccttagtgctccatacttgaagaacaacggccatcaagtgccctacctgaagagatcaagtcctgacaggtccgaggacgacaacagccatgccggcgagagatcactcaagggccgggggctgtgcctggtcccgatatcgagcacgttcgcggtagccagcgaggtgcccgtcgatttcgggtggagtactgcatttgctgccagctttaggtagaagagaaggctgggaacgaagagcgcgccaaagctctgatcagaggcgtcgaacgagtatataactagctagctagccagctaccacagatcgatcgacctgccctgctgacgatattatatgcatatgtcgatgcgtttctg

SEQ ID NO: 10231 - DNA, 2134 bp, Zea Mays
acccgttgtcgccttccctcgcctcccgcacgccagtccctgctgccctgccctcttccgccgcgtcgtcccctcctacgttcccctctccctcggtccgcctagatctcgccagggtttgccgcgtctcgtcttgatttttgctccggaaccagggctccatcggggcagagaggcaggaggggtaggccatcccggaaagtggcggatctgggtgttatcggaggaagagcatcgtgtagcgtttctgtcggtggcaggcatcgacgaggtgtgatttagaaggcatttgtgagtacggcatggactgcgtcggagctgtggacagcagcggaaccgatgatgatcttccacaatcatatcagaacagcagaggcatgaaaggcagtggacgcatcactggtaatggaagagatagtgttggtgcttctctgtatactagagttcaacctcagacagacatggaaacacaaatacatgagcttgagcaagaagcatattgttcagttcttagagcattcaaggctcaatctgatgctataacatgggaaaaagaaagtctcattactgagcttaggaaggagctacaagtatctgacaaggaacacagggagttgctaaacaaagttaatggcgatgatattattcgaagaataaggaaatggagagagtcaactggtgggcttatgattaatttggtgaataattctcagcgtacacatgaccctattcccagccctacgacatctgctcgcaagaggcaaaagatgtctcaacccattctctctgcatgtgtacctgcaccatctgctatgcattcacagcctttaactgcaccgatgcaaccatcatcttcaggagcaaaaaagggagctcaacccggcacaaaagtgaagaagaccaaaccaggccagaagatacctggtggctctgcagtcaaatctatgccatcttctgctggtcctggtgggcgaggaactattatcaataggaatatgtctgctggccttccacctgaaagttcacaattaaatccattaattggtcgtaaagtcatgactcggtggcctgacgataatagcttttatgaagctgaaataactgactatgatgcatcaaagacgagacatgggaatgggttgacttcaaggagatggcacctgaggatataagatgggatggcgaggagcctgatttaaaccttataggtcgtggtgctcccgtccatggtatgaagtcaagcagtcgtggtggccccatgtcaggtaccggaagagacagaggtccccaaaagaactcattcaagaaagattatccatcacaaaacggtattgggaagaagagtgttgactacatagaaattctccatacagagacactcataaaggaggtggagcgggttttcagttcagccaaccctgacccccttgagatggagagggctaagaaagcgctaaaggagcacgaacaatcattaattgatgcgattgcaaggcttgctgaggcgtctgatgatgatcgtgtgcgatctttggagtataaccgtggatggaggaaccaacatggaggaagatatgcggatgatatgaccatggacggccacatggctggagatgcagatgccatgtaaacctgccaatgtgtacacaaaattccttcattagcttattttttgcctgttgtaaaatcttgacgctaatttttctctctctagatttagccgtaggtacttctgattggtcctaaccaaagaaacagttaggatcaccactctgattgttcagcttttgtagtagaattacgcccagctcatcctttacactgtaaatttagatttggagctgattttgtcggtcgctagacatttgataagcatctgccgtggcctgtttggtttcctagtgcaaacggaaggcatttttgctaatgttgtactacctccatttttttatttgacgcaggttggttcaattttatactaaaaaaatataaaaaatcggagggagtagctagtaatgttgtgttatagcacaaagggtgtaataggatcaactatggatagctgtcgaatacagacatgactggatgctcggttacaaatactaataagaggctgtttggttatatgtttttg

SEQ ID NO: 10232 - DNA, 2131 bp, Zea Mays
tgtggcttcctgaatgtgaagcgagtcgtgcagtcgacaacgttgctgtttctgttgtcattgtcttggtgacgccgatatcctgcgctcttgtggataatttcaaggttcaagacacactatataaattgttgttgccggtatgcgtgtgtttaagcttgacattccttcacacgaaaaatcaaggataggctggaactggaaaaacatgcatcaaaagataggaggtgtagctggtggactctgctttggtttctcggttactggagtagcaagtgccgaggttcctatcattagagtcaaagacaatgccgagacttcgtcatcatctaccagttcaactcatggaaaggaagtgtacacagattattctgtcacaggtgagaaatcctcactttttttttgtcttaaagcttcatgaatcatgttcagccttttatgcttcatagttataatagaagaatgagcattgacctcattacttgtgattgagttacatggatccccaggtattcctggagatggaaggtgtttattccgctccgtggtgcatggtgcatgcattagatcagggagaccaatacctaatgaagatcttcagagaaaactagctgatgaattgagagcaacggtcgcagatgaatttgtcaagaggcggaaagagaccgaatggttcgttgagggggattttgatacatatgtatcccatattagggagccacatgtgtggggaggcgagccagaattgttcatggcgtcccatgttcttcagatgccaataacggtttacatgcgcgacgaggatgctggcggtctgatagcaatcgcagagtatggccagcagtatggtaaagaagacccaatccaagtcctgtatcatggttttggccattacgacgctctacagatcccagcaaaggttggatcgaagaggaaactgtagacgctgcgcgccgcgagcttgaggtacgctccttgttccagtgtttatacaaccttgtcgaacactcatgctatatgcatgcgagtgtggaagaagacaagcttaacatgaaatggcgttaactcgccgccatgcataaatgttattacatgattcatgtacttccccaggagcagatgagttggaacacttcacttgttgtgttttctctctcctcccatatcatctatttcccattcataatttgatacttaattccaggtgcattcgttgggcaaccatctaacctcctactactacagagaaaattcggaaacaataagctgcatgcatgcatgcattgagatgtgtacctgtacaaaatgtcaatccaagcttcggatgctgaatctgtacaccatgccctgaaaaccgcacttgtgtagtttgtgtgactggtacagtagaagatagaaggggcgccggggacccatttaccatactctgatgactgcaagtacgttcatttagagtgaagtaagctacacagctcaccagttggtccagacgtccagtgagcgtacatgttttgaatgaggggcatgtggagagcacatagacagttgagtccggcactctcctggatcggaattgaattttatttgcagcataatcatgtgtggttctccaactgaaccatagcctcgttcttctcacccccttcaaaaaaaacgaggggctggctggctggctggtagtagtagtaacctgcttgttagctggactggtgatttcaaaccgtgatgggtgggtgcacatgtcctgatgtcactcgaatcgggttctgttttgccgcgtcgcctttgcacgccgccgtgatgtgccgctgccaaccttggggggatttcgaacggggacgacgaaccagatccaccgcgcagcgtcacccagctagcctgctgcctgctggactggaaccgggggaagcctccaaggcgaaggcagcagcaggaacagtagaagcttggggatgtggattactagactattattatttattagactagactagagtagtcatggggatcaacgacaccccttgagatctcccacatgcaaacgcgctcgattaacctttttttactactttcccaaacaaaagtcgccctcccgaccaactatatcaaaatcaaatcaaatgctttcaaa

SEQ ID NO: 10233 - DNA, 2880 bp, Zea Mays
tgatcaaccaatagtggaattcagttaaacccttcttcgtgtaggtcctgacaattactattgttttggacttcgggttgctgtggtttgtgatcgtttaatttattttagttatgctctttggaatgggcatttaggttgatgtctagtgaactcgagttcaagtttgggcttcccaatccttgttgttagtgtaaggctgttgttgtccaactggtattataggataattggagtaacaagagtagttttagcgataaactacttcttctgtcctaaattataagacgttttggcttttgtaggttcatagttttggcaacgactactatgcaatcaagccttaggtgcaaacgtgaagcgagtcttttggtccattaaatcattatccaaccatagatataattgtagtttgttagttttttttataaatctacgtgaattggtggtggaaaggtttaagtgttaaatataatatatggttggatcatgatctaatgtaccagaaggcttgtttgtacgcttgcacctaaatcctgattgtatagtagtcattgcctacgtataagttatgtgtggatacatcatacataatagaagctataaatctagaaatgccaaaacgtcttataatttgggatggagggagtattatataatcttaaatttatatatgatcccattacttgtaccatttctttgctataggtgagtagtttcttagcagcactcccatcagtattgcagtattgctcttataatttttgacgcatctatgagttattgtcttgtgatgtatttgtcagttatcatctagatcgatcacaactgatgagttttcatatagccttgaatcattcgcagtgtttaatgtggattacttaatggtgttttgaatgtatgcaggcagtaatcaagaggttcattgtgaaccactagaagttattcgtgaaagacactccacagaaccaaacatcaatgctgcagctattctaccatcaagacctgtgagcaatacatttaacctgcttctggaaggtgacatgaatccaagtcatggcaatgggcttgctgaaatagagaacataatcaaccagagatatttttctagggatgagacactacgtcttatagagatcatgcggtcaaggacttctgattttactgttgaagaccagagacctccagtatctactgcaaaaggttttgaaacaaaattttttacacctgccaaactgatcgaggctcagccatcttggaggactgatatcgttccatcatccaatgtgcatgatattggttcttcgccagttgaaattgccaaagcttttatggaagcgcagacctcagcttctgtacacgagtccaaaaagcggaaattcagagctttgagtcatggagttgcggttgacaattcgacatcagaagttttccctacaataactactgattcttctgtaagatggcctgactcagttgttcaaggtggtcccaattatcttacaccacaaagtaataaaggaaggactctgtctcagcctctttctcgcacaccatacaatagctcagttattcgaagatatattaagaacagcaggcatggtgatatgcacaataatggacagacacaatttcccactccattttctattggaaagaatactagaggatacacatgtatcagcaagtggtggtatagcgcagccatcatcttccaggggacagatagatgtttttggttctattctaagagaaggttcgactgcaataaacaatgttgcattcaacctgcaagagtcagatggtaaaagcatgacagaaagcagaacaacttttggacgtgcttcaggtgtagacaatatctcaagggttgcttcagtatctgttcatcccaagtcaagcgaaacagcattcaaaatacttaagcaacttgacagaactattccttcccctacatcaaagccactagggctgagacagacattagccaagaaaaatactttttctgttgctacctacagacagattaaagagcctgatatcattatcggtaatgataataaacagagcagcattaatgagagtggtagtgctagctcggagactacatatggaaaaaaggttcagcaacctcaaagcagtcctatttcaggagagtcaagtgaaaaagtccagagaagcggagctaactcagatgtttatgaagcaggcacttctcagcgtcctctgaaatcaaatctaacacccacttcagtcgccgaggtcttggataataacaacaccagcaaaggtttcagcttcacatttcctattcctaaagctccaagctctctacttgaaccgcctcctacaccaaccatggcctcgccaccaaggaccttgccaatcactaacgaggatgttcccaagttcacctttggctcatccagcatggccaacaaactcgttttctccttcaactccacaagcagttctcctggtgctggtggaacagacccaaccttcaaatttggatctgataataagcgagagcttgtgttttgatacagtttttttttgatagacaccatgcccgcggatctgaactgtaccactctatctattcttggtgtaagacgtcttaagagagttggagtgtgctacttgagctacacaacatgacattcttttcattcattagcatattcaaacattacatattttagacgtcctgcgttggcaggacatttcccccagtgctttgcacccgtggctgtgtcattgggcatcagttcgtttagcctattatttggaagcttttcatagctgaatggagttccattgccctttcggtccaaggtatgtgatatgtcaatgtcactgctgatataatccgttgaa

SEQ ID NO: 10234 - DNA, 2168 bp, Zea Mays
ctgctctatccaccacccccgcccacatcaccagagcacccgaggcttgtcttccttcctctcacatccgtacatagaaaaaaaaagaagaaatagggataccggagccgaactccggcggaccatctggtattctggtctggcactctggcgtgagaaaaggaaactgaattgaagcacagatcgatcgagagaggcgaacggcagtcggcaggcgagaaagaagtgctgacgcctcgtttccgtcctgttgctgacaggcacgcaccactactactcgcccagtccgccgctctcccgcggatccttcacctccactccattccgaggatctcattagcacgctctccggcgcggcggcggcccttcctccgagaccaggagctcgccgccggagtcagtgagtgaggggtacgtggtcgccgtccgtttccgacagtccgcggggcccgcggagcgtaaagcaaggacgcagccaagggagagagggggagggaagcaagtggatctgtgctagctgttgcggtattctccggaacactctccaccaggcacagagcaggtgtgctcagaatatgcagtcatctgcgatggcgttcttccctagcgttgccacggcgaagctggagctgaactctctgtacaggaagtacgtggacatgttcggtgtatcatcaaacaactctaccgttggctctcacaccatccacaagatgtcgcaccttcctgtcctgctggtcgatcgtacattcttcagcaccggtactgctattcagagcattgccatcagctatggagctcttattcgtaggtggttactgggcggaacttctgttgcacagaccgtttttctggttggcaatctgtccttggccaaagtgctaacctccgtggagaaccagttctggtcgtggacaataatgagctgggcaatgatcagacattatcgagctttcttgggcgcaagcgagattacgtcggtctcggtctagcgcttcagtgcatctgttaccctgcatgtctgaaggttgctgagttcccccagaagaatctcagcttcagcaggcagtggatgcgaagtggccatgacacgagcgcaatctggagggccatggcgaggaatgagcaatacctggcattcgtcgtagtcctggcggccttgcagctcttcctgcggctagcccgggtgaacgtcaccatcctgttcctgccaatgctgtcccaggccgtgagttccaggagcagcccagcggtgatcggcaacgttctgctggttctggtgacctcctgcggagttcttggatctgcactctcagtgaaacagttcggccgggaggtgacgttcgctatcggtgccatcgtgatggtaatttgccaggtcgcgattccactgatcatggaagtccagatcggggttggcggaggaacgcgcatgccggtgggttacacggccgcgacgttcgccctgacgtgcgtcgtgtcctgcggcctcagctggtcgtggggctcgttcttctggaccttacctggcaggaaggttcactcggccggacacgttctggccgtggctctgaacctgggcgtctgcttcgcccagatgcggtacttcctgctgatgctgtgcaggctgaagaacgccacccttgcgtactatgcgctgtggatctggtcgtgattgggattcagctgagggagaatgcgtagctagatgagtgcgtgttaactctggttacttgagtaggaggctagtttggtggatgtaaatacttctcttggcttggcttgtacagagttctggcgctatttctgatggctccgtagatagcaactgtagggcttggttgcacttcctatgctaatggctgttctactaactgtgtggcgctcaataaagctgttatggttggcatggtcgctacagggttatcaattaagcggatatgtggctgaccaatcggacactttcaaattcagggatgggatataattttttttctcccacgggtaattttttatgtctaaggtttgttattcaattcgaggcaatccaaacatgaccgccacggccggatggtatttcgacgtgggccataggaaacgccggcgtgaagaagcgcttccagtaccagtaccagtgctttgacccatatgataatatggagggcaat

SEQ ID NO: 10235 - DNA, 976 bp, Zea Mays
ccttctttctccatccacttgtgtactttcgacgtcgtcttcctcagtagcgcccccttctttctccacccgccgtcgacgcagctgccttccagccatctccatatccgtttcgccgtccccttcctcctcatcaggtaaacctaattcccttcctctctccccatcaattcgcccctaacctaattcgtgctgatgatctcccccgaggacccgcgcaagtggctcgtcaagcgcgtcgtcgggatgcatgggggctccgtcacctaccttgtcgaccccggcaacaacgactcctcctccagaaccgtcgtggtcatgcatttttcctgtagtcaaggatggtgaagataaactacgcctatgctcgagacaatgaaacactatttgatattattagtgtgaagcggcggcggggccgtacaaagagatgctggaagtggtgaacgcgtgcgcgacccggatccggtggcgcctcagtccagcttccaagcgccgcctcctcaacgttgttgccaaatatcctgtttctctgcactaggttgcgtcctgtggtactggtcgactatggtggcacaatgcctcagctacaagaaaatctttgtggcctgctatatcttgcccgacagttcaagctctacaaggttaggtctgttcagtttggctagaaaggcatcccctacctgaacacctacgacgaccgcaccatccgctaccccgaccctctcatcaaggccaacgacaccatcaagatcgatctggagaccaacaagatcatggacttcatcaagttgtatttgccctttcatggacttcatcaagttatatacttagttaggctcaatgttagcacaaacagttgatgagcaagtttaaatttagagtacacttatgtatgagttatttgacaatgcttatttatgagatattgaatattatttatctatattatattaattatagtgttattaaatat

SEQ ID NO: 10236 - DNA, 2299 bp, Zea Mays
tgacatcttccactcttcctttctgcggcgcacccttctttctccatccacttgtgtactttcgacgtcgtcttcctcagtagcgcccccttctttctccacccgccgtcgacgcagctgccttccagccatctccatatccgtttcgccgtccccttcctcctcatcagtggctcgtcaagcgcgtcgtcgggatgcatgggggctccgtcacctaccttgtcgaccccggcaacaacgactcctcctccagaaccgtcgtggtgagttggtcactactgggctgggcttttgggttcctactgcttgttaggtgctgcctccgtgatccgatttgtgctcaactgattgatgctgagcattgttggtcttaatggagtttcagtagttgtttttagcgacgggcttagggggtgtttgggaacacagttttttacagtattggaacaatactgtggtatttgagaataccatggtataatatacagaaaggtgtttggaaatgtaggtaaaatctctgtatttaaaactaaagtattatcaatactgcagctgtttcaaagtattgtaaactttgctctccaccaaagttttcttctgtaaacaagcttgtgagcgtgcggtaccggcgatggcgtgggaccgagctgggttctgcggacacaatgccgaaaaggctgtcactggtgtacctatcgctcgttccaaacttccaatgctgcacggggctgtatgagtatgacagcttgggtgtacgtacgtgtacccaatggttcagctttcatatgattttagctttattagttgcaataaccaactaccgctagctttagattgtatgatatttgttatctagaaggaagacttcaatttatggaataactcaaccatgcggctgttactaaccttagggaatttagaagataattccaataggggaacagagagcctcacatggtatatactttgttcccaaacacctccatgtattcaaaattgtggtattctaaaactgtggtattgaaaactgagatcatgtcatggcatttgtatactgtggtatttgaaataccatggttttgaaaaactgtgtttccaaacacccccttagtacttgtcagtacattttacatgcttcgaattgagatgcataggaattaggagacgtgcgttttttagtaattggtacctacttgcgcctgagactctagtctaggcaccaaagtcagggaggtgtttctctgagctctgcttcaaaactgtattatctgatgtttgtctgagccacaagtcatgaattttgcctgtagtcaaggatggtgaaggtccaatcatgtgcatatcattggtttcctcttgttatgatgaccaaacttgtatctaatatattgatttgaatatgatgacctctatattgtaagtttctgaatttttgcaacacaggtcatgcatttttcctgtagtcaaggatggtgaaggtccaatcatgtgcatatcattggtttcctcttgttatgatgaagagatctggattcaatacttgatttttcatttgtttttaaatatttgttaactgttatggtgtatgtcaatggaatttgggcattggttgctttgactgtttcttggaatgcagataaactacgcctatgctcgagacaatgaaacactatttgatattattagtgtgaagatgaacctctcaattgacaagcgatgcaggataaataatttgtccacaagcatgattgcattatcctagcggcggcggggccgtacaaagagatgctggaagtggtgaacgcgtgcgcgacccggatccggtggcgcctcagtccagcttccaagcgccgcctcctcaacggttgcgtcctgtggtactggtcgactatggtggcacaatgcctcagctacaagaaaatctttgtggcctgctatatcttgcccgacagttcaagctctacaaggttaggtctgttcagtttggctagaaaggcatcccctacctgaacacctacgacgaccgcaccatccgctaccccgaccctctcatcaaggccaacgacaccatcaagatcgatctggagaccaacaagatcatggacttcatcaagttgtatttgccctttcatggacttcatcaagttatatacttagttaggctcaatgttagcacaaacagttgatgagcaagtttaaatttagagtacacttatgtatgagttatttgacaatgcttatttatgagatattgaatattatttatctatattatattaattatagtgttattaaatat

SEQ ID NO: 10237 - DNA, 1123 bp, Zea Mays
cggaaactgattgtcaatccgggctgggccgacgtggcttagtttcgtggcgcttacgaaattacgcagccgcagctcaatgtataatgggccttaacccgtaagcgttgaagcattcgatccgttcccttgccctaagacccacccctgatttcatttccccaatcatggcggcggctctgtcggggacggcggtgtccacggcagcgcttctagccccaatccgagctccaaccagcgcgtttatccggcgctcccagctcacctgtcatcgcctccactcactaaaatgccgccgcgctgggtccatcgtccccgcggccgctgctgccgcggcgggcagcagctcgccgtcgtcagccgttttccacggcgagtgcttcgtggtgggcgacaatatcgacaccgaccagatcatccccgccgagcacctcactctggtgccctccaagccggacgagtaccgcaagctcggttccttcgccttcgcggggctcccatccgcggcctacccgacgccgttcgtcgctccgggtgaggagtcctcccgctacgccatcattgtcggcggagccaacttcgggtgcggttcctctcgcgagcacgcgcccgtcgcgcttggggccgctggcgcacgcgccattgttgcggagggctacgcgcgcatcttttttcgcaactccgtggccactggagaggagtacaagctgaaaccaattggtgatgctggccctgtaattgaggcgggagggatctttgcctacgcccggaagacaggaatgattgcgtcgaaagctgctgcatgagggaaagcttatgcagccgagcctctgcggagatgaagaagtaagctggagttaggactaagagttactgcacctacttgatgtcgacggtgtctcaaaataagttgcggcctaccgaaattatgatgaatcaatcaatttggtctttgtcacagatcgtttttttttgttactagtacttgtacaattgtactcctgcctgctactgttcttatctgtttgaataactgctctgttgccatcttatgtgtacaactcttgaaactcgctgccgttcgatgtatttgagcttttggtatgcaactcttgaaaatggt

SEQ ID NO: 10238 - DNA, 1219 bp, Zea Mays
cgtcattcgctcaccactcccaccgccaccggcctcaagccaacaccaccagtccacacatgcgcaggcgcacacgcacggccgttgagacttgagacagagacgcaggagcgcggaggaaaaggaggcccagaccaccgacggggaaaaaacatcacgaacaccgttctccatagcgggagtagtgaggaacgaaagagagggggcggcctagggcttcgattccgcagccatggacgccgctgacgtgtggggccgctcatcgtcctcgtcttcttcgtccgccgccgccgcgaggcgcctgcaggcgcgctacgatctgtacatggggatcgacgacgcggacgccggcttggacgaggtgacggagccgcgcggcggggcggagtcctacaactgccccttctgcggcgaggacttcgactttgtcggcctctgctgtcacatcgacgacgagcatgccgttgaggctaagagcggggcatgccccatctgtgctacaagggtcggaatggacttgataggacatttgactatgcaacatggaagttatttcaagatatccttttttaactatgctgccgttgctgatcatttgcatttttacatttttcacattatactacagtgaagatacataggtgtcagggtccggcgcacgtcacgggcccggcggcgcctggagtacgtgcgcccgaccatgaccgcgaccatgacaatagggctgaaccatcattgtcggagaaagatcagaaggaaagggttcaaaggagcaaattcgtccgagggcttgtgctctcgacaatatttgatgatgataacttgtaaagggggtcatcaaacttgataacagcatcacaatagttaaggaacacgaagagaatcatcagactctgctgctgttgtcgtgatcacacaagaggcccatctaagttcgtatatgtacggatggaatatttatgcatgtatgtatttatgtttatctccctgcatttacccttagtgcaacagggtggtaggggacggttgtagtattccaaatttatgtatcaaataaatgaggacactgtccttggggtgcaattgtgtatataatataataatagggagctactcgccatgatttaggatattttatttaactgttgtaataatatgcagtgttttgtatgatgaccccatttttttatatataactgttcattttagtcctttaatg

SEQ ID NO: 10239 - DNA, 829 bp, Zea Mays
gtgatgtcctttgcttaaaaaatgtgcatatggggatggtggaagtttgattgaggagggagcatctgaagatgacgtaaacaacctttccaaattcaaatttcggacaatgagtgatgcagacaagctagctgccggcattgcagcacctgtgggtggagtgatgacagagtgcggtaccaatcctcctgtcgaacatattctttcggctgaggatgcagagtgctgtatctgcctatgcccgtacgaagatggcgtggaactgcgtgagctcccttgcaaccaccattttcactgcagctgtatagacaagtggcttcacataaatgctacatgcccattgtgcaagttcaacatcgtcaagagcaatctccacagagaagaggtctaggtcaataaggaaaaaaataataatcatggcagcacatttcggcatgtcccatcccagctgtgctcgtcagtattgccacatttgccaactggagttgtgattacctgtcttgtagtcaagtcataaaagtcactggtgatgcgcaggtggttgcaatgtcggttctcgtgaatattccttgtaacagtttgctgcaggggctgtacattctcgttctgctcgatctgattgcattgcgatttatttgtacatgaacacgtgaccatgttggatcatgaaagcagtcagtcatttgtaaaatgattcatgaatcggaggctagtatgcaggctgctattagccaaatcctctctatctcttgtctcttatcatgctctgctctacgtgcttgcttcaaaccatatagaccattgttcaacttgtacaaatgattgtctc

SEQ ID NO: 10240 - DNA, 1088 bp, Zea Mays
  misc_feature (1)..(2): n is a, c, g, or t
nnacttgtgatgtcctttgcttaaaaaatgtgcatatggggatggtggaagtttgatttattgtgaagcacttggagtctgcaaacacgatgttttcctttatttggtggatccttgggttctattgggtgtctgcaggtggtcaagctttatcacatgatgctcctcagctttattggctgacaattgtttttctggcatttgatgttttctttgtggtcttctgtattgctttggcttgtgtgattggaatcgctgtttgttgctgccttccgtgcattattggtatcttgtatgctgtaactgatcaggaggagggagcatctgaagatgacgtaaacaacctttccaaattcaaatttcggacaatgagtgatgcagacaagctagctgccggcattgcagcacctgtgggtggagtgatgacagagtgcggtaccaatcctcctgtcgaacatattctttcggctgaggatgcagagtgctgtatctgcctatgcccgtacgaagatggcgtggaactgcgtgagctcccttgcaaccaccattttcactgcagctgtatagacaagtggcttcacataaatgctacatgcccattgtgcaagttcaacatcgtcaagagcaatctccacagagaagaggtctaggtcaataaggaaaaaaataataatcatggcagcacatttcggcatgtcccatcccagctgtgctcgtcagtattgccacatttgccaactggagttgtgattacctgtcttgtagtcaagtcataaaagtcactggtgatgcgcaggtggttgcaatgtcggttctcgtgaatattccttgtaacagtttgctgcaggggctgtacattctcgttctgctcgatctgattgcattgcgatttatttgtacatgaacacgtgaccatgttggatcatgaaagcagtcagtcatttgtaaaatgattcatgaatcggaggctagtatgcaggctgctattagccaaatcctctctatctcttgtctcttatcatgctctgctctacgtgcttgcttcaaaccatatagaccattgttcaacttgtacaaatgattgtctc

SEQ ID NO: 10241 - DNA, 1388 bp, Zea Mays
caagcgcagtacgccgcgacagcgtcgactttctgaacgatctggcggcggccgcggctcccaagttcacgaagcgggaggcgcaagcgaagcggctacctctcgccggagatgccgctggggacctctccagtagtggcggaggccgaggcatggacgtgggagaacgcagcggctggagctgccgccgggttcgccacggtcgcggccctccacccgctcgacgtcgtccgcacccgcttccaagtgagcggcggaagggggtggtctgaagtgcctccgtacaggaacaccgcgcatgctgtgtacactatcacacgatctgagggcctgagaggactttatgcaggattttatcccgcagttcttggatcaactgtttcctggggcctatatttctttttctataacagagctaaacaaaggtacttacagaggaagaatgaccagcttcatccagtccatcatctcatctcagctgcagaagcaggtttccttgtttacaaatcccatatggctggtgaaaacaagactgcaactacaaacagctaaacaccatacttctcagtattctggtttttctgatgctttgaaaactattctaagagaggagggatttcttgcactttataggggaattggacctggtcttttgctggtcacccatggcgcaatacagttcacggcctatgaggaacttcgcaaagctatgatattctttaaaagtgcacaatcaagggcagacgacgcaggaggcggggagtcattggtagtaactgaccaaatctgaattccatcgattttgcggcacttggggctggttcaaaagtagctgctattctacttacttatccttaccaggtcatcagagcccgcttgcagcaacggcctggcactgatggtactccaaagtactcaaatagctggcatgtagtgaaggaaactgcaaagtatgaaggcgtccgtggattttacaggggcatcacgtccaatctactgaaaaaccttccagctgcgtccctcacgttcgtggtgtatgaaaatgttatcaaactattcaaagcaaccaaggagaagacgtagctactcattaaatccaggagtactatgcatggtctgacatttctgagttcaaacgatgcctataatttccattccacgtcaagcccatattttatccatttaacatcgtatatgacaaatatgtaacagtacaggttgtgaccaacctgggtcgtggaaattttttgtacttgcattttgtagagagaaaatacacattttgtttcttcccaaagaaatatgtctttgttatataatccagccgggacgctggcgttgtagatctccgtcctgctgttcggtttaggctgtgtggccgagctatg

SEQ ID NO: 10242 - DNA, 1402 bp, Zea Mays
ctcacccaagcgcagtacgccgcgacagcgtcgactttctgaacgatctggcggcggccgcggctcccaagttcacgaagcgggaggcgcaagcgaagcggctacctctcgccggagatgccgctggggacctctccagtagtggcggaggccgaggcatggacgtgggagaacgcagcggctggagctgccgccgggttcgccacggtcgcggccctccacccgctcgacgtcgtccgcacccgcttccaagtgagcggcggaagggggtggtctgaagtgcctccgtacaggaacaccgcgcatgctgtgtacactatcacacgatctgagggcctgagaggactttatgcaggattttatcccgcagttcttggatcaactgtttcctggggcctatatttctttttctataacagagctaaacaaaggtacttacagaggaagaatgaccagcttcatccagtccatcatctcatctcagctgcagaagcaggtgctttggtttccttgtttacaaatcccatatggctggtgaaaacaagactgcaactacaaacagctaaacaccatacttctcagtattctggtttttctgatgctttgaaaactattctaagagaggagggatttcttgcactttataggggaattggacctggtcttttgctggtcacccatggcgcaatacagttcacggcctatgaggaacttcgcaaagctatgatattctttaaaagtgcacaatcaagggcagacgacgcaggaggcggggagtcattggtagtaactgaccaaatctgaattccatcgattttgcggcacttggggctggttcaaaagtagctgctattctacttacttatccttaccaggtcatcagagcccgcttgcagcaacggcctggcactgatggtactccaaagtactcaaatagctggcatgtagtgaaggaaactgcaaagtatgaaggcgtccgtggattttacaggggcatcacgtccaatctactgaaaaaccttccagctgcgtccctcacgttcgtggtgtatgaaaatgttatcaaactattcaaagcaaccaaggagaagacgtagctactcattaaatccaggagtactatgcatggtctgacatttctgagttcaaacgatgcctataatttccattccacgtcaagcccatattttatccatttaacatcgtatatgacaaatatgtaacagtacaggttgtgaccaacctgggtcgtggaaattttttgtacttgcattttgtagagagaaaatacacattttgtttcttcccaaagaaatatgtctttgttatataatccagccgggacgctggcgttgtagatctccgtcctgctgttcggtttaggctgtgtggccgagctatg

SEQ ID NO: 10243 - DNA, 1888 bp, Zea Mays
caagcgcagtacgccgcgacagcgtcgactttctgaacgatctggcggcggccgcggctcccaagttcacgaagcgggaggcgcaagcgaagcggctacctctcgccggagatgccgctggggacctctccagtagtggcggaggccgaggcatggacgtgggagaacgcagcggctggagctgccgccgggttcgccacggtcgcggccctccacccgctcgacgtcgtccgcacccgcttccaagtgagcggcggaagggggtggtctgaagtgcctccgtacaggaacaccgcgcatgctgtgtacactatcacacgatctgagggcctgagaggactttatgcaggattttatcccgcagttcttggatcaactgtttcctggggcctatatttctttttctataacagagctaaacaaaggtacttacagaggaagaatgaccagcttcatccagtccatcatctcatctcagctgcagaagcaggtttccttgtttacaaatcccatatggctggtgaaaacaagactgcaactacaaacagctaaacaccatacttctcagtattctggtttttctgccagatgctttgaaaactattctaagagaggagggatttcttgcactttataggggaattggacctggtcttttgctggtcacccatggcgcaatacagttcacggcctatgaggaacttcgcaaagctatgatattctttaaaagtgcacaatcaagggcagacgacgcaggaggcggggagtcattggtagtaactgaccaaatgtgtgtttgggtgttgaatatcgactttagcatggttcaataaagacatttcagttcccctgaattcttaattatgttgtttttatattctttccttaaactgttattgccggtatttatatctagcattttcatgatatttcacacatttagacactgtttctctgtattatgcaatttttgaaattatcaaacctaagcaaattgaacatatagttatatgacttatgaaaatagttcatgcaatatcatattgttttttgaaattgtaaaacctaagcgaattgaacatatagttatgtgacttatgaaaatagttcatgcaatatcatattgtttggctccactcataacgtatgtacagttgtagatatacatctatggtatcatattgtttgactccactcataacatatgcagaattgtagatatacatctatccttgggcctttactactttgcctgatattccattctcttcactcttaatgcttagctgaattccatcgattttgcggcacttggggctggttcaaaagtagctgctattctacttacttatccttaccaggtcatcagagcccgcttgcagcaacggcctggcactgatggtactccaaagtactcaaatagctggcatgtagtgaaggaaactgcaaagtatgaaggcgtccgtggattttacaggggcatcacgtccaatctactgaaaaaccttccagctgcgtccctcacgttcgtggtgtatgaaaatgttatcaaactattcaaagcaaccaaggagaagacgtagctactcattaaatccaggagtactatgcatggtctgacatttctgagttcaaacgatgcctataatttccattccacgtcaagcccatattttatccatttaacatcgtatatgacaaatatgtaacagtacaggttgtgaccaacctgggtcgtggaaattttttgtacttgcattttgtagagagaaaatacacattttgtttcttcccaaagaaatatgtctttgttatataatccagccgggacgctggcgttgtagatctccgtcctgctgttcggtttaggctgtgtggccgagctatg

SEQ ID NO: 10244 - DNA, 3826 bp, Zea Mays
tgagaatccaagtgctgccccaatacctctacagtctacacctgctctctcgactcccccaaagtcctcacctccccacctggccacctctgcctttgacctcgccggcgccaacccaaacccgccgccgccgatgcctctggcgcactagcttcgcatctccgtcctcaacatggcgtccgagcgcccgctcctcatcgccacaaccccgggcgcctcaacccccgacgacgccccctcgccgcatcccccagcggcgtcactgctcccgccggcccagtcggagcctcctctccgcgcagaccgtctcgccttctccgtggagatccccgacccattccgctcctaccgccgtggcgacggacccgccgccgacccatccgcgtcgttggagagggaacgtgatgtcggggatgacgaatcccgagaggtcatcgtgggagagtcctcaccggagttctctgggaacgccatccgaacggcaaagtactcgttcctcacctttctaccgcggaacctcttcgaacagttccggcggctgtcgtacgtctacttcctcgcaatcactgtgcttaaccagctgccccaggtcgctgtcttcggccgcggtgcgtccgtgctaccactcgccttcgtgctcttcgtcactgccgtaaaggacgcctacgaggatttccgccgccaccgttccgaccgccaggagaacaaccgccttgccaccgtgctcgcactgggcacagctggcgagttccagcccaagagatggaagcacatacgcgtcggggacgtggtacggatcgagtccaatgagacactgccggccgatatggtgctgcttgctaccagcgatcccaccggtgttgcgcacgtccagactgtgaatctcgatggggagaccaatcttaagacgaggtatgccaagcaggagacacatgtcatgttctcccagaatggtggtgttggtggcgtcctgcattgcgaacgacccaacaggaacatttacggattccaagcaaatcttgagattgatggcaagcgtgtctcgcttgggccatccaacattgttcttcgtggctgtgaactcaagaacaccacatgggcaataggggttgtggtatatgctgggaaggagaccaaggtgatgctaaatagctcaggggcgccatcgaagcggagtcgcttggaaacacagttgaatcgggagactgtcatattatctattatgcttattgggatgtgcacaactgcatccgtgcttgctgggatttggctgctgaatcaccggagggagctggagttcacccaattcttcagggagaaggactatacaactgggaaaaactacaactattatggtgttgggatgcagatattcatcacattccttatggcagtgatagtgtatcaggttatcattcctatctcattgtatatatcaatggagctggtaaggcttggacaggcatatttcatgggtgctgataaagatctgtatgatgagtcatcaaggtcaaagttccagtgcagagctttgaatataaatgaggatttagggcaaataaggtatgtgttctctgacaagactgggacactaacggagaacaagatggtcttccagtgtgcgtcaattcgtggggttgattacaactctggtaaagatacaggtggatactcggttgtagtcggtgatcatctgtggacaccaaagatgtcagttaaaattgaccctgagctcgtgaaactactcagggatggtggttcaaatgaggaaccaaagcttgttcttgaattcttacttgctcttgcttcctgtaataccatagtgccgcttgtccttgacactagagactcaaaacagaagttgattgactatcaggatttgatatactgggacttcatgagtttgatagtgatcgtaagagaatgtctgttatcgtgggctgccctgataagactgttaagctgtatgtgaaaggtgcggacagttcagtatttggaattacaaacaattcatctgaattggacattgttcgtgctacagaggcacatctccataagtactcttcacttggactaagaactcttgttgttgagatcaatgtcaacatattgggggccactgggattgaagataagcttcaagatggggttccagaagcaatagaatctattcggcaagcagacataaaggtttggattttaaccggagacaagcaggagaccgcaatttctattgggtactcctgtaagctgctgaccaatgacatgacacaaatcgttataaataacaattcaaaggagtcatgtcagagaagtcttgtggaggcgcttgctacaactaagaagctcagagccgcttcatcaattggtacacagggtccattgttagcatcagaaacttctaatgtaactcttgctttgattgtagatggtaacagtcttgtttacattctggagacagatttgcaagacgagcttttcaaactagcaactgaatgtagtgttgtcttatgttgccgagtggctccattacagaaggcagggatagttgcccttatcaagaacaggacaaatgatatgaccttagcaattggcgatggcgcaaatgatgtttcaatgattcaaatggctgatgttgggattggcatcagtggccaagaaggtcgacaagctgttatggcatcagatttttctatgggacaatttagatttttggttcctcttttattagttcatggtcactggaattatcaaaggatggcctatatgatcctttacaacttttacaagaatgctatgtttgtcttggttcttttctggtatgtactttatacagcattcactttgacaactgctatcactgagtggagtagtctcctgtatactgtcctgtatacatcccttccaacgattgtcgtcggcattcttgacaaggatcttaataaggcaaccctgatagcttatccaaagctatatggatctggccagagggacgacaagtacaatgtgaatttgtttgtgctcaatatgcttgaagcactctggcagagtttggtcgttttctacttgccgtattttgcatatagacgaagcacaatagatatgtctagtcttggagacttgtgggcacttgcacctgtcattgttgtaaatatgcaattggccatggacattattaggtggaactggataatacatgcgtttgtatggggcacaatagccgcaacaacagtttgtctctttgtgatagattcgatatgggttcttccagggtatggggcaatttttcatataatggggactggtctgttttggtttttgctgcttatcattgttgttacagcaatggtcccacattttgtgttcaaggctttcacagaacactttaggcccagcgatattcaaatcgcccgtgagatggaaaaatttgcaaatgtcaatcaggtgaaccggttggaatttccaacgagaggactttcatgacaatagtagggaaactatagtatttcgttcttttcttattttcacgtctttcccccctactggtgtgaataggagctgattcatttagctgtaaggtgataggtttaatctctaatgtgcatgtatgtattcgtataaaatttacagaaaaggaaatagaagtccacgtacaagttttcatctgtttgttgcagcattattgcaggctaaatttgtggagagtgtattgtaaatatgggatactgatgcttggagattcaattttcaagtttgtagagagaatgtagatttgggaacacacggatgccaggaaatttaagttccagttttgtttcttccgaaa

SEQ ID NO: 10245 - DNA, 1747 bp, Zea Mays
ctatcagtccgaaccgttcttccgtcctgctcaggcgttccgaccagcgttgctcgcttctcgtcactcccgccggctgctgctcttgtctacgccacggtagaatggctttcctcttcaacaagttccaagaggcaatcagaacaattgccaagagccccatgtttgctcgtgatccaaggcatcttcaatttgaagctgatgtgaatcgtttgtttctctatacaaggctggtacccctaatcaaactgcaggaagtgtcgggatctccgagctcatggagattttgttatacctagttctcttgcaaaaccatttgtgaaggtaccatttcctgaatttcttctgctatgcacttagctattatcgtctcggggagaatgctgacgagaaggacgctgaggagattattgacttggctagcaaagcttctattgctgatcagcagaaacaagtgcaggataatgttcattatgaacttacgcatatgtgccaagcaatggatagcattttatgtcctgatacaataaacgacccatcaaaaggaccttcagaagcacataatcattctcagcgtagtggcttaagttttgccgttggtggtgctgcatctgcaaacaagcaaagtgcaattatccctgctacacgacctttaactcgagcagaattgtcaaagaaattcagggatcattttgggtacacacttgacatcggaccatctggaattcctcataaagacgcaggtcaaggtttattcttatcaggacaagcaaatgccggtgctgtcctagccatctatcctggtgttatatattcacctgcttactatcgatatatacctggatacccaagaattgatgtttgcaacaactatctaatcacaagatatgatgggacaataattgatgcaaaaccatggtgttttggtggtgaaacaagagcattatgggatggttcagatttggtggattacaatgctatggcacctaaaggctcagagaacaactctgatcgggtgtggagaatgctaagcaagcctctagaaaaaggtgtaagggaaaattttggtgaagtgcttgaacgacgaaatccccttgcttttggtcattttgcaaatcatccacccaaaggttcaagtcctaatgtcatgatctgcccatacgattttcctttgacagagaaggacatgagagtatacatccctaacattacgtttggtggtcaagagaccattaggatgaagaggtttggctccttctatttcaagtctggaggttctgataatcaggctggtgattctctagtactgaagacgctagtgctggtgagcacaaggtccatatgtgatgaagagctctttcttaattaccgttacagtaactcaaaaagacgaccagagtggtacagccctgtcgatgaagaagaggataagaggagatggagctagtttagcacttctgtatcattctggttgtgcatttttttggctaacttttttagttctttcccccctggaaattgcaactgagcattggtaagctcctgagatcgagatgacagttttgacttaattcgtcatttggtattacatactttggtgtcccaattaccatcatgataaaagttaagctactcatgtaagttctactctcaggtcctttgtggtgcttaaaggattacatttgttactccttttatgtgtgtctatcccaatgattatctatgaaagataaataatttatgcata

SEQ ID NO: 10246 - DNA, 2228 bp, Zea Mays
cccacgacgccgatccccgtcgccgccgcctcatttcctatcagtccgaaccgttcttccgtcctgctcaggcgttccgaccagcgttgctcgcttctcgtcactcccgccggctgctgctcttgtctacgccacggtagaatggctttcctcttcaacaagttccaagagcttcgaagctgtctgcatcctcgttcagatgactatttgatttctcagtattttatgtagtgtaactgttacagcactagcccacgaaggttgatttgattttatgtcaatatgtaatcgccgtaaatattatcaccattttaattgattttattgctaaatgttcaggcaatcagaacaattgccaagagccccatgtttgctcgtgatccaaggcatcttcaatttgaagctgatgtgaatcgtttgtttctctatacaaggtttgctaatatccaaagaaaaagcagatctggttttccactttttattgttgtcatttctttttacgaagtattgtgcttcttgcctgtgattggcggagaactcaaattagcacatcagcacttgcaattttgtgtacttggattctttcaagcttttgcctgccaatttgtttcttttaaatagttgtcatttcattctggttgttcataagtgaaagccatttgtgtgaatgtctggttagatgagttacatcttctcaactcttcatttaggctggtacccctaatcaaactgcaggaagtgtcgggatctccgagctcatggagattttgttatacctagttctcttgcaaaaccatttgtgaaggtaccatttcctgaatttcttctgctatgcacttagctattatcgtctcggggagaatgctgacgagaaggacgctgaggagattattgacttggctagcaaagcttctattgctgatcagcagaaacaagtgcaggataatgttcattatgaacttacgcatatgtgccaagcaatggatagcattttatgtcctgatacaataaacgacccatcaaaaggaccttcagaagcacataatcattctcagcgtagtggcttaagttttgccgttggtggtgctgcatctgcaaacaagcaaagtgcaattatccctgctacacgacctttaactcgagcagaattgtcaaagaaattcagggatcattttgggtacacacttgacatcggaccatctggaattcctcataaagacgcaggtcaaggtttattcttatcaggacaagcaaatgccggtgctgtcctagccatctatcctggtgttatatattcacctgcttactatcgatatatacctggatacccaagaattgatgtttgcaacaactatctaatcacaagatatgatgggacaataattgatgcaaaaccatggtgttttggtggtgaaacaagagcattatgggatggttcagatttggtggattacaatgctatggcacctaaaggctcagagaacaactctgatcgggtgtggagaatgctaagcaagcctctagaaaaaggtgtaagggaaaattttggtgaagtgcttgaacgacgaaatccccttgcttttggtcattttgcaaatcatccacccaaaggttcaagtcctaatgtcatgatctgcccatacgattttcctttgacagagaaggacatgagagtatacatccctaacattacgtttggtggtcaagagaccattaggatgaagaggtttggctccttctatttcaagtctggaggttctgataatcaggctggtgattctctagtactgaagacgctagtgctggtgagcacaaggtccatatgtgatgaagagctctttcttaattaccgttacagtaactcaaaaagacgaccagagtggtacagccctgtcgatgaagaagaggataagaggagatggagctagtttagcacttctgtatcattctggttgtgcatttttttggctaacttttttagttctttcccccctggaaattgcaactgagcattggtaagctcctgagatcgagatgacagttttgacttaattcgtcatttggtattacatactttggtgtcccaattaccatcatgataaaagttaagctactcatgtaagttctactctcaggtcctttgtggtgcttaaaggattacatttgttactccttttatgtgtgtctatcccaatgattatctatgaaagataaataatttatgcata

SEQ ID NO: 10247 - DNA, 2428 bp, Zea Mays
cttgtcgtgctcctttggatcgcgctacacatgtcgcacgcgcgcacactgaaatagctgtgcctctggctgcttcgtcttcctccccttccttgtcctctgcctctgctgcactctgctccacccccttttttctttcccccatccatggtgcagcttttgccggcgctggtggcgctcgcccttctcctcgtcagaccggtggcggatgcggcgatggctaaatacacgttcacagtggggagcatgcagatcagtcagctgtgcagcagcaccagcattattgcggtgaacgggcagctgccgggcccgtcgatagaagtgaacgaaggcgacgatgtcgtcgtcaaggtcgtcaacaactcgccgtacaacgtgaccatccactggcatggtgtgctccagctcatgaccccgtgggcggacggcccgagcatggtgacgcagtgccccatccagcccagcagctcctacacgtaccggttcagcgtgccggggcaggagggcacgctgtggtggcacgcgcactcctccttcctccgcgccacggtgtacggcgccttcatcatccgcccgaggcgcggcaacgcctaccctttcccggcgccggacaaggaggtccccatcgtgctcggtaatcgctgccgctcgtgcatagtatctaatagcctgttgtttgttgatcgaggacacaaagaagagtctgacgttttcttgtctctggatgaggctgtcgtcatgagcaggcgagtggtggaaccgcaatgtagtcgacgtcgagagcgacgccatcttggccggtagtgacagagagattgtgtactatacagacgagacgttcacggcggtggtggagcccagcacgagggtgctcctccgggtcgtcaacgccggcctcaactcgcacctcttcttcaagctggccggccacaacttcaccgtcgtcgccgtggacgcgggctacacctccaacctcaacacggacacgctcgtgctcgcgccgggccagaccgtggacgcgctcgtcaccaccgccgccgcgcccgggagctactacatggcggtgctggcgcacgacaccatgagcccgctcgcgttcgcggcgtcggacacgaccaccgccaccgcgatcctccagtacaacggcacgtcgtccaccaacccgcccgcgatgcccgccatgccgtccagctccgactccgggacggccaacgccttctacttcgggctgaggggcctgggcgcgcccgcggtgccggcgccggtggacgtgagcatgaccatcgagctgggcctcggccagctgccctgcgacccgtcgcagaccaggtgcaacgggaccgcggccgccgccgcgatgaacggcgtctcgttccgcctcccgtcccccgagacgtctctcctcggggcgcacgtcgacggcgtcgcgggggtcttcacggcagatttcccggacggtccgccgccgagcggcacggcgatgtcggtggggaccaagctcaagaagctcagctacaactcggtggtggagatcgtgctgcagaacccggcggccgtcccgacggagaaccacccgatccacctccacggcttcaacttcttcgtgctggcgcaggggatgggtaccttcgccccgggaagcgtggcctacaacctggtggacccggtggcccgcaacaccatcgccgtgcctggcggtggctgggctgtcatacgcttcgtcgccaacaatccaggcatgtggttctttcactgccacctggacccgcacgtgcctatgggcctgggcatggtgttccaggtggacagcgggacgacgcccggctccacgctccctacgccgccgggggattgggtgggagtatgcgacgcgcagcactacgcggccgcggcggcggtagcagcagcgccggtgccagttccggccccagccccagtcccagcaccaatcctagcgccagcaccagcagaatcgccgttgccacctccgcgcgcggtggaccacaagccgtcgcccaaccttcctcagcgcagggagcacacgggtacctctaattccgctgctggacggagagctaaggggcacctcgcttgtttcttgtgttctgtcctccttttctttcttcttcgtcaacacaaggcctagctcatgggaagctttggcgtgatacccgcgcagaatctgcagttttgttcgttcgtgtaagtaatatgaaattgttttttctttaaatcttttatacacgtgtatatggatttatattctgatgtaattgtgtgaccttttccttctccacgtgggaagttgtgcatagcaaagttcatgtttagggtttattggctctctgtattcatgatagacattgatacaaagtaatatcatacactacggtttgatttgaaagcatagcgtatacttgaattaaag

SEQ ID NO: 10248 - DNA, 3078 bp, Zea Mays
gccagcgcgttcttcgtgctctgtcaatctcgcagcagcgccactctcttccccacttccccaccgtggtccccccttccccacccaccggagaccgcgccattccccccttccccaccgcgaccaccagaccggcatggcgcatacctgagattgcgctctccccaccggatccggcttggcgcacaccggagaccacgcccttcacccttccccaccgtggccaccggatcccgcacacgcgcgctccggcatggcgcatccacagcacgaacgcccggaatggagcagcgtgcgtccatgtacccaccggagaccaggccattcaccaccgcagtgcccccaccctcatcatcctcgcgtccccccgtcgctacagccgccaagttggtctgcagggaggtccccccctcaccgcgccacgctcgccgcgcccgccgctcggtcctcgccgcgacatgcgcctaccctcacctacacgatgctcactcctccgcacatcgcaaagccgaaggtccacgccccctccgtgctgtgaccccctcccttgtgtgcccatgatgctggaagggaagtcctaccttgtgccgcgctccctgctaagctcctgcgagatagagacacagtgggcgtacttcgcccacgaggtccacggcggcaagcgcctggcgccggaagactgcgaggtcgaagacctggacaaagctgacgtcggcggcaagcgcagcaagccgccgtctccacagccgcacacgccggacatctccgagggtcgcggctccagccgccatgcctccggttgcggagagcagcagggcactgggagcaaccccatgaattcaatcgaccgtgacctgaccctcaatagcctcctccggactattgaatagggcaaggaagatgtgacgaaaaggtaaggggtttcgatcggagatggcagcggcggcgaccgcacatagagccagcttcccgttgcgtctgcagtagatccttgctggaagctgcgccgtcgcacctgtggtcaaggtcgagtctgagccgattttgtggggtcctagatccagacgtcggtcgacaggtcgctggcgtcagtggaccacgtcgcctatcgcggttgtggagcggagctgtgagcagatcccaagtccaatgacgaagagggagtctcggtagggtgcgataaggcgcgatgaggtcagacacggagcacggacgtgtcctcagtcgctgttgtcatgtgtcagtggatgcagtcgtcgctatcgcccacaagaaacctcgcttcgtggaaagattagtatttaacatttggatgaggaagtcaaggacaccgacctcaagcgctctaccaggaagtccgaggaggccgtcctcgccgacctcgcttggctcggcctcgaatgggaggaagacctgttggtggaagggtgtttttcacaaatatgaagatagccttctcagcactgagcttgattatcttcctaacaacacacacgaattgtccaactgtgctcataaaagaacacctgtgatgcctagaaggaaccctccaccacctccaagagagcaatctaatagtttttttaccgcatggaagctcaaaggcaggagatgcaccgttaggtgcattttgggtgacataacatgcacgaggtgctcaagctgtagttaacaggaaccctttgtttgatggggagtcaattaaggcatcactgtcatcaaagcagaaccaaagctgggtggacaccagcatcagtattcctggcaataggcatgatcattccggtcagatgtcactgacaagtaaagcacaaaataactctttgtccaataatgtttttagaggtctctctgacacggagatacaaaattcttggaaaagtagagcagaacaacctcaacccgagccaaaatgtgagaaagacccatttaacagctttgttgcagattttgacactcacaatctcaacattgccgttggtaaggcatccgaacttgaacttgaagtctccaatctaaaggagcagttgaagaaaatcacattagaaaaggctgagatgacaaccaagcatgaaaagttatctgcaatctgccgatcacagcgtcaggagatccaagagctgaagctcactcttgttgagccaacgcctccctcaaacaaagtcagctcaaggacacaagattctggatctcagcgaaaggaaaagatccaaggcactgtgtgggagcttgaacaagggatgcttgctattgctagcaactcctcatcagccagttctgatgccaaaacatggcaggctttccctgacacaaagactcaggcccgaccaaaggtcgatcatgcaactaatgggagccaaaacataaccaagaacacaacgtcaggtgcttcccccgatgcgtggggttttggtactgataatttcagaacaccagcaacaacattaagagctaccacacagatcaacagggcagctgcccaacggagctcatcccaaagatttaacgctggtgtggccaagagccagtctcggagctgcttccccagggtgaaagtcgtgcacacgtcgctgcagcgggacaacaggtactacgagcgcgaaaacttgctgatggtcatcaagaacaacctgttgtggcaccaccttagcatgggcctgggctatgatgactccaactccaacgatagcggcgtgtcacctagctcggaccgtgcgaacaacatagaggtcgccacagtgtcgccggtgccggcggtcgtcaagaagcaggcgaggttcctggtggcctcacctaggagccccgacgtgaatgagaccatgatggaggagctgcacgagctgtgcgaggcgcgggaggccggcaccgcgttcatcatggagcactcggcatgtggagaccaagcccgggtcgtcactgctcaagaggctgacatgtgaatttgatggacaacatgtatcctcaatgatcgctcgagtgctcagtgagccataatatcgtgaaaattctatgtgcttgtatgtttcgttttctttttataaatcatattgtaatgctatttctataggtggagggtga

SEQ ID NO: 10249 - DNA, 3407 bp, Zea Mays
gccagcgcgttcttcgtgctctgtcaatctcgcagcagcgccactctcttccccacttccccaccgtggtccccccttccccacccaccggagaccgcgccattccccccttccccaccgcgaccaccagaccggcatggcgcatacctgagattgcgctctccccaccggatccggcttggcgcacaccggagaccacgcccttcacccttccccaccgtggccaccggatcccgcacacgcgcgctccggcatggcgcatccacagcacgaacgcccggaatggagcagcgtgcgtccatgtacccaccggagaccaggccattcaccaccgcagtgcccccaccctcatcatcctcgcgtccccccgtcgctacagccgccaagttggtctgcagggaggtccccccctcaccgcgccacgctcgccgcgcccgccgctcggtcctcgccgcgacatgcgcctaccctcacctacacgatgctcactcctccgcacatcgcaaagccgaaggtccacgccccctccgtgctgtgaccccctcccttgtgtgcccatgatgctggaagggaagtcctaccttgtgccgcgctccctgctaagctcctgcgagatagagacacagtgggcgtacttcgcccacgaggtccacggcggcaagcgcctggcgccggaagactgcgaggtcgaagacctggacaaagctgacgtcggcggcaagcgcagcaagccgccgtctccacagccgcacacgccggacatctccgagggtcgcggctccagccgccatgcctccggttgcggagagcagcagggcactgggagcaaccccatgaattcaatcgaccgtgacctgaccctcaatagcctcctccggactattgaatagggtgacgaaaaggtaaggggtttcgatcggagatggcagcggcggcgaccgcacatagagccagcttcccgttgcgtctgcagtagatccttgctggaagctgcgccgtcgcacctgtggtcaaggtcgagtctgagccgattttgtggggtcctagatccagacgtcggtcgacaggtcgctggcgtcagtggaccacgtcgcctatcgcggttgtggagcggagctgtgagcagatcccaagtccaatgacgaagagggagtctcggtagggtgcgataaggcgcgatgaggtcagacacggagcacggacgtgtcctcagtcgctgttgtcatgtgtcagtggatgcagtcgtcgctatcgcccacaagaaacctcgcttcgtggaaagattagtatttaacatttggatgaggaagtcaaggacaccgacctcaagcgctctaccaggaagtccgaggaggccgtcctcgccgacctcgcttggctcggcctcgaatgggaggaagacctgttggtggaagggtgtttttcacaaatatgaagatagccttctcagcactgagcttgattatcttcctaacaacacacacgaattgtccaactgtaagatctgcagggacgaggtacctgcaaagtgatggccatcagaaaatcagaacagcttacggctgcaactcgcttttgatgtgtgcaataatgctttaatgcagtagcatttcttttcgtacagaacggtaacatggctccttcagtcctatatgaaactaaaatcaccttttgtaattgtagaccacaaaacatggaaaccataatagatatttaactcagcatggaacgatggaaattggtgcatctttgatagatgaatgcaacagggttcaatgctatgcattatgttcattttcatgggttagtgggttttgacaagaattctgtgtgtactttcgttagttgtttccttattatcctgtttaaatattttttgtttatttctcctggccttcaattttgataattactactaacatactctaacaccctactataaccagcggcagagctctcgcctcttggcaaggtgctcataaaagaacacctgtgatgcctagaaggaaccctccaccacctccaagagagcaatctaatagtttttttaccgcatggaagctcaaaggcaggagatgcaccgttagaggtctctctgacacggagatacaaaattcttggaaaagtagagcagaacaacctcaacccgagccaaaatgtgagaaagacccatttaacagctttgttgcagattttgacactcacaatctcaacattgccgttggtaaggcatccgaacttgaacttgaagtctccaatctaaaggagcagttgaagaaaatcacattagaaaaggctgagatgacaaccaagcatgaaaagttatctgcaatctgccgatcacagcgtcaggagatccaagagctgaagctcactcttgttgagccaacgcctccctcaaacaaagtcagctcaaggacacaagattctggatctcaggtgatttatctacatatgtctaatacagcatattcactctcctgaagtttattagcatcttgcatagtatttatactccatgcagcgaaaggaaaagatccaaggcactgtgtgggagcttgaacaagggatgcttgctattgctagcaactcctcatcagccagttctgatgccaaaacatggcaggctttccctgacacaaagactcaggcccgaccaaaggtcgatcatgcaactaatgggagccaaaacataaccaagaacacaacgtcaggtgcttcccccgatgcgtggggttttggtactgataatttcagaacaccagcaacaacattaagagctaccacacagatcaacagggcagctgcccaacggagctcatcccaaagatttaacgctggtgtggccaagagccagtctcggagctgcttccccagggtgaaagtcgtgcacacgtcgctgcagcgggacaacaggtactacgagcgcgaaaacttgctgatggtcatcaagaacaacctgttgtggcaccaccttagcatgggcctgggctatgatgactccaactccaacgatagcggcgtgtcacctagctcggaccgtgcgaacaacatagaggtcgccacagtgtcgccggtgccggcggtcgtcaagaagcaggcgaggttcctggtggcctcacctaggagccccgacgtgaatgagaccatgatggaggagctgcacgagctgtgcgaggcgcgggaggccggcaccgcgttcatcatggagcactcggcatgtggagaccaagcccgggtcgtcactgctcaagaggctgacatgtgaatttgatggacaacatgtatcctcaatgatcgctcgagtgctcagtgagccataatatcgtgaaaattctatgtgcttgtatgtttcgttttctttttataaatcatattgtaatgctatttctataggtggagggtga

SEQ ID NO: 10250 - DNA, 2308 bp, Zea Mays
tgataagactgttaaattttgggaccttgaaacttttgagttgatcggttcttctggacccgagaacaaccgagaatactttgagctggctagtgcaatccgttctatgaagttcaacagtgatggtaaaacaattttttgtggattgcatgaaagcttaaaggctctttcctgggaacccaccatatgtcatgatgtgattgatgtaggctggtccacattagcagatctaactgttgacgaagggaaacttcttggctgctcatataaccaaaattgtgtcggtgtgtgggttgtggatttgatgagaaatgagccttatgttgatagtagtgctggatcacacttaaatggaagtataaataggccaattcaatcagatgatagcatgtcatcagtgtttgggaggctatcgatttccagaagcccagccaatgaaattggatcggatactctgcttggatgctcaatgtctggttcaaaagaaagtcctgtctcaacttctgcatcaatgaggggattgtcaaagccacctggaaaaggggacctccggctctcaagatctatttctacacctcttctttctcctagagttagattgaacccaaatttcattgacagacagaagaatcaggcagctactgctgtaccattaccagaaccaatagtccgctttaaagcgaatctctcttcagatgctggaatgttgtctcgcaagtcacatgcatcagcagctcccatgtatagatcaaggtccaatagttctcggtatggtattatggaatcatcttccatacctgttctggccttgaggcatagctctagaaaggatgctggtcccgttcacagtgaagctgccacaggtgagttagcagatattgagcctcaaaatatagaaaaggaaggtttagttgccaatcatggcaaagaagatggcaagttggtacctgtaattgcttcaaggagctcaaagatagtcgaagaagttggctatagaagaatcaccaatgatgtaggatgtaagagagtaaccctagaaagtggtttgagagttaattcagatatggactatagaagcagagctccagaaagccacgaggtgcagcagcttatacatctgtcagaacctgctggtttacatgggaaatttataagagaatcttcaggtgctggggacaataactgttctggttcaatatgcactgagagtgctgagtttaatgaagttgatatctggtacagggtatctggttttgataaatggaaccctgctgctgcaaggaatccagaatttgccagcatccacagaaatgaagtgattggaataagacagttgatggagtcaagtggaaagtatgttgttgacgatcgaccttcctcttctaattacgataacatccagtatgtgacaacactatacagctcgaggctgcatccttcactttctggaaaacttagtgcatctgcaagttatgaagatgatatttctggtctagtggaaaaccatcaagaattcattcatgtaatgaaatctcgactaacaaaactagaggtgatatctgcaggtggtttaccgttgctggcaaagaaatgatataaaaggatctattgatgctacatggagaatgttggattttgctgaactgtatcacattagatgtttgcgcttctctcttacgtcttaccaccagtcttcttgaaagcacatatgacaggcatatgagcattgccttgaggatgattctcagtttcgtgaagagctttggtcccacaatttcttcagccttgttggctataccacctgttggggtagaccttgaagcagagcagaggatggagtggtgcaatctatgtttccaagaactgaagaatgtgagcgtcagcctcaagtttctgacaaggcggcaaggcgaggttgggagattagctcaggagctcagcctttttcttcaggatctctttcaattgtcaagcgtgtaaacagtgaccataccacgacgtgcaaaatattcacgcactcaatttcctttggtcataacagatatagcgacatatagtaggatttacctctagaaagaaagaaatatacagaaactatagggtgaagcttacagggtattttctccgagctagtttgggagcatcatttttttcatagaattcctatttttctaaggtctcgtttgtttcctttcattttaaggaattagaatcttactaatataatatgctattttttttagaatatgacatttcactacttttcaaagttatcatataagcttatcttaaattcatggggtgagag

SEQ ID NO: 10251 - DNA, 3172 bp, Zea Mays
aaacaagaggccgggagcgacgccggaagccaggactcgctgtgcagtgcttccttcctcaacgttccttctcccttcaccatcccactccacctaacaattgggagaagttttagcccagctaagcggctgtggatgggaggatcctaagagcaccctggaaatccaaaaccatctcgtctccgcagcgggagcccaggcttcgtatgacagcggccattgccgatggccactacgcgcgcctacaagcttcaggagtttgtcgcgcacactttgaatgtcaattgtgccaagtttgggaggcgagcatcaaggatcctcatcactggtggggaggatttgaaggtcaatctttgggctatagggaaacccggtgccctcctggtgtttttcattgtacattgcagagtctatcaggctttacaagtccagttgagtcagtaagctttgactcttctgaagttacgataggtgctggtgcagcaagtggaacgataaaaatatggaatattgaggaggcgaaaggtattaaccagtgttggtactcaacagtcagtgcattgaaaacatgaactgcaactatgtcttgcaataatctcagtttctattgacaatttgcacaatgtgcagttgttcgaactttcactggacacagatcaagctgtgcatctcttgatttccatccttttggagaattcttagccactgggtcttcagatacaaacatgaaaatatgggatactcgaaagaagagatgcatccacacatacaagggtcatacccaacgaattaatgtgcttaaatttactcctgatggccgatggattgtttctggtggggctgataactcagtgatggtccagtcaactgcttagatgttcacccctatgagtttttattggctacaggttcagttgataagactgttaaattttgggaccttgaaacttttgagttgatcggttcttctggacccgagaacaaccgagaatactttgagctggctagtgcaatccgttctatgaagttcaacagtgatggtaaaacaattttttgtggattgcatgaaagcttaaaggctctttcctgggaacccaccatatgtcatgatgtgattgatgtaggctggtccacattagcagatctaactgttgacgaagggaaacttcttggctgctcatataaccaaaattgtgtcggtgtgtgggttgtggatttgatgagaaatgagccttatgttgatagtagtgctggatcacacttaaatggaagtataaataggccaattcaatcagatgatagcatgtcatcagtgtttgggaggctatcgatttccagaagcccagccaatgaaattggatcggatactctgcttggatgctcaatgtctggttcaaaagaaagtcctgtctcaacttctgcatcaatgaggggattgtcaaagccacctggaaaaggggacctccggctctcaagatctatttctacacctcttctttctcctagagttagattgaacccaaatttcattgacagacagaagaatcaggcagctactgctgtaccattaccagaaccaatagtccgctttaaagcgaatctctcttcagatgctggaatgttgtctcgcaagtcacatgcatcagcagctcccatgtatagatcaaggtccaatagttctcggtatggtattatggaatcatcttccatacctgttctggccttgaggcatagctctagaaaggatgctggtcccgttcacagtgaagctgccacaggtgagttagcagatattgagcctcaaaatatagaaaaggaaggtttagttgccaatcatggcaaagaagatggcaagttggtacctgtaattgcttcaaggagctcaaagatagtcgaagaagttggctatagaagaatcaccaatgatgtaggatgtaagagagtaaccctagaaagtggtttgagagttaattcagatatggactatagaagcagagctccagaaagccacgaggtgcagcagcttatacatctgtcagaacctgctggtttacatgggaaatttataagagaatcttcagggtatctggttttgataaatggaaccctgctgctgcaaggaatccagaatttgccagcatccacagaaatgaagtgattggaataagacagttgatggagtcaagtggaaagtatgttgttgacgatcgaccttcctcttctaattacgataacatccagtatgtgacaacactatacagctcgaggctgcatccttcactttctggaaaacttagtgcatctgcaagttatgaagatgatatttctggtctagtggaaaaccatcaagaattcattcatgtaatgaaatctcgactaacaaaactagaggtggtttaccgttgctggcaaagaaatgatataaaaggatctattgatgctacatggagaatgttggattttgctgtcactaatgatattgttaatgctctaatggagaataggaactgtatcacattagatgtttgcgcttctctcttacgtcttaccaccagtcttcttgaaagcacatatgacaggcatatgagcattgccttgaggatgattctcagtttcgtgaagagctttggtcccacaatttcttcagccttgttggctataccacctgttggggtagaccttgaagcagagcagaggatggagtggtgcaatctatgtttccaagaactgaagaatgtgagcgtcagcctcaagtttctgacaaggcggcaaggcgaggttgggagattagctcaggagctcagcctttttcttcaggatctctttcaattgtcaagcgtgtaaacagtgaccataccacgacgtgcaaaatattcacgcactcaatttcctttggtcataacagatatagcgacatatagtaggatttacctctagaaagaaagaaatatacagaaactatagggtgaagcttacagggtattttctccgagctagtttgggagcatcatttttttcatagaattcctatttttctaaggtctcgtttgtttcctttcattttaaggaattagaatcttactaatataatatgctattttttttagaatatgacatttcactacttttcaaagttatcatataagcttatcttaaattcatggggtgagag

SEQ ID NO: 10252 - DNA, 1216 bp, Zea Mays
tttcttttcgtttctgttttcctcccacctccccctctccagctctcctactgtcccctcggcctcccgccggtgagcgatggagcggcggtcctccgtccgctttgtgccatccgagattgcaaggatggagaaattggctgcagatagaaaagaccaagtctttgataacaagttctgccagaagcttgcagaagaatttaatcgttctgttggccgtgctggaagtaaagcgttacaagctacacaggttcaaggatggtttcttaataagtttccagcatcagccactaaacctacttgtgtgcccactgcttcccaagaaaagacttcagcctcagaaataaatgtatcagtttctgaaaaaagatctgcagcttccgaagagaaacttttccctcttgatacagaaactaaagatatgattcctgaacttgaagacctggagtttgaggccaagtctacaaaggattttgcctggtatgacattgccctattcttggcacacaggaggaacagggcgggtgaagtagaagtccgggtgagattcgagggttttggggcggatgaggatgagtgggtgaatgtcaagaagttcatccgccagcgttccattcctctggagtcctcacagtgcaaaagcgttgttgaaggtgaccttgttctctgcttcagggagggaaacgaggaggcattgcatttcgatgcacatgttcttgaggttcagcggaagcagcatgatattagggggtgcagatgtgtattccttgttgaatacgatcatgaccaaagccaggagagggttagcctgagaagattgtcccggcggccaaagtacttttgaaggctgctcctgttagcctgatgggcatatctattctggaactggaactaaccggagcgtgaaacttaggtgaagttagtttgtggcgtccttggtcatgtgtgtattagcaaccggcggcagcaagcatgggcttgcatctcaacccctttggcacaggactggctgactgaattttataaactcgttatcgtgcagaagagggaagagtacgcggcttgagcacttagggtgtcacttaggatgtgtttggttcgtgaagtcaccttatgcttcatgaggtgtatcatgaattcatcctataattttttgtggcatcaacctattcctcgtttatatattaattattagtttatgagttagtaatgaatc

SEQ ID NO: 10253 - DNA, 2422 bp, Zea Mays
cccgcacccgcactcgggctctcgaaaagcagggaaaaagaattctccatttccccactcgccctcgctccctccctctcccgctcccgctcgccagtgggagtgtgcggggctagcagctagggtttccgcgagcacaccgccggccagccgcgggcgatctcgggttcgcgggggcgcccgccccgactcgggttcgcgggggcgcggacatgaagtcgtcgctgcggaagctgcggggcttcgcgctgcagcgccacgagcagcgggtggaccgggaccgcggccgcggccactccaccacggcggcggaggagctcctcgctgctgcccaggatatgacagatatgaggagctgttacgataacttgctttctgttgctgcagcaattgcaaatagtgcatacgagttctctgaagcacttcaagacatgggggcttgtttgcttaaaagaattacaccaaataaagatggaatcaatgcgtgtgcatgttcttaatacgatcaccactccatcactgtcgcttcttaatgagcttcaaaccgtggaggaaatgaagcgccaatgtgatgaaaaaagagaattgtacgaattcatgctaaatgctcagaaagaaaagggaagatctaagaatgctaaaggtgataatgtagcatcagaacaattgaaacaagctcaggaagattatcaagaggaagcgactcttttcctattccggttgaagtcattgaagcaaggacagttccgaagtcttttcacacaagctgctcggcatcatgctgcacagctaaatttgttcagaaagggggtcaagtcccttgaggctgtagagccacatgttaggctcgctgctgagcagcaacacattgatcatcagtttagcgcacttgaggaagaggattatgttgttgaggatgagaatgatgacgagtacaacgacagtcatgatggagagttgtcttttgattatggagaaaataaggaaactgagaaatctggtatcgcttctaggaatcatacagaggatttttttaacagcagcaaagaagattattcttctgttccacatgaaagacagagaattgaaagtcagtcagcaccgctttttcctgggaaaaaggtcaatacagaagagagaataaaagatttgcggcgttctgcgacaaggaagttaaatacttatgttttgcctaccccaaatgatgttcgagctacttctcagatagcatcaggaaatcctatttctggacctctcgagagcaaaggtgccttccattcatctccactccacccttctgcagacataagagatttgagagacaataaactacctagtcctgcaagattgtctaatgtacagtctgtgctgaaagagagcaataccaatacagcagaaacaaggaaagtactcccagtgggtgatctcgctttacctggctattatgacctgaagactctcgacaacaacaaagtgaaaagagggtcattttctggcccaatagcttctagaccacggccaacagagaacaatgatgttatttctgcagcacccaggcatagctctgcacatcagccagtgcacatgagagtatcccccggcaactcgccgccacccatttcctcaccgaagatcaaggagcttcatgagcttcctcgaccgcctgttaatacatcaaaaaacacaacatttcccagtttggttgcccactcggccccattggtagcaaatcctgcatctctgacacccaaagttcaagaccattttaggggggagaacaggttcagacggtaaggagatagaagatcagcaagacaagggagctgccagaatgagcctttcttctcttccttcagctcaaacattgttggaagatcgtcagccattgtcagcagctgctggatcggttagcaaaacataggagtattcactgcgaaggtggattactatcattatcaagcggcttgctgagcccttcctggaagaatgctgtacatattagcatgtgagccctggccagtatcgcggaagtagtaggttgtttctcgtgccctttggctaaggtgtagtctgcagatagtgggtttgcggaaataaattcccccaattttctcaccgcttggttgattgacgcgagatttgctgttgcgcgagcttgtttgcttgccttgaagcgaggtcggagtgccatctgttttctgcagcttctgtaattatcacctggtttcgtttcctgtggttatgtaattaccatccgcttcacccccgatcaaaaccacctgtggtaaggggaaaaaaaaggcaagaagcgctgtgttgtcgtattggcactctacatttaaagccccgggtttggctctacgttcgtttctccctgactcgttggctgacagcgaagttttgtcagttgtgttctctctcc

SEQ ID NO: 10254 - DNA, 2569 bp, Zea Mays
cgcagcacccccgcacccgcactcgggctctcgaaaagcagggaaaaagaattctccatttccccactcgccctcgctccctccctctcccgctcccgctcgccagtgggagtgtgcggggctagcagctagggtttccgcgagcacaccgccggccagccgcgggcgatctcgggttcgcgggggcgcccgccccgactcgggttcgcgggggcgcggacatgaagtcgtcgctgcggaagctgcggggcttcgcgctgcagcgccacgagcagcgggtggaccgggaccgcggccgcggccactccaccacggcggcggaggagctcctcgctgctgcccagatatgaggagctgttacgataacttgctttctgttgctgcagcaattgcaaatagtgcatacgagttctctgaagcacttcaagacatgggggcttgtttgcttaaaagaattacaccaaataaagatggaatcaatgataaagttttgctgttgcttgggaaatcacaatttgaacttcggaaacttgtagatagttatcgtgtgcatgttcttaatacgatcaccactccatcactgtcgcttcttaatgagcttcaaaccgtggaggaaatgaagcgccaatgtgatgaaaaaagagaattgtacgaattcatgctaaatgctcagaaagaaaagggaagatctaagaatgctaaaggtgataatgtagcatcagaacaattgaaacaagctcaggaagattatcaagaggaagcgactcttttcctattccggttgaagtcattgaagcaaggacagttccgaagtcttttcacacaagctgctcggcatcatgctgcacagctaaatttgttcagaaagggggtcaagtcccttgaggctgtagagccacatgttaggctcgctgctgagcagcaacacattgatcatcagtttagcgcacttgaggaagaggattatgttgttgaggatgagaatgatgacgagtacaacgacagtcatgatggagagttgtcttttgattatggagaaaataaggaaactgagaaatctggtatcgcttctaggaatcatacagaggatttttttaacagcagcaaagaagattattcttctgttccacatgaaagacagagaattgaaagtcagtcagcaccgctttttcctgggaaaaaggtcaatacagaagagagaataaaagatttgcggcgttctgcgacaaggaagttaaatacttatgttttgcctaccccaaatgatgttcgagctacttctcagatagcatcaggaaatcctatttctggacctctcgagagcaaaggtgccttccattcatctccactccacccttctgcagacataagagatttgagagacaataaactacctagtcctgcaagattgtctaatgtacagtctgtgctgaaagagagcaataccaatacagcagaaacaaggaaagtactcccagtgggtgatctcgctttacctggctattatgacctgaagactctcgacaacaacaaagtgaaaagagggtcattttctggcccaatagcttctagaccacggccaacagagaacaatgatgttatttctgcagcacccaggcatagctctgcacatcagccagtgcacatgagagtatcccccggcaactcgccgccacccatttcctcaccgaagatcaaggagcttcatgagcttcctcgaccgcctgttaatacatcaaaaaacacaacatttcccagtttggttgcccactcggccccattggtagcaaatcctgcatctctgacacccaaagttcaagaccattttagggcaagacaaatgcttcccagtactgcttcacctttaccaactccaccgcctggatccatatcccgcagtttttctataccttctagggggagaacaggttcagacggtaaggagatagaagatcagcaagacaagggagctgccagaatgagcctttcttctcttccttcagctcaaacattgttggaagatcgtcagccattgtcagcagctgctggatcggttagcaaaacataggagtattcactgcgaaggtggattactatcattatcaagcggcttgctgagcccttcctggaagaatgctgtacatattagcatgtgagccctggccagtatcgcggaagtagtaggttgtttctcgtgccctttggctaaggtgtagtctgcagatagtgggtttgcggaaataaattcccccaattttctcaccgcttggttgattgacgcgagatttgctgttgcgcgagcttgtttgcttgccttgaagcgaggtcggagtgccatctgttttctgcagcttctgtaattatcacctggtttcgtttcctgtggttatgtaattaccatccgcttcacccccgatcaaaaccacctgtggtaaggggaaaaaaaaggcaagaagcgctgtgttgtcgtattggcactctacatttaaagccccgggtttggctctacgttcgtttctccctgactcgttggctgacagcgaagttttgtcagttgtgttctctctcc

SEQ ID NO: 10255 - DNA, 823 bp, Zea Mays
ggtttacttgtcacttgcatgcacgtgacgaacgccatggcgcttgcggttcgtctcatcggccgccgccggttcctcccgccgccgctcgccgccgccgttgctcacctctctgccgcttcccagagcccgtgccaccaccaccacccacttccgacccccgcgctcccgttgccccctcgtgagctccatcctttcgctctccactggcgaagcttctcctggtactcccgctccggctccgggtctgatagcagtcccggcaccgctgccgcggacgctcgcggagaggacgtgtacatcgagaaggaaagcgtgcacttggatggcgtgacaatcgttgatgacgggggaggggtcgtcagtgaggcgggtgctgcggcggatgccgtgggagatgccgccggcgccacggccgacggcgtcgggggagtgccggaattggctgttagcacagttttggacctcatggacgggatccatagcctcaccggactgccgtggtggatgacaatctcctttttctactgtggccatgagattgtggatacttcccgtcctcatagtgcagttacagaagactgctgaaattggtgaagtgttccgaaaagtgtccacttcattaccccctcctcagcctggaagcaatttccgtgaacagtacactctgttccagaagaaaaagaaggagcttggttgcccctcatttatctggaattttgcctattttttggtacagggtgggattctgtggttccataacttgactgagtttccacatggtactttagctcccatctttcctatcttagttgctggtctg

SEQ ID NO: 10256 - DNA, 1347 bp, Zea Mays
tcaatacccctgtgcctcaattcaaacaaaaaagagcctggaagcaatttccgtgaacagtacactctgttccagaagaaaaagaaggagcttggttgcccctcatttatctggaattttgcctattttttggtacagttcccttgctttattctttggatgacgagtataaggagcatgtgcttgaataatcaccctggatttgataatggtgggattctgtggttccataacttgactgagtttccacatggtactttagctcccatctttcctatcttagttgctggtctgcattacctaaatgttcagatttcttttcaggggtcccagatcaaggatcacccaggaatttttggcttgctggctaagtactatagaatatacctcaatgtcctgactatccctttgtttcttgtcgcacatgtggttcctcagggatgcctggtctactggactacaaatggtttattttctgtagctcagcaattatccttgagaaatgatgctgtccgcaagctgttgggattgccagatactagagctcaggttggttacagagcacaaaagtcacctcttgaggtacctgagatgatgcagcttgaagatgctaacttgcaaacgaaatcgatgccatctgacaagggaacagccagtgagagtacaactcctaattttgcaatgggaagtatggatggaaatatatctgcgtccagctcacctgaggagctacttgaacaagcattacagtatctgggcacaggctgccgagatcaagccattccactgatcagtagagagaaacccagatctgtacacagcgttgattgggatgggacaaaccctgttctcaaatagattgtttcccgaagccgcggtttgttttgaacatgctataccaaagattcaagaagatgaccctcttcttgtgcttgcgtattttggggcaggtctttcgaacaagcgtcagggggataatgagacggcaataaaactcctggagagattagcagagctcaaggaaccagaaaagcccatcaacaaaagccgctacttccaagggatgcttgctttggcaagtatattatatagagaaggccggaattcggaggctgccaaatatctgcggatggctattgcttatgatccttctgtagaaaggcttctcaaggaatgcgaggaaggaatggacgatcagccaaagccagaggagaagtgatgtgctggacctgaaaaagccacagtaacagagatagcacaccgcttttgtttttgaacactaaaaccgcccccagctttttaccctttacccatatgatcgtgcaaaacagagtgaagttgaataga

SEQ ID NO: 10257 - DNA, 1476 bp, Zea Mays
ctaaattccaacggatttccttatgcaatttaatacgttccattgacaattaaggatcaatacccctgtgcctcaattcaaacaaaaaagagtgtccacttcattaccccctcctcagcctggaagcaatttccgtgaacagtacactctgttccagaagaaaaagaaggagcttggttgcccctcatttatctggaattttgcctattttttggtacagttcccttgctttattctttggatgacgagtataaggagcatgtgcttgaataatcaccctggatttgataatggtgggattctgtggttccataacttgactgagtttccacatggtactttagctcccatctttcctatcttagttgctggtctgcattacctaaatgttcagatttcttttcaggggtcccagatcaaggatcacccaggaatttttggcttgctggctaagtactatagaatatacctcaatgtcctgactatccctttgtttcttgtcgcacatgtggttcctcagggatgcctggtctactggactacaaatggtttattttctgtagctcagatcagattccatgcatttaatttgaacaagcttgatgcggcaaaaaatgatgctgtccgcaagctgttgggattgccagatactagagctcaggttggttacagagcacaaaagtcacctcttgaggtacctgagatgatgcagtggtcacagcttgaagatgctaacttgcaaacgaaatcgatgccatctgacaagggaacagccagtgagagtacaactcctaattttgcaatgggaagtatggatggaaatatatctgcgtccagctcacctgaggagctacttgaacaagcattacagtatctgggcacaggctgccgagatcaagccattccactgatcaggacagcagtagagagaaacccagatctgtacacagcgttgattgggatgggacaaaccctgttctcaaatagattgtttcccgaagccgcggtttgttttgaacatgctataccaaagattcaagaagatgaccctcttcttgtgcttgcgtattttggggcaggtctttcgaacaagcgtcagggggataatgagacggcaataaaactcctggagagattagcagagctcaaggaaccagaaaagcccatcaacaaaagccgctacttccaagggatgcttgctttggcaagtatattatatagagaaggccggaattcggaggctgccaaatatctgcggatggctattgcttatgatccttctgtagaaaggcttctcaaggaatgcgaggaaggaatggacgatcagccaaagccagaggagaagtgatgtgctggacctgaaaaagccacagtaacagagatagcacaccgcttttgtttttgaacactaaaaccgcccccagctttttaccctttacccatatgatcgtgcaaaacagagtgaagttgaataga

SEQ ID NO: 10258 - DNA, 2364 bp, Zea Mays
ctccatctattccaatttatagtttgcactacaacgagccaatcaaacttagtgtaaaaagaccagacaaaagagatggagtaagagttcagagtaatactgttttgggacataagagattattacatgaaagttggacccagctggtgagcctgtaagtacagtaaaaggggaaaaaataatcaaagccacagcccacagtgaacagagcaaaaggtcaaatgaactggtaaaagaaaacctgccgtagtggactagtggacagtggtcgtagcaagcagatttctacttttctcgcctccggtttcactcgctgcgtgggcagaaaccacggggcggcggtgggcaatccaccacctctctctctccagcaggccgcgcgccgcagttttctccccgggcacatgcccgtgggcacgcgtgcaggccactggccacccccacgcagaaaaaccagcggccgcgcgcaccgacccggccgacgactccggcgaccgcgcgcacacgacaaaaccccggcggcgacgacagacccacaggatcagacgactcagcgagcggaacaccccctggcgccggccgttaaagtcaagtcaagcaccggagccggtgtataaagctccggcgactggtgcccaccacggctagctgccgtcgtcgcagaagtaggagctcgcgtttctccatccgtacgtcctgcagtagtgattgggcagcatcgtcatcgatcgatcgccatgaggctccgcggcgtgctgcgcctcgtcctcgcgctcctcctcgccgccaccgccatcgtgccggtgctgctccttagcgagaacggcggcggcggcgtcgcacctgcgccgccgttcaactcctcgcgtgtcaaggccgtctcgtggcatccaaggatcttcgtgtacaaggggttcctctccgacgccgagtgtgaccacctcgtgactctggcgaagaaaaagatccagcggtccatggtggcggacaacgagtccggcaagagcgtcaagagcgaggtgcgcaccagctccggcatgttcctcgacaagcgccaggacccggtggtgagtcggatcgaggagaggatcgcggcatggacgtttcttcctcaagagaacgccgagaacatgcaggtgctgcgctacgagccggggcagaagtacgagccgcacttcgactacttccacgacagggtcaaccaggcccgcggcggccaccgctacgccaccgtgctcatgtacctgtccaccgtccgcgagggaggcgagaccgtgttccccaacgccaagggttgggagtcccagcccaaggacgccactttctccgagtgtgcacacaaaggattggcagtgaaaccggtgaaaggcgacgccgtgctcttcttcagcctgcacgccgacggcacgccggacccgctcagcctccacgggagctgcccggtgatccggggcgagaagtggtcggcgcccaagtggatccacgtcaggtcgtacgaggacgaaccccaggcagtactcgtgctccccgaggaaaccgacggcgcgcgggtgcgccgataggagcgagcgctgcgcgaagtgggccgcggcgggtgagtgcgcctggaacccggcgtacatgctcggcgccggcgatgagggggcgcctgggcagtgccgcaggagctgcggagtctgcgattcgtaggcgcgtccttgccttttctttctttcttcctttctttgtttgttttgggatgcagtattcagataactagtggctgtttttctgtacttgatgatgatgtgtacatagctagtgaaagctttcttcagatgatgatgacgatgatatgagtcggcaaccaatagatataaacgctgcagctgtttgcttctcttgctgagatatggtgccggttgaactggacagcaattggaggttggagagtggagagaatactattggagtactgccttgattattgctacttgcttcattgcttgccgccagcagtgagctagggacagggagtagtggccgagatcctacaggagcagcaacggcatctcctgcttcatccccatcgccgccaacgtgttgaacttgaaccgttgaagccagccgccgccatcaggttgaaaatgagagtctgagctagggtttgcagttttgcacaagaaaaggcagagagagatacgtacgccacctgctgaaattgagcacgataatgggctgggtcggacgcgcgcaagaaaatggcccaggtttgctttagctgccgctagaagatggcccatttaacggatttcgccggctaatagcggctaatagcggtcaccaagcaatagcggcaaaattgtaatctcctagcggcattat

SEQ ID NO: 10259 - DNA, 2418 bp, Zea Mays
agtgggggtggatgcagagcagttggatcggggacacacacagagagagagagggctttgctttccgttttcctctccaaatggctcatttagctcttgaccggaagagtggagggtggtggtgcgggtagagatagagatagatggcactcgtcggtgtggacagtgctgggttccttggagcttagcgtgacttcatcagaagacgccgtttgcctgcctggctgcttggtcttgggtcgacgaccggagccccctccctcgtgctcgccttcttcctccctgtccctgtccctgctaccgagtttccgggcgctgaccactgggcaactacagctgatctctctctgccgcggcatggaggtggaggctctggagaagaaggggcacgcagcttttgccaaggcgatgaaatctttcggctcttccgagcggtacaagcgatccacgagtggcagatattttgaggatatgtatgctacagacgctttgcgttcttcagacaagacgattgttctacctatgccggaagtggtaaaagctaaggtcaaatgtgatatcactaaggaagctcaacccgggaggggagcacaaagcaccttgagaaaggagattcttcagctcgagaagcacctcaaggatcaacaggctgtgcgtggtgcgctggaaaaggctttagggcctaacgctggccctgtcagcttgtcgccagagaatccaatgccacaggcagctaatgaattgatacgggagattgctacattggagctggaggtcaagaacatggagcagtatctcctgacgctgtaccggaaagcatttgagcagcagcaagcgcctgcgttttccccccctgaccgccgggaagcttcgaagccgtcagtgagctcgcgttctgggcagctccgggaaacgcccatggcaacgaagtcttcttgcaagagtagaggggacgcagcactgcggtccagttacccgccagcgcataagaaactgaacgatccattggcggattgctgcacatctgctcgatttgatagagtggttgattcagacgtcctccgctgccagtctgcgttgtcataccgtggagtttgttcgtccaggatattgccttcggaggacgatagtcttgcaagggctcttcgctcgtgccactcgcagcctttctcattcgtagaggaaggagacaccggtgcatcagggatgataagcttagcagagtatctaggaactaatgtagctgaccacatccctgaaactccaaacaacctgtcagaggagatggtgagatgcatggcggggatatactgcagactcgcagatcctcccttggttcaccacggctcgtcctcttcaccgtcgtcgtcgttctcctcgactagcgcaatctctccgcagtatgtgggggacatgtggagtcccaaatacaggagagaggcgactctggactcccgtctgataaacccgttccatgtcgatggtctgaaggagttcagtggaccttacaacacaatggttgaggttcctatgattagccgggacagtcggaggctgaaagaagccgaggacctgctccagacttacaagttgattttgtatcggttggaagccgttgatctgaggagaatgacagatgaagaaaagatcgcattctgggtcaacatacacaatgctttgctgatgcatgcttatctgaagaatggcgtcccacagaacaatctaaagaaaacatccctacttgttaaggctgcctgcaaaatagccggacgcaacatcaacgccgccgtcatccagagcattgttcttgggtgcaacacacactgccccggacagtggctacggacgctgctttaccccaggatcaaaagcaaggtgagggtgtacactccgaagcggctgttccaccagctggagtcggccaaggaggagttcatccgggcgacggccggcgtgtggaaggagcagaagctgctgctccccaagctggtggaggcgtacgccaaggacgtgaagctctcgccgcagggcctcgtggacatggtccagcgctacctcccggagagcatgaggatggccgtgcagcggtgccagcacggcggcaggtcgtcgggcaaggtcgtggagtgggtgtcctacaacccggccttccgctacctgctcgccagggacctcgcgttccctcacctcagctgaccgttcgttaatctttagtagtatatgcgtgtgtgccatagggttagaagtagagaagggatcatgtgcagtttttgtgtggtggttgtcaatggcttttgtagatgatgaacaggaaacaggggaagaaatgagagaaagcacgtttgacaatggactctgtttgtgacatgtgtcgtcgccttccttctcttgctcatgtcatcgccatggtcacctcct

SEQ ID NO: 10260 - DNA, 2244 bp, Zea Mays
tgttacgttccggcgacaactttggagggagcttgaagggtagggtagcagcgctagagggagattgaaggggtgggcagagggcggcggcgtgagggatcaggtcagcagcgtagggaattttttagatgagatgggagggatgggcatatgggctgggatggtgggctacctaagtgggctggtaggccttttataataaggcgtcaccttgcctctccttgccgtcgcctaggcgtccggaaggtggtggaacgcagcacctcgctttaacgctttaataactatggagaaaagtgcctacagaaacatcagttgagtttcagctattgtcattagatggataaaatgtggaaggtactgaatggctctccagtaaggactgatttggtgaccagggaattggatggatccatgggcatggatcccatataattccctggtcacaaaaccagccctaagtgtgcacccaacactgcactttgttgggaaaaaagcccaaagggtttactcaagccaattcaagaaggtaaccactggaatactggatatcctacatttaatgttttgatgagaacaatatcagctgagctcatttctgcagagtaagcatgtaagcctgaagaaatcaatgaagatgataaaactttaaactcgtccagaatgatgagcttgttactgttaacaaagggaagactcgagctcaactaaccacccaggatcaaactgctttgtcttaactcaatactaagagcccttttggcagcttggaacagttccgatgctcacgtgaaactccagaatcgctgccaaacggaatccagccacagttgcctagtgccctagtcatttctgtagtctgcagtgcatgacacatcagtcatgatgaaaaggacaaaaaatgaagtagttaaaaggaaaggaggataagccataagcatcaaaggtcaagcaagtagtctcaaaggtgccgctgtcaccgagatctcgaacagtgcaagacaaagcaggaaaactgataaaagttggcatgagatgaaacggttgtcttagtatcttttagtaggaattgtactaatgcctgcattgcgctttcccacgataaagccatagatggcaccgacagttggagctatcagctagctctgcagttaaattaggtggtccgcctgcaactgcaagtgccacaccgatagaggatatggttcttttccgagactgcggcaccgacgttctcgcggatcgagccttcgacatgggacgtgcctggagaacgacggcagtagggcactgcgactctgctagtctgccctctgcactgccccctttcacttttcgtgcaacatacctttgcttgctttgagcctatgacatggcacgtgccagagcaacgcatctgtccttgggtcgcttgcagctgcagctcgtcctgtatgtgtttctgcaaccgagcgttccggagctcttggatcctgtgctctgcgtcatatactcgtggtatattgttaaaactgtcggcagatctgatcgacccatttggatctgtacaagtcgcgttctctgcaacccgtggactcgtgcctcggtttgggggaatctatatggggtgtggattggaattccgtggcagatacgaaaagggcaccaactggcaactgggcaccaggtcagtgcatggggatcatggaacggaacggaaaccaagtccggtctccggtgctcccggcggccggtcaaccgtgctcgtgcctgcctctcccccagtccagctcgcacatcgcacccttgcttttgccatctcaagcaaagctacggatctgactaaaggtagcctacgcgagctggttgacacttcagcgatgccctcatctcgcaattctcatacatagtttcatattattgactttatgatatgtgagattgaggatatggaccatatggttttggttggtattaaggctcattgtcagccaccctacgcaaaatacaagcctgattattaatcatccctagtgggcccttacactcaacaactgtggcagtggatacagagtttacatgccccctaattggtgatgggcgcccatccaggagcttgttctctcagccgctatgactgtgacatctctaaggctctatttgtttcacttcattttgaggaattggaatctaactaatgtattagatatttttttaatgtaacatttcataactttctgaagtttatatataagcctatctaaa

SEQ ID NO: 10261 - DNA, 3385 bp, Zea Mays
gcggtgtaatgggaaaatatgctgctggtggagagttgaagcctccaactactgcttacagccgaggatctggaaagcacccacaacttatgccttccacccccagatgggctgttgccaatggagctggagttatattaagtgtctgtgatgaggaggtagctcgttatgagacagcaaatttaacagcagcagctgttcctgcgcttctgctacctccgccaacgacacccttggacgagcatttggtggctggtctgccccctcttgaaccatatgctcgcttgttccatagatattatgcaattgctacaccaagtgctacacagaggttgctttttggtcttctcgaagcacctccatcatgggctccagatgcacttgatgcagcagtacagctagttgagctacttagagcagctgaagattatgcttctggcatgcggcttccaaagaattggatgcatctgcatttcttgcgtgccattggaactgcaatgtcaatgagagctggtattgctgctgatacagctgctgctctgcttttccgaatactttcccaaccaacgctgctttttccaccactgcgacatgctgaaggagttgacgtacatcatgaaccactaggtggctatgtatcatcatataagaaacagttggaagttcctgcatctgaggccactatcgatgccactgcacaaggcattgcttctttgttgtgtgctcatgggcctgatgttgagtggagaatatgtaccatctgggaagctgcctatggtttgctaccactaagttcatcagcagttgatttacctgaaattgttgtagctgccccgcttcagccacctacactgtcatggaacctgtacttaccattattaaaagtattcgagtatctacctcgtggaagtccatctgaagcatgcttgatgaggatatttgtggcaacagttgaagctatacttaggagagcttttccttctgaaacaccagagcaatccagaaagccaagaagtcaatctaagaatcttgctgttgctgaacttcacacaatgatacattcactctttgttgaatcctgtgcctcaatggaccttgcctcccggttgctatttgtggtgttaactgtttgtgtaagtcatcaagctttgccagggggcagcaaaagaccaactggtagcgataaccattccctcgaggaagccactgagcattcaagattaacaaatggaagaagcagatgtaagaagagacaaggccctgttgctacgtttgattcgtatgttctagctgcagtttgtgccttatcttgtgagcttcagctgttcccttgcatttctaagaatggatcacattcaaatttaaaggattccatgaagattatcatacctggaaaaaacaatgggatcaataatgagctacacagtagcatcagctcagcaattattcatactcgtagaattcttgccatcctcgaagcccttttctccttgaagccatcatcagttggtacctcatggagctatagctcaaatgaaatagttgcagcagctatggttgctgctcacgtttctgagttattccgtcggtccaggccatgccttaattcactctctgcactgatgagatgcaagcgggatgctgagatttctaccagggcatcatccctctaccatttgattgacttgcatggtaaaacagtgtcctccattgtgaacaaagctgagcctcttgaagctcacctgacccttacaccagtaaagaaggttaatcaacatcgctgtgaggaaaacaacaccaactcatcggatagtgccaagttggaaaacaagaatggttcaacacataagaaaaacggtttctcaaaaccacacttgaaatgtgcagaagaggttctgaacggcaatgttgcaagtacatctgggaaatccattgcaagcttacaggtggaagcatctgatttggcaaacttccttaccatggatcggaatggggggtaccgagatgtctgcagaaagcacatcagctcaccaaggatggaggaaggttgtggatgcactttgtgatgtcgtttcagcctcaccaaccaaggcctcagctgctatcgttctccaggccgagaaggacttgcagccttggattgctagagacgacgaacaaggccagaagatgtggagagtcaaccaacgtatagtgaagcttatagcggagctcatgaggaaccatgacagccctgaaaccttggtgatactcgctagtgcctctgaccttctacttcgtgctactgatggaatacttgttgacggtgaagcttgtactttgccacagcttgagcttctcgaagtaaccgctcgagcagtccatcttattattgaatggggagatccaggtttatcagttgctgatggcctttctaatctgctaaagtgccgtctttcaaccaccatccgctgcctttctcacccaagcgcgcacgtgcgcgcgctcagcatgtccgttctccgtgacatcctggaccacggatccgtgagccccaacaagatcagccgaggggaacagcagcggaatggcatccagagcccatcgtaccggtgcgtggccgcaggcatcctcaactggcaagcggacgtggagaggtgcatagagtgggaagcccacagccgccgcgccaccgggctgacgctcgccttcctcagtacggcggcgaaggagctcggctgccctctcccgtgctgacgaggccgctcccggatctgatctgacatcggcggccacttgacggccagtgctggcagcttgctgcgggaccggcgagtaggacgctaatctctcgaccaaggacgactcgccggtttgttcacgtgatatgtgatcaaactgatattagatggtgtttccaaagtatatatctactgaggggcttgctcccatgatgcgattttattccaatctgacgtcagatgctttacgagcatatttaactgcttgagctgtacgtagcttgtattacttgtaactttgtgtaatatggttattattgccgaagaagcagaacatagctttttcttttttttctctctcttttttagactgctgctagatccttatccatgcgttgcaacggagcgccatatagattgaagttccccttgcagggctccttgtacggtctataacatgaacataaagatggcatccagtagtcaatcagcaactatcgcaatgagattggtcttctgcacgtgacccagtttagctcccgtgcagggctctctgtaacctactgtgatgtcccatgacatgaacataaatgtggcaggtttatcattcaataaccaaacagcagccgatatgtttcatctttatacataagtgctgatctaat

SEQ ID NO: 10262 - DNA, 4528 bp, Zea Mays
gcgaaaaaatctttttctcgcctctcatcgctcctcgccatttctctctcctcccctccgtctcacccgccgcccgccgcgaaaatctgcgcacggacgcgccggctgcccgcggagagcctcgggtgggagcgcgccccgtcgaggctcttgagctaccaagcatgtcagaatcaaatgtgaagtggattgatgggcttcacttcacatcattgtactggcctccaccccaggatgtggagcagaagcaggcacaaatcttggcctacgtcgagtactttggccagtttacagctgacagtgagcagttccctgaagatgtagctcagctcattcaaagttcctatccatcaaaagaaagtcgcttgatagatgaagtattggcaacttttgttcttcatcatccggagcatggtcatgcagttgtacatccaattctttcacccatcatagatgggacactgtgctatgataggcatggtcctccattcagctccttcatctctttatttagccatacttctgagcaagagtactcagaacagtgggccttggcctgtggagaaattcttagagtcttaactcactacaataggccaattttcaaagttgaacgccaacacagtgaagctgaatgtagcaccacatctgatcaggcaacatctagtgattccacagataagaaatctaacaattctctaggaaatgaatctgaccggaagccattgaggccactaaccccgtggatcactgacatattgctagctgcacctttgggcattcgaagtgactattttcgatggtgtagcggtgtaatgggaaaatatgctgctggtggagagttgaagcctccaactactgcttacagccgaggatctggaaagcacccacaacttatgccttccacccccagatgggctgttgccaatggagctggagttatattaagtgtctgtgatgaggaggtagctcgttatgagacagcaaatttaacagcagcagctgttcctgcgcttctgctacctccgccaacgacacccttggacgagcatttggtggctggtctgccccctcttgaaccatatgctcgcttgttccatagatattatgcaattgctacaccaagtgctacacagaggttgctttttggtcttctcgaagcacctccatcatgggctccagatgcacttgatgcagcagtacagctagttgagctacttagagcagctgaagattatgcttctggcatgcggcttccaaagaattggatgcatctgcatttcttgcgtgccattggaactgcaatgtcaatgagagctggtattgctgctgatacagctgctgctctgcttttccgaatactttcccaaccaacgctgctttttccaccactgcgacatgctgaaggagttgacgtacatcatgaaccactaggtggctatgtatcatcatataagaaacagttggaagttcctgcatctgaggccactatcgatgccactgcacaaggcattgcttctttgttgtgtgctcatgggcctgatgttgagtggagaatatgtaccatctgggaagctgcctatggtttgctaccactaagttcatcagcagttgatttacctgaaattgttgtagctgccccgcttcagccacctacactgtcatggaacctgtacttaccattattaaaagtattcgagtatctacctcgtggaagtccatctgaagcatgcttgatgaggatatttgtggcaacagttgaagctatacttaggagagcttttccttctgaaacaccagagcaatccagaaagccaagaagtcaatctaagaatcttgctgttgctgaacttcacacaatgatacattcactctttgttgaatcctgtgcctcaatggaccttgcctcccggttgctatttgtggtgttaactgtttgtgtaagtcatcaagctttgccagggggcagcaaaagaccaactggtagcgataaccattccctcgaggaagccactgagcattcaagattaacaaatggaagaagcagatgtaagaagagacaaggccctgttgctacgtttgattcgtatgttctagctgcagtttgtgccttatcttgtgagcttcagctgttcccttgcatttctaagaatggatcacattcaaatttaaaggattccatgaagattatcatacctggaaaaaacaatgggatcaataatgagctacacagtagcatcagctcagcaattattcatactcgtagaattcttgccatcctcgaagcccttttctccttgaagccatcatcagttggtacctcatggagctatagctcaaatgaaatagttgcagcagctatggttgctgctcacgtttctgagttattccgtcggtccaggccatgccttaattcactctctgcactgatgagatgcaagcgggatgctgagatttctaccagggcatcatccctctaccatttgattgacttgcatggtaaaacagtgtcctccattgtgaacaaagctgagcctcttgaagctcacctgacccttacaccagtaaagaaggttaatcaacatcgctgtgaggaaaacaacaccaactcatcggatagtgccaagttggaaaacaagaatggttcaacacataagaaaaacggtttctcaaaaccacacttgaaatgtgcagaagaggttctgaacggcaatgttgcaagtacatctgggaaatccattgcaagcttacaggtggaagcatctgatttggcaaacttccttaccatggatcggaatggggggtaccgaggttcacaaactctcctaagatctgtattatcagagaaacaagagctgtgcttctctgttgtctcattgctctggcagaagctcatagcttctcccgaaatgcagatgtctgcagaaagcacatcagctcaccaaggatggaggaaggttgtggatgcactttgtgatgtcgtttcagcctcaccaaccaaggcctcagctgctatcgttctccaggtcaagatattgctatattcgtacgtttggtcataactaattttggtttgagttttgtttgaattatttcaagtaaattctttttacccttttctggttaatttatttcaaagcaaacattcttagtttagttttttttgtttctgacagatctctttcgaaacacgttttaactacaatgcctatgtgaatatgcacccgtttcctattcacgtttctagaattttcgcaggccgagaaggacttgcagccttggattgctagagacgacgaacaaggccagaagatgtggagagtcaaccaacgtatagtgaagcttatagcggagctcatgaggaaccatgacagccctgaaaccttggtgatactcgctagtgcctctgaccttctacttcgtgctactgatggaatacttgttgacggtgaagcttgtactttgccacagcttgagcttctcgaagtaaccgctcgagcagtccatcttattattgaatggggagatccaggtttatcagttgctgatggcctttctaatctgctaaagtgccgtctttcaaccaccatccgctgcctttctcacccaagcgcgcacgtgcgcgcgctcagcatgtccgttctccgtgacatcctggaccacggatccgtgagccccaacaagatcagccgaggggaacagcagcggaatggcatccagagcccatcgtaccggtgcgtggccgcaggcatcctcaactggcaagcggacgtggagaggtgcatagagtgggaagcccacagccgccgcgccaccgggctgacgctcgccttcctcagtacggcggcgaaggagctcggctgccctctcccgtgctgacgaggccgctcccggatctgatctgacatcggcggccacttgacggccagtgctggcagcttgctgcgggaccggcgagtaggacgctaatctctcgaccaaggacgactcgccggtttgttcacgtgatatgtgatcaaactgatattagatggtgtttccaaagtatatatctactgaggggcttgctcccatgatgcgattttattccaatctgacgtcagatgctttacgagcatatttaactgcttgagctgtacgtagcttgtattacttgtaactttgtgtaatatggttattattgccgaagaagcagaacatagctttttcttttttttctctctcttttttagactgctgctagatccttatccatgcgttgcaacggagcgccatatagattgaagttccccttgcagggctccttgtacggtctataacatgaacataaagatggcatccagtagtcaatcagcaactatcgcaatgagattggtcttctgcacgtgacccagtttagctcccgtgcagggctctctgtaacctactgtgatgtcccatgacatgaacataaatgtggcaggtttatcattcaataaccaaacagcagccgatatgtttcatctttatacataagtgctgatctaat

SEQ ID NO: 10263 - DNA, 6681 bp, Zea Mays
ctcgcgtccacctgtcggtgactgcagtgacccgcgtgggccttcacctgtggctcgcgggtgaaataacgcggccgcaccaccaccacccccggcccccgcatcgcgaaaaaatctttttctcgcctctcatcgctcctcgccatttctctctcctcccctccgtctcacccgccgcccgccgcgaaaatctgcgcacggacgcgccggctgcccgcggagagcctcgggtgggagcgcgccccgtcgaggctcttgagctaccaagcatgtcagaatcaaatgtgaagtggattgatgggcttcacttcacatcattgtactggcctccaccccaggatgtggagcagaagcaggcacaaatcttggcctacgtcgagtactttggccagtttacagctgacagtgagcagttccctgaagatgtagctcagctcattcaaagttcctatccatcaaaagaaagtcgcttgatagatgaagtattggcaacttttgttcttcatcatccggagcatggtcatgcagttgtacatccaattctttcacccatcatagatgggacactgtgctatgataggcatggtcctccattcagctccttcatctctttatttagccatacttctgagcaagagtactcagaacagtgggccttggcctgtggagaaattcttagagtcttaactcactacaataggccaattttcaaagttgaacgccaacacagtgaagctgaatgtagcaccacatctgatcaggcaacatctagtgattccacagataagaaatctaacaattctctaggaaatgaatctgaccggaagccattgaggccactaaccccgtggatcactgacatattgctagctgcacctttgggcattcgaagtgactattttcgatggtgtagcggtgtaatgggaaaatatgctgctggtggagagttgaagcctccaactactggtaccagccaactgaagctctgaaggcacatggcgaagaacaatgacatcatcatcctgaatctgcgctcgtgtataagaagcatcaacaccaatatatgcttagtaagctcatgctttaccggatcacgaacaatactaatagcacatgtactatcagacaaatgagaagtcggtatagatacagaaactccaaaatcaacaagcaaccaccgtagccaagtcacctctgtcgtcgcaagagccatagcacacaactcagcctttgtactcgaacgagaaactgctaattgcttcttagtcttccaagcaatgagggaaccactaagaaaaacacaatggtcagaaagagattaaggatatgagaaataactagcccaagtcacatcaaaataggcatggagctgcaaggagctagaacgaggaaagaacagatgacaagagatagtcccacgaagataacatagaacacgaagaagatgattgtagtgaagttgagtgggggtagatacaaacatattcagaatatgcacatgatacgagatgtcatggtgagtaacaccaaggtaaaccagactaccttcaatgtgacgatatcgagtagaatccgaaagaggctcgccattagtggcacaaaggcaaacattgagctccatggggtcttaacagtgcaatgatcagagacacacaagggtgactagcaagtaactgggcacgaagaggctcaaacttttcacgcggatgggtaagcctagacattttacccgctacacgctacccgaacccggacccgaaatacccgaacccacagtacccaaaatctatttcggataaaaaatgctattacccaaaattagtttgggtagtttggctagcagcacctgatacccgaactacctgtaacaacgggtaatatgccctggcgtgcgaggtgtcggagtctgctatctgcgaaccgtggagacgtcagaagtggagtcatgcgacgacccatgagcccatcaagccaaggcgcattcgctttagcttcatctgatccgacgcccgacagtcgacgctgcataacctagcagtagccgccaactgtctccttgtcctcggtggcggtacccgcctgcgactacgccggacgccggttgcttcttcaccagtcaccacggccgtacactccgttgcacagtcgctgcccttactcccttcgtccctcgtccacggtccacctttgcccagttttgatgactggtagttctaaattcttttcctgtaaatcttcaagccgtatgtaatgtgctttggcctttgggcgtatggactctggaatgttgggtgtgtcactgtcagtgtgagcatgtaatgactgttgttcgatgagagcagatagcttctgtcaaatatgctttgggcttctgtcaaatatgcttttgatgagtgatgaccgctagttctattcaccggaaatatttcgggtaaatcgggtataccgaactcgaacccgaaattacgggtagagttttttcttggctgtaatggggtaacaatttctattacccgaatttatcaaagcccgaactacccgacccgaattaaacgggtaacccgaaggtcccgaacgccagtcttatggatgggtcaagaagtcatatgtgcgacgaaactcaagatcagtcttttgatccagacagaactcacatgtgctaggagacatctacagactaagagtatcaagctgacgctaggcgtcagacatctggctatagaattcatcaactgtagaatctccctgacgtaaagaccactcctgacgaatggcagcaagataagtagatgtccagcacacacaacaatcacgaagaagggtccacatctgatgagaactgtcactcaacaaactctgtagaaaagcgagcctccacactagcggtgagaatagaaccagctcaagcatcctcatccatccatatccgatatgcactctactgagcctcatatgatgccagctgatcatcataatctgcaagtagagtgcatcagctgctccctatactgctccattactcgtcttattaagaaaatggctttcatggttgaccttctagagttctaggcacgaaaccaaattggttaaaagagattctcattattcctctcaggcggcgctcgataactctcttccatatcttcatagtatggctcgtcaacttaatttctcggtaattagtacaactttgaatttattcttgtagatcggttccgatatactttaccactcagacatctttattttggacaaacccagccagaagtatctatattttgggatgtaggtagtagtcgataatgtttgttgtgtatggaaaaaaatcaacatatccctgggtgatttagcttacagccgaggatctggaaagcacccacaacttatgccttccacccccagatgggctgttgccaatggagctggagttatattaagtgtctgtgatgaggaggtagctcgttatgagacagcaaatttaacagcagcagctgttcctgcgcttctgctacctccgccaacgacacccttggacgagcatttggtggctggtctgccccctcttgaaccatatgctcgcttgttccatagatattatgcaattgctacaccaagtgctacacagaggttgctttttggtcttctcgaagcacctccatcatgggctccagatgcacttgatgcagcagtacagctagttgagctacttagagcagctgaagattatgcttctggcatgcggcttccaaagaattggatgcatctgcatttcttgcgtgccattggaactgcaatgtcaatgagagctggtattgctgctgatacagctgctgctctgcttttccgaatactttcccaaccaacgctgctttttccaccactgcgacatgctgaaggagttgacgtacatcatgaaccactaggtggctatgtatcatcatataagaaacagttggaagttcctgcatctgaggccactatcgatgccactgcacaaggcattgcttctttgttgtgtgctcatgggcctgatgttgagtggagaatatgtaccatctgggaagctgcctatggtttgctaccactaagttcatcagcagttgatttacctgaaattgttgtagctgccccgcttcagccacctacactgtcatggaacctgtacttaccattattaaaagtattcgagtatctacctcgtggaagtccatctgaagcatgcttgatgaggatatttgtggcaacagttgaagctatacttaggagagcttttccttctgaaacaccagagcaatccagaaagccaagaagtcaatctaagaatcttgctgttgctgaacttcacacaatgatacattcactctttgttgaatcctgtgcctcaatggaccttgcctcccggttgctatttgtggtgttaactgtttgtgtaagtcatcaagctttgccagggggcagcaaaagaccaactggtagcgataaccattccctcgaggaagccactgagcattcaagattaacaaatggaagaagcagatgtaagaagagacaaggccctgttgctacgtttgattcgtatgttctagctgcagtttgtgccttatcttgtgagcttcagctgttcccttgcatttctaagaatggatcacattcaaatttaaaggattccatgaagattatcatacctggaaaaaacaatgggatcaataatgagctacacagtagcatcagctcagcaattattcatactcgtagaattcttgccatcctcgaagcccttttctccttgaagccatcatcagttggtacctcatggagctatagctcaaatgaaatagttgcagcagctatggttgctgctcacgtttctgagttattccgtcggtccaggccatgccttaattcactctctgcactgatgagatgcaagcgggatgctgagatttctaccagggcatcatccctctaccatttgattgacttgcatggtaaaacagtgtcctccattgtgaacaaagctgagcctcttgaagctcacctgacccttacaccagtaaagaaggttaatcaacatcgctgtgaggaaaacaacaccaactcatcggatagtgccaagttggaaaacaagaatggttcaacacataagaaaaacggtttctcaaaaccacacttgaaatgtgcagaagaggttctgaacggcaatgttgcaagtacatctgggaaatccattgcaagcttacaggtggaagcatctgatttggcaaacttccttaccatggatcggaatggggggtaccgagatgtctgcagaaagcacatcagctcaccaaggatggaggaaggttgtggatgcactttgtgatgtcgtttcagcctcaccaaccaaggcctcagctgctatcgttctccaggccgagaaggacttgcagccttggattgctagagacgacgaacaaggccagaagatgtggagagtcaaccaacgtatagtgaagcttatagcggagctcatgaggaaccatgacagccctgaaaccttggtgatactcgctagtgcctctgaccttctacttcgtgctactgatggaatacttgttgacggtgaagcttgtactttgccacagcttgagcttctcgaagtaaccgctcgagcagtccatcttattattgaatggggagatccaggtttatcagttgctgatggcctttctaatctgctaaagtgccgtctttcaaccaccatccgctgcctttctcacccaagcgcgcacgtgcgcgcgctcagcatgtccgttctccgtgacatcctggaccacggatccgtgagccccaacaagatcagccgaggggaacagcagcggaatggcatccagagcccatcgtaccggtgcgtggccgcaggcatcctcaactggcaagcggacgtggagaggtgcatagagtgggaagcccacagccgccgcgccaccgggctgacgctcgccttcctcagtacggcggcgaaggagctcggctgccctctcccgtgctgacgaggccgctcccggatctgatctgacatcggcggccacttgacggccagtgctggcagcttgctgcgggaccggcgagtaggacgctaatctctcgaccaaggacgactcgccggtttgttcacgtgatatgtgatcaaactgatattagatggtgtttccaaagtatatatctactgaggggcttgctcccatgatgcgattttattccaatctgacgtcagatgctttacgagcatatttaactgcttgagctgtacgtagcttgtattacttgtaactttgtgtaatatggttattattgccgaagaagcagaacatagctttttcttttttttctctctcttttttagactgctgctagatccttatccatgcgttgcaacggagcgccatatagattgaagttccccttgcagggctccttgtacggtctataacatgaacataaagatggcatccagtagtcaatcagcaactatcgcaatgagattggtcttctgcacgtgacccagtttagctcccgtgcagggctctctgtaacctactgtgatgtcccatgacatgaacataaatgtggcaggtttatcattcaataaccaaacagcagccgatatgtttcatctttatacataagtgctgatctaat

SEQ ID NO: 10264 - DNA, 2656 bp, Zea Mays
gccgaggctcgtgcgcgcggtcaccgacgctgccgacgtctttgcaataaatgggctgtacatttcactgggatcaccacctcttcctggatggactggagatggtggagacccttgtggtgagggctggcagggtgttctgtgtaccggctcttctataactggaataaccatgaatgctgcaaacttgggaggacagctgggaagtttaggaaacttcaatgccatcaccagcattttcctctctgctaatcaaattactggaagcataccaagttcactgtcaaaactcgaaaacttatcagccatgtcagtcaacggcaaccatctaagtggaggcctaccagacacttttgattcactcaatagacttgtaaatttggatatttcttcgaataacttgactggcgtgttaccgtcgtcaatgaaaagtttggcatctttaacttcattgcacatgcaagacaatcaactgtctgggacccttaacgttttgcaaggtctcccactgaaagacttgaacatagagaataatattttttctggaccggtgcctgcgagcttgcttaacataccaaacttcaagtgagataccttcttcctttcacatttaccttaatcagcttcattaaacctccacgatgttgtctgtagcattgttatttcatctattagacaaatatataatattatttagataggttgtctcgtctatatgaacttgttaagcgactaatagtatatcatcacagaaaggacgggaatccattcaataccacatctgcatctccgccttcaacaggacccgacccaactctaacaccagcacctaacacttcaaattcaacgcccccagcaccagcacccccatctccttcaagagctactcccccgcctaaaacaacctcaaattatcctgaaggatcaactacccgagacagcacttcatcatctaggaaacacaatacatcaaccctcaagattgttggttttgttcttgctggagtagtgctgtttattgttatagtcttcctagtattattttgtctatccaagtaccaagggagacagtcgagatacgatcgtaatagaagtcagctgggaggggtgcatcatagggttgaaccgcaaatcaagccacctccagtgcaacaaagcaatgatattaaagaaggcgagacaccggacaggagggtccatcaactaagttcatctgcagcagcaatatacagatagtctcagagaggagaatgtgatcagagagagtagattaggaagggtttacctagcagagcttcctgatggcaagttattggaggttttaaagattggcaatgctaatggaagaatatcagtagatgacttcctagaacagattgaatgtatctcagatatcaagcatcctaacattcttgagttagtcggatactgtgctgaatatgggcagaggttactcgtatacgaacacttcagcagaacgacactggatgatgcaattcatgatggaaaggatactgaaagtgcactgtcatggaatgcccgcctccaggttgctcttggttcaggaaaagccttagagtatctccatcatagcttccattctccaattgtgcaccagaactttgaaccagctaatgtgctccttgataaaaagttctcagtgtgtgttgctgaatgtggactggcagaattgatgacatcaagttcagtcactcagctgtcaggtcggatgcgtgcatcactggactacgaagcacctgaattccaggattatggggtcatttcagaaaggggtgatgtctacagctttggtgtagtgatgctggaacttcttacggggcgtaaaccatatgatagttcacgcccgcgtcatgagcaacatcttgttagatgggccagttggcagcttcatgacattgaatccctatccaagatggtggacccacctatacgtggacatgttctgagaagcattgtcacattttgctgacataatcagccgctgtatccagcggcagccagagttcaggccaccaatgtctgatattgtacaagacctaactagacttgtaaatgctactggtgaggaatcagagtaaagaaaaaccatggggatatacaatacaaccctcgtgaccaagttgcgtgttgtacaaaattttgggaagataattgtcttgccacaatctgaggacaatattgtaaggatgtattttcttcagagatcattccacactaactcatgtcaaattggagtttcatttacacatggctggagagtggaggtacagcaatttgtgcacctggtcgttgatcatcaaatccatctttttgcatacatgatattgtacatagcaaggccctgaattcttgtaactaacagtcaggagttcgataaattggttagtctaaagctagtcatttaattattcgcttgttcatcatgttggatggatctactctcagcagtcgaagaaaaattgttcggccatttacttcttgtagagaatagagatgatttggttactgctgtaaaacccagttgtattctcctttcagctcttgcctgttgaaatttgaatgtttatctgtggatttattcccgcaatgctgaaaaaaacatgtagcgtgaattttgttcatagtggatatgtat

SEQ ID NO: 10265 - DNA, 3372 bp, Zea Mays
gccgaggctcgtgcgcgcggtcaccgacgctgccgacgtctttgcaataaatgggctgtacatttcactgggatcaccacctcttcctggatggactggagatggtggagacccttgtggtgagggctggcagggtgttctgtgtaccggctcttctataactggaataaccatgaatgctgcaaacttgggaggacagctgggaagtttaggaaacttcaatgccatcaccagcattttcctctctgctaatcaaattactggaagcataccaagttcactgtcaaaactcgaaaacttatcagccatgtcagtcaacggcaaccatctaagtggaggcctaccagacacttttgattcactcaatagacttgtaaatttggatatttcttcgaataacttgactggcgtgttaccgtcgtcaatgaaaagtttggcatctttaacttcattgcacatgcaagacaatcaactgtctgggacccttaacgttttgcaaggtctcccactgaaagacttatcatgattggctgatgtctacaatccagaagcttgtgctcggttgctaaaggaattagcatttttaacaaactatctcttgctgccttctcgtagtatgttgcacttgcacttctctcatgtgccgctcactgatatctggaggcaatgatatctagaagggtaggcttagtgtagtggtgagagctgtctcatcgagtcacctggtggaacgttcgaagcagtctctccatatttacgggtaaaggtttgcctcagtttatcccttccccatacaccactcgtatggaagccttcggcactagattttccctttaatgatattttaataaggttttcttcattggagaaagtaacacatgtttcatttaccatgatcttgcaaatgaacacttagtcaacactaaggaagcgttaaacagtttatgtcaagctcagcattcatgcagtacagccgctctactcttatacttgaattgaattactgaaaccaaactctgacctattatattgaaatattactttgatcgttaactgtttacattttttaatatactttcctgacttcggacaggaacatagagaataatattttttctggaccggtgcctgcgagcttgcttaacataccaaacttcaaaaaggacgggaatccattcaataccacatctgcatctccgccttcaacaggacccgacccaactctaacaccagcacctaacacttcaaattcaacgcccccagcaccagcacccccatctccttcaagagctactcccccgcctaaaacaacctcaaattatcctgaaggatcaactacccgagacagcacttcatcatctaggaaacacaatacatcaaccctcaagattgttggttttgttcttgctggagtagtgctgtttattgttatagtcttcctagtattattttgtctatccaagtaccaagggagacagtcgagatacgatcgtaatagaagtcagctgggaggggtgcatcatagggttgaaccgcaaatcaagccacctccagtgcaacaaagcaatgatattaaagaaggtaaacctttcatcccactattatatagctttgtgtttattttttgcgttcatgtaattggtttatttgataagttcaggcgagacaccggacaggagggtccatcaactaagttcatctgcagcagctctcccaaagaagtctcctgaaaaccaaaaggagcacataattaattttgatcaaacagattcagatctgtttcatgtttctctaccacctcctcctccaccaccgccattaaccccaattgaaagagttgctgcaaatctcattgttccactagaaaagcgatatattcctccaccaaagacaagtagctcgacttcttccgcgtcattctctgttgcatctcttcagcaatatacagatagtctcagagaggagaatgtgatcagagagagtagattaggaagggtttacctagcagagcttcctgatggcaagttattggaggttttaaagattggcaatgctaatggaagaatatcagtagatgacttcctagaacagattgaatgtatctcagatatcaagcatcctaacattcttgagttagtcggatactgtgctgaatatgggcagaggttactcgtatacgaacacttcagcagaacgacactggatgatgcaattcatgatggaaaggatactgaaagtgcactgtcatggaatgcccgcctccaggttgctcttggttcaggaaaagccttagagtatctccatcatagcttccattctccaattgtgcaccagaactttgaaccagctaatgtgctccttgataaaaagttctcagtgtgtgttgctgaatgtggactggcagaattgatgacatcaagttcagtcactcagctgtcaggtcggatgcgtgcatcactggactacgaagcacctgaattccaggattatggggtcatttcagaaaggggtgatgtctacagctttggtgtagtgatgctggaacttcttacggggcgtaaaccatatgatagttcacgcccgcgtcatgagcaacatcttgttagatgggccagttggcagcttcatgacattgaatccctatccaagatggtggacccacctatacgtggacatgttctgagaagcattgtcacattttgctgacataatcagccgctgtatccagcggcagccagagttcaggccaccaatgtctgatattgtacaagacctaactagacttgtaaatgctactggtgaggaatcagagtaaagaaaaaccatggggatatacaatacaaccctcgtgaccaagttgcgtgttgtacaaaattttgggaagataattgtcttgccacaatctgaggacaatattgtaaggatgtattttcttcagagatcattccacactaactcatgtcaaattggagtttcatttacacatggctggagagtggaggtacagcaatttgtgcacctggtcgttgatcatcaaatccatctttttgcatacatgatattgtacatagcaaggccctgaattcttgtaactaacagtcaggagttcgataaattggttagtctaaagctagtcatttaattattcgcttgttcatcatgttggatggatctactctcagcagtcgaagaaaaattgttcggccatttacttcttgtagagaatagagatgatttggttactgctgtaaaacccagttgtattctcctttcagctcttgcctgttgaaatttgaatgtttatctgtggatttattcccgcaatgctgaaaaaaacatgtagcgtgaattttgttcatagtggatatgtat

SEQ ID NO: 10266 - DNA, 3513 bp, Zea Mays
cgcggggccgatcctgctgctggcgctggtcgcattggcggcggccgcgccgaggctcgtgcgcgcggtcaccgacgctgccgacgtctttgcaataaatgggctgtacatttcactgggatcaccacctcttcctggatggactggagatggtggagacccttgtggtgagggctggcagggtgttctgtgtaccggctcttctataactggaataaccatgaatgctgcaaacttgggaggacagctgggaagtttaggaaacttcaatgccatcaccagcatgtcagtcaacggcaaccatctaagtggaggcctaccagacacttttgattcactcaatagacttgtaaatttggatatttcttcgaataacttgactggcgtgttaccgtcgtcaatgaaaagtttggcatctttaacttcattgcacatgcaagacaatcaactgtctgggacccttaacgttttgcaaggtctcccactgaaagacttgtaatacctcaatctcatatctcttcttccatagttgttctgttacatttgtattgataattgaaggcatgccatttatcattatcttctcatttacataacttagcctatatgttgactttccctatggtacatggcattgcaatacaatgtgccgtcaatttccattgttgatttccaaagagtgtaacatttcatattggttccagacactacaagtttgacttgaacattagtttaacagatcatgattggctgatgtctacaatccagaagcttgtgctcggttgctaaaggaattagcatttttaacaaactatctcttgctgccttctcgtagtatgttgcacttgcacttctctcatgtgccgctcactgatatctggaggcaatgatatctagaagggtaggcttagtgtagtggtgagagctgtctcatcgagtcacctggtggaacgttcgaagcagtctctccatatttacgggtaaaggtttgcctcagtttatcccttccccatacaccactcgtatggaagccttcggcactagattttccctttaatgatattttaataaggttttcttcattggagaaagtaacacatgtttcatttaccatgatcttgcaaatgaacacttagtcaacactaaggaagcgttaaacagtttatgtcaagctcagcattcatgcagtacagccgctctactcttatacttgaattgaattactgaaaccaaactctgacctattatattgaaatattactttgatcgttaactgtttacattttttaatatactttcctgacttcggacaggaacatagagaataatattttttctggaccggtgcctgcgagcttgcttaacataccaaacttcaaaaaggacgggaatccattcaataccacatctgcatctccgccttcaacaggacccgacccaactctaacaccagcacctaacacttcaaattcaacgcccccagcaccagcacccccatctccttcaagagctactcccccgcctaaaacaacctcaaattatcctgaaggatcaactacccgagacagcacttcatcatctaggaaacacaatacatcaaccctcaagattgttggttttgttcttgctggagtagtgctgtttattgttatagtcttcctagtattattttgtctatccaagtaccaagggagacagtcgagatacgatcgtaatagaagtcagctgggaggggtgcatcatagggttgaaccgcaaatcaagccacctccagtgcaacaaagcaatgatattaaagaaggcgagacaccggacaggagggtccatcaactaagttcatctgcagcagctctcccaaagaagtctcctgaaaaccaaaaggagcacataattaattttgatcaaacagattcagatctgtttcatgtttctctaccacctcctcctccaccaccgccattaaccccaattgaaagagttgctgcaaatctcattgttccactagaaaagcgatatattcctccaccaaagacaagtagctcgacttcttccgcgtcattctctgttgcatctcttcagcaatatacagatagtctcagagaggagaatgtgatcagagagagtagattaggaagggtttacctagcagagcttcctgatggcaagttattggaggttttaaagattggcaatgctaatggaagaatatcagtagatgacttcctagaacagattgaatgtatctcagatatcaagcatcctaacattcttgagttagtcggatactgtgctgaatatgggcagaggttactcgtatacgaacacttcagcagaacgacactggatgatgcaattcatgatggaaaggatactgaaagtgcactgtcatggaatgcccgcctccaggttgctcttggttcaggaaaagccttagagtatctccatcatagcttccattctccaattgtgcaccagaactttgaaccagctaatgtgctccttgataaaaagttctcagtgtgtgttgctgaatgtggactggcagaattgatgacatcaagttcagtcactcagctgtcaggtcggatgcgtgcatcactggactacgaagcacctgaattccaggattatggggtcatttcagaaaggggtgatgtctacagctttggtgtagtgatgctggaacttcttacggggcgtaaaccatatgatagttcacgcccgcgtcatgagcaacatcttgttagatgggccagttggcagcttcatgacattgaatccctatccaagatggtggacccacctatacgtggacatgttctgagaagcattgtcacattttgctgacataatcagccgctgtatccagcggcagccagagttcaggccaccaatgtctgatattgtacaagacctaactagacttgtaaatgctactggtgaggaatcagagtaaagaaaaaccatggggatatacaatacaaccctcgtgaccaagttgcgtgttgtacaaaattttgggaagataattgtcttgccacaatctgaggacaatattgtaaggatgtattttcttcagagatcattccacactaactcatgtcaaattggagtttcatttacacatggctggagagtggaggtacagcaatttgtgcacctggtcgttgatcatcaaatccatctttttgcatacatgatattgtacatagcaaggccctgaattcttgtaactaacagtcaggagttcgataaattggttagtctaaagctagtcatttaattattcgcttgttcatcatgttggatggatctactctcagcagtcgaagaaaaattgttcggccatttacttcttgtagagaatagagatgatttggttactgctgtaaaacccagttgtattctcctttcagctcttgcctgttgaaatttgaatgtttatctgtggatttattcccgcaatgctgaaaaaaacatgtagcgtgaattttgttcatagtggatatgtat

SEQ ID NO: 10267 - DNA, 965 bp, Zea Mays
ggcggagtcgcggaaaccacaaccgcacgattcgtacaacgtccaaaccgagtgggtccccgcccgctgccgtgcttctccccattttccgcagtttcttcaggttttctctttcctctcctcgcttatcttcctcccaagcaaccgcttctcgccgggcgccggcggcagctgccacgtgccgccaccgtctcatcgcctcgccgtactagccccgcggcttcgtcagccgatgagccgctgccctgtttcctctcatacaatataatggtgtcaaagcctgtagtgcttgtcttcctgttggtggtactcataatcacatcccagtttgaatggaagcaacagcttgtaaacgagttggaatctacggctcgcaaccagaaacatgtttcaagtagagaagagcttgtcaaggatcagataatcttcactcaagaaaagatgattcaaagattgaataattttgtccgaaatcttcagcaacagttggtgcagtgtcgtggcaacaacaggacagttaatcgttctggaacttctttgacatcttatattagtgagatccagatgccgcagatgatggatgactgacaatgtcgcgcggcatgaactatacggataaaaagataggatattcacagagtcatgtggacagcgaagttctcccagtaaaagcagtcataatgtagtattagcctggacagaacaatattcgatcagttccagagagaaaggaacgctgatcctttgaaaacccgtgtaattttatttcccttttcctctttttcccccctaagagaactgaaaattctttgttttatgataggcatctatatatacttattatcctctacagatattgtgatatgaaggtgttttagaagtgtaaattgctctttaatgcgtgctctggcacaatagcactgaaacctcttcagtgaggagaggactctgcctttacatattac

SEQ ID NO: 10268 - DNA, 618 bp, Zea Mays
gttcagattagctatgacccacaagacaagtctgccttcgtcgtcctcaaccctcgtagtcatagagcatcagaggcgccgctcctttcggatctgggcgaggtgagctgcggcgccggacgtcgcggggaagaggatgaactggatcgggcgcaagatccacctctacaatgtcaccatcggcctctacatgctcgattgatattttgatggtttgcctcttctggtacattctccgctatctccttgggttcttccaaagtaatgtgaagactcttttccaagaggggaactaccttgggcaaggcagtacataaccattgtcaaacaagatctgcttatgatcatttgccccatgtaattccatgtgtttaattagttgttaactacttaactgaggagctgagaagaagtaatttaagcaagtgttacagtgtagccatcgtctgtatcttccctggaagccaatagtctctagtgttaatttcaatggaataaaaaaaatacgttgtgcaagttttgattaatttttttttttggttagttgtttccttgctttgctggcctgcggactttacttgtaccatctgttgagttgatcactgaagtacgaatcag

SEQ ID NO: 10269 - DNA, 2698 bp, Zea Mays
tgcttgcccgcggctccggcgacagccgctttgcactccggttccctccaccgccgctccaaaggtccaggtaagcgcgctccctccccctcctccctcccccgcccgttcgtagctccggtgacagccgccatcgcttcgggctccagatcccagcgccagcgccccaaaggtccaggtaagcggaggcggatcttccccttctcccccattcgttttccttgctagggttcatcgtcccctcctcattcccttcccgacgagctctctccccattgctagggttcgtcgtgctggggttggagtagacacggctgcggcggtggctcttccccttcccccctcatccatttttccttgctggggtttgactagacacagaaattcctcatgctaccatttagggtttagggttggttctcctacgtttcagcctcaaggtatcaatgattctgaggcatacgacatattttttgcggtacgacatgtagcaactacaaacctgcttgggattgttgtcttttgggtctgggtgtggaggtatttgaagatatgaagaataatgtctgaattggaccacactaattgttgttgacatgttctgccatatggagatggaaagtgatgccacttttctttgcaacattatcaacatctatccattattaacgtctatccatatttgactatctaatcttaacgacgtgatgtttatttttctcatattctcaaaggggaacactcacattccaagcgcatctctcaaggtgcccaagatatactaagcaaaaatcttgtatcctaatctgataacatgcataaatgtggatggaataggggcatatgactggttcaatcaaggccatgctcctgctgtgacattttaatgctaacgaataagatagcagcatcgatgaaaacagcctgaacataacccaggtaacttatgtcagttgtacttacattttccatataacaccatggttttaggcttctatcaaactgatgaagactgaattttgtctaagtttttttaaagcatactaacattcaagacaagatagcaataaaccaaatcaatacttctagctcattggaatgtcttcctgccttattttatccggattctttgagaaagagacatggatgcacccgattttccctgccctcttctatgcctgtgaaagagtcataaggaaatttcatgagaacgactaccattcaggtattgtgaggtaagctattgaactgtattgatttggctcattcggagtttcaaattgtcagttattaatcaaatgctattatgtacatgcaagcagcaatttatctgggagatgtgctctctattcacatgaagaagcctcggggtttcaagtactaaagtggaatgcatcttttttttgtaaaataccaagtcttgcctttcgactggtatcattttattaattattgcacacatattcgagaagtaatttatctgtggttcttgcttacagttttcccatatatacaggcaccccttctctataactctggcaccaggagataactacttgactgtgcatatccgcgcgctgggtgaccgggcatccaaactttcgattctctgagattttgaactttgatggcagtgaaagggatcaggctccgaaaacagggagcaagaatatgtgtgttgtcttgcaagtcctctttcacgaacgagttgcttcttttatttttttaacatctaaatatccattcaaaatcatacacaatacttcactttgttcttcatgttatacagttcactaagtcaaaaggaaccttgtgcctcctgtgtttccatgatttactattgaacaatgaacatatctgattcacaatgatttagagaacaaaacaacaaggggattaacattttactttcactactttagaccagcactcttgtccgtttttttgtatccaataataaaggccaatttctggcttctctttgcaatatgctttgttgggattgaatctagaaccactgttcttaataatctagcacaaatatgaactgctgccaacaccaccatcttgctctttgtcttcaatatctagaacttttttggctggctgggggaggtgttcttatttctgaattgattcaagacatcgatactcccttagccaagggtgaaagggctataaagccaagaagacgaagaagggtgaagaattcaggttttcggaagcaatagtgaagactattttttggcttctctttgcaatatgctttattgggattggatcctcgatcattgttattaataatctatcacaaatatgagttgttgcagatcctattgacacaaccatctgactctctaccttcatttttttgcaatttttggttgcctgggaggtgttgttgttcctgagtatcttgtcaggcctccttcatgtcttctccctgttcaagtggtgggcttgggagattggctcttgagatatcttctctacgtacatgtactataataaaattcttcatctaaatctagctcatatcatttattttctgatgctatatttttattgagaaatcaaaatatccatatgttgagagcaaatcttgatgtaatcactactgatcaaagtgcacctgagtattttatgcctttaaatgagtagccgaggaactaaagaaggaacgattgggacatgtttg

SEQ ID NO: 10270 - DNA, 1156 bp, Zea Mays
accatttggacaccgatccatccatccatccagccccgtacgtgtctcgctggccgtccgtatatatagagagaggcatcggagattggccgccacgttgccatcgcgcgcggcgcccgccggccaaggccaaccatgctggcgagggctcctccgccgcggccgtgctccagcggcggcagaggccgcttctaacgggtcagcggcggcggccgtcgcagggatcagcagcagcagcagcgcgctggtgacctcgaccgtcgggaaatcgacgaacatcctgtggcatgagtgcgccatcgggcagaaggagcgacagggtctgctgaaccagaagggctgcgtcgtgtggatcactggcctaagcggttcagggaaaagcacgctcgcgtgcgcgctgagccgcgagctgcacggcagaggccacctcacgtacgtcctcgacggcgacaacctcaggcacgggctgaacagggacctcagcttcggagcagaggaccgcgccgagaacatccgcagagggaagtagcgaagctgttcgccgacgctggcctcgtctgcatcgccagcctcatatcgccctacagaagcgaccgaagcgcgtgtcgcgatctgctgcccaagcactcgtttatcgaggtgttcctggacgtgccgcttcaagtgtgcgaagccagggaccccaaaggcctctacaagctcgcacgcgccggcaaaatcaaagggttcaccggcatcgacgatccttacgaaccgccgtcggactgtgagatagtgatccagtgtaaagtcggcgactgcccttcgcctgaatcgatggctggtcacgttgtgtcgtaccttgagacgaatggtttcctccaggactagacatggaatgcgatcgatgcgtctgatgtgtatatatgtagcagcagccggagcggcattgccaaggctgtgtaatctcatggctgtctttctctttaagaccaaaacaaacaagagatggcagtgtaaaaaggaaaaaaaaaactgcgtctgacagagtcgctgaatcaaccatgcttctgataaaagctattgtttgtaggtctcaccctcacttgtgtaacttgagattaagaaagtgcagcacttaccacagtggtttatggtgaagtgaaatccattttcg

SEQ ID NO: 10271 - DNA, 2273 bp, Zea Mays
gtgaagcacgccacgcccccgcctgcctctcctcgccccactctgtctcccgcaatcctcgccttctcgccccaaattgtcggggctctcggtcctcgcccacgctctctatggaaggagatcgcctccgctgcaccccagcactcttgccccggatcgtggtcgggagaggaggcgacatccgaaacacggttcttagcttggaatcaactgctggattagaatcagtgagatgcatgtcacgaactgatctcaaacttgatggatcatttgctgacatgattcttattcctgatactggggttcttgataaaagcagaattctgcaccttttgttttgacaaatcctggatagctgaatttttatgacggtggctctctattttctgtgcaaaactcaaaagagggaaatcctcttcctgaagcacagaaatttcaagtcgcaattcctacccttgatcccaacataacggtcactggtctttattcgctaaccaaaagtgaatttccaaatatttcactgaaggtgcattctgctcaaatttggatattttactctatctagacatcatcattacttatgtaagaccatatcgctgtggattttctgtagaaattttgtgctaggaaaaatgttgggcatttcatatcagagaacatgaaatgacctttgactggtggggttccaaatgagatgtcactgaacgaagatcatgctgttgaaagaatataaattgcaggctaccaagatggttctgtgagtatatgggatgcaacatttcctgttctaatgccaatgtttgtcttggatggttgctgatgttaatttggatggagctaatgcttctgtatgatctctagccttttgttcattaagcatgactttagctgttgggacaacaagtggtctgttgtgcatctataaactccgagaacacattggggattcaagcttccattttgtgagtgaatttaagcaagaagcccactattgttgagttttatgcaaattggtgtgaagtctgcagggaacaagctccatatatctacaaagttgaacaacaatacaaagactgtggaattgtgaggtctgtccatgctgcctgctagaaatgggaaaatatgttagcagtagcaacaagtgtttttggcctttgatcttctggaggtcatgtggttgcagttctaccgatacttgttctacttgggcaaaattaggacaattcagttggagtacactgatgctaaagaaagcctcctgcaagttgctcgtaaggcaccaacaacagcccatggttttcggatccagtgcaacaaatgggttatcatagagaggctgctgcttggttggaacagaacaagacattgtgattttctttgactgttttgtaaggaatcagtgaaggaggctgaattgtggaatactattgtgatgaacatagtgaagcaggctgagttgttgcgtgcttctggttctggtctcagggagttacttggaaggggtttgtctctccgactctgctactgctttttaggcactgcttttttttgaagcacacattgttgtagctgaaacctccataatttcttcaccggttttatttaatctcttgttgcaattataggtgtacacaaaaactaatttttcatttgcttgtattactaaacttaatttcacaatcagccttgtagcactttgagattctgttgtttatttcttgtattagatattcttctgagtactggaataaagtcaatttatcatttttcatcagtaacatcttgagaggctgcttcttacatacaaacctaaagaaccagaggaaattcttgagcctgctcctcttgaagaggaaatggcaccagttgaagatcatgttcttgtaccacctgttaatgaagttgtttcacctcctcccaagactgaggtgtcccgatactggtgacttactggttgggaaaattataatatggtctaaatcttatgtgcttgattctaaaatctgaagttgtgttcctggtgtggaaatagagttgttgggctatttgtgtggggtgtgggttggcatgttcggagctgttcctggttggaaccagtgattttgctactcttttgacggataatttgagtttggagtcgtcgaattttgaaacagaggagtgggtttacatgtaatgttggcaaacgggatctgaattattaataaagcaacactgtttcgctgatatttttagttccaatctctacttctaattatatatatttgtgagat

SEQ ID NO: 10272 - DNA, 1278 bp, Zea Mays
gtggcttgcgcataccgcacatgtttccttcctcactgttcggtcctcccgcccctcccacggcctcacctctcctcgccgacggaatcgaaagcagttttacttccattcgaaatctgcgcctgtggaccggcgtcttgcatgaatttattggtgggggaagtgaaggattttgtggtggtttagggtcttgattggacagtgtattggacttctgtttttttggtgatgaggaccgtagccggaaccaacaagattgtttgcttcgtgggcttctgattggtcgtactcatggcaatgttggtgcctgatcttagtttctcggcatcgatctctagtgtgaagctcccaaggtacggggcatcaaagagtgagacattctttgttaagaagcccccaacattccgtgcagaagctaggccagcggaatctggcaaatatggtactaataatggccgggcaacaaagatggtaccaacaactgagttcaggaggaccagtggtggtcttgtaagatcagggacagttaatggttctccaaatagcgctgtcaatggctcgaccaaggtgttgattaatggttctgcaaatgccattgacaatagctcaaccaaagcagtcattaacggtacgccgaaggtggctgtaaatggtactagtctggtgaaaagcagcaagacttctcttgttaagacgcagaagcaagtgagacccaaagatgacccctttcaagaggaattgaaggttttgccttctgatgagggattcagctgggcaaaagataattacaattctgtgcagaggagcatagatatatggtcttttgtgctttctcttcgagtccgcgtgctatttgacaatgcaaaatgggcatatcctggtggattctcggaagaaaagcagaaagttcgaaggcggaaaactgcttcatggctaagagagcaagtattacagcttggcccaacgtttattaagctcgggcagttatcctccactagatctgatttatttcccagagaatttgtggacgagcttgcgaaactgcaggacagagtacctgctttttctcctgagaaggcaaaagctttcatagagaaagaaatgggttgttccattgatgttgtgtacaaagaatttgaggaacgcccaatagctgctgccagtcttggtcagcgtttgaaggaattgtatgattctctctaattaaagtaaaataatatatccattgcacatcactcctgtatatgtctattgcttttcatatcatgtatcagtttt

SEQ ID NO: 10273 - DNA, 1155 bp, Zea Mays
  misc_feature (1)..(2): n is a, c, g, or t
nnccggaaattcagattgctggctccaaggcttatcagcaagggaagatctatggaattgatgccgcttctggagctgctatattagcacttgatgttcgaccaggaaatcatgttcttgacctctgtgctgccccaggtgcaaagctttgcatgctcgcagatacgcttggaaccactggttctctgactggtgttgatgttgcaaagcaccgccttgcggcctgtcgtacaatgttgcagaagtattctcttggtgaccgtactcggctctttgttgctgatggaactttgttttcccttttacctgtgaactccaggatgcaaagaatggaagggtcaattggcgttgaagaaaatggaagcatattcccagaatggacttcaaggagatcatggaaggatcggcagaagactaggaaagcaaatgcaaatggtcaacagcacctactggcagcttcagaacctgaactgatatactatggtaaacattcaggattagttggacagtgtaaatctgatgtcttttgtccatcagttgatgatgaagcttgtacatctggctatgacaaggtcctagtggatgcggagtgtactcatgatggatccataaaacatattcaaaaatttgaattctggggatggaaaagtctagatcgccgcgtacttgatgctgaaagaactgagaaccttcttcagcttcagttacatctcctcacaaatggttttaaattgttgaaaaccggtggatcacttgtatatagtacttgcagttgcacagaatgaatgcgtggttcaacaattcctttcaacacacccttctgcagatttgcagaagatcaatttggccgacaattggccctgcagaagtggcggcatccccaaaacactgcgattcgatcctgcagtttcacaaaccagtggtctttttgttgccaagttctgtaaactaccgacttaaagcattttctggtctatcttcctggaccattcatgtcctctcacatgtaaaactgggttttcctgtcagcaactaaattacaatttctgttcttgcagttggattggtcagtcaaatacccaaacgatagcaaaccaggtactcaaatggctgatgttatcggcatgaaaccaaatcagttcaaagagattggtg

SEQ ID NO: 10274 - DNA, 1241 bp, Zea Mays
ccgccgtgatggcgcgtctcttcttcctcctcctcctctttccgctcctctactcctccgtcaccggcctcaaccgcagcgacttcccgccgtccttcctcttcggcgccagcacgtcgtcttaccaggtcgaaggcgcatacctagacgacagcaagggcctaagcaattgggatgtcttctcccatgttccaggaaatattgacgatggaagcaatggcgacgtagctgctgaccattatcatcgatacaaggacgacatagaaatgatgcattcgattggtctcagctcctacagattctcattgtcgtggtcgagaattcttccaaagggtcgcttcggaggtgttaatcaggcaggcgttaaattctacaatagcctcatcaacggactgctagaaaaagggatacaaccatttgtgacgatcaaccactatgacatacctgaagaactccaagaaagatacaattcttggttgaacccagagattcaggaggacttcacctacttcgttgagctttgcttcaagatgtttggtgaccgagtaaagcactgggtcacattcaatgagccaaatcttattgtaaagcttgcatactccattggggcatttccacccaaccgttgttccgagccatatgggaaatgtgattcagggaattcatcaactgagccctacattgcagcgcataacatgatattagctcatgcaaagacggtcaacatctacagaaagaattacaagtccaagcaaggtggctttgtaggaatttcattacatctaagatggatcttggatcccttgttctttggtgactatcctcaccagatgcgccaaatcttaggtccaaacttgccaaaatttacagaaggagagaagaaactactgaagaaccaaattgacttcatcgggacacctgttgcaaacacctatgtcgttccaagctccatggagaagttggtcatgtatttaaagcagagatataaaagcatacctttgtacatcacagagaacggttatgcccaaatagccaatattagcactacagcagaagaaataattaatgatattgaaagatcaacttacattcgtgactacctcacttacttgagctttgcaataaggttgttgcatgcctcaattatcttttcatgtaaactgctctccagccaggtaataataaaactttgctacttttgtgcaggaaaggagcagatgtgagaggttattttgtgtggt

SEQ ID NO: 10275 - DNA, 2235 bp, Zea Mays
cttgcatgtaccccacccaccacggcggcataagtatctccgccggctacgcgcgatccaggcccggccgcgtgcgtgcgtgcgtgcgacgactgcacccatacacacatatacgcgctctggctggctgcctgcctggcttgcggagctccgtttcggccggccatctctcgctacgctacgagcgcgcgcggcccccgcgcccgtgtcttcccgctgtcgaccgtcgtgttgatcgtacatgcagctgctagtagcgaactatagttgcagaccgcatcagtgcgtgacaagaggatatatattatcagacacgcacgcgatcgcgcggagatgaaccagtgcgtgccgagctgggatctggtggacgacccgacggcggcggtagctggcggcggaggcggcctaaaccatcaggtctcgacgaccgggggcgcgcaccggggcctgctcctgcaggcgtcagctggaggagcaggcggcgggggcgcgttcgctcccgtcgtcgtgcccatgtcgaaccagtactacgaggtggcggagctgacgtgggagaagggcaacatctcctcccacggcctgctcaaccgcccggcgcacaataagtacccgcccgccgcggcgccgtcgtcggctcagctgcatgccatagcaggaggaggcggccgcggcggcgggtcgccatccggggaccgcgagacgctcgaggcggtggtcggcgaggcggccgcgcggtcgcacttcctctcgcagccggcgccgccgtggctgatcggcgccgacgccgtggcgcgggccgcggcggacgcgctagtgccgtgcgccgcaagggcgggcgagtccgctgcagacggcggagaagcgggcgcctcgaggaggaagcggccgcgcgtggtcggcgacgacagtctggtggtgtgcgccagccaggggagcaccgcgcctcgccgccgcggcgagagcgcgctgctcacgcagctggacgcctgcggcaccgaggccgacgacgtgtgcggcttcagaacgaccacaaccaacaactccacgtccatggaccgtgacgacaaaggctccccggatactgagaacaccagcatcggcggaggggccagtgattcgcgctgtttcagccgtcgctcacagagagacggcttatgcgacgacgacgaggagaacgtggtgatcaacggggacgacggggcgatgaggtcgtcgatttccaccaagaggagccgggctgctgcgacccataacgaatctgagcgtaaacgaagggacaggatcaaccagaagatgaaaacgctgcagaagctcgtcccgaactcgaacaagacagacaaggcgtcgatgctggacgaggtgatcgactacctgaagcagctgcaggcgcaggtgcagctgatgagccggatgggaagcatgatgatgcccatggcgatgccgcagctccagatgtcgatgatggcccagatggcacagatggcgcagatggcgcagatggcccagatgaacatgggctccctcggccagccgggctacgcaggcctcacgccgcccatgatgcacccgccccccttcgtccccgtgtcctgggacaccaccgccaccgccaccacctccctcgccccgcaggccggcagcggcacggtgccagcggacgccttctccgccttcctagcttgccaagcgcagcagaacgggcagcagcaaccgggtagcatggaggcgtacaatagaatggtggcgctgtaccagaagatgaaccaaacgcagcagagcgcgcccagcaacccgtccaagcagtgagcatgacgtacgtacagctgctttcttgtacattgtttgttcagttttgtttagatttttttggctcattttatcgcatttgttcagattctttcctctcaattgatgaggcctggaactgtgtaacagagtctatgacagctggggcccgcgagcaggaggtggcgcatgcagtcttctgcagagaggagagagaaatcgtggaaaaagggagtgcagggaaccgtttgtctgcctagaatattgtcacacccggcttttagaagaaacacaatacatatgtatgtgttcccagtaaattactcacacatactacgacatcgttaatgataatattacactataccggcttactagagcatgcaaaacccacataaatgatatatatcttaagagatatcaagtgggtaagtgtaaaaaataccaaag

SEQ ID NO: 10276 - DNA, 2282 bp, Zea Mays
gcggggcacacgatgcgttgcattgcatggctccgccacacacaccccttgcatgtaccccacccaccacggcggcataagtatctccgccggctacgcgcgatccaggcccggccgcgtgcgtgcgtgcgtgcgacgactgcacccatacacacatatacgcgctctggctggctgcctgcctggcttgcggagctccgtttcggccggccatctctcgctacgctacgagcgcgcgcggcccccgcgcccgtgtcttcccgctgtcgaccgtcgtgttgatcgtacatgcagctgctagtagcgaactatagttgcagaccgcatcagtgcgtgacaagaggatatatattatcagacacgcacgcgatcgcgcggagatgaaccagtgcgtgccgagctgggatctggtggacgacccgacggcggcggtagctggcggcggaggcggcctaaaccatcaggtctcgacgaccgggggcgcgcaccggggcctgctcctgcaggcgtcagctggaggagcaggcggcgggggcgcgttcgctcccgtcgtcgtgcccatgtcgaaccagtactacgaggtggcggagctgacgtgggagaagggcaacatctcctcccacggcctgctcaaccgcccggcgcacaataagtacccgcccgccgcggcgccgtcgtcggctcagctgcatgccatagcaggaggaggcggccgcggcggcgggtcgccatccggggaccgcgagacgctcgaggcggtggtcggcgaggcggccgcgcggtcgcacttcctctcgcagccggcgccgccgtggctgatcggcgccgacgccgtggcgcgggccgcggcggacgcgctagtgccgtgcgccgcaagggcgggcgagtccgctgcagacggcggagaagcgggcgcctcgaggaggaagcggccgcgcgtggtcggcgacgacagtctggtggtgtgcgccagccaggggagcaccgcgcctcgccgccgcggcgagagcgcgctgctcacgcagctggacgcctgcggcaccgaggccgacgacgtgtgcggcttcagaacgaccacaaccaacaactccacgtccatggaccgtgacgacaaaggctccccggatactgagaacaccagcatcggcggaggggccagtgattcgcgctgtttcagccgtcgctcacagagagacggcttatgcgacgacgacgaggagaacgtggtgatcaacggggacgacggggcgatgaggtcgtcgatttccaccaagaggagccgggctgctgcgacccataacgaatctgagcgtaaacgaagggacaggatcaaccagaagatgaaaacgctgcagaagctcgtcccgaactcgaacaagcagacagacaaggcgtcgatgctggacgaggtgatcgactacctgaagcagctgcaggcgcaggtgcagctgatgagccggatgggaagcatgatgatgcccatggcgatgccgcagctccagatgtcgatgatggcccagatggcacagatggcgcagatggcgcagatggcccagatgaacatgggctccctcggccagccgggctacgcaggcctcacgccgcccatgatgcacccgccccccttcgtccccgtgtcctgggacaccaccgccaccgccaccacctccctcgccccgcaggccggcagcggcacggtgccagcggacgccttctccgccttcctagcttgccaagcgcagcagaacgggcagcaaccgggtagcatggaggcgtacaatagaatggtggcgctgtaccagaagatgaaccaaacgcagcagagcgcgcccagcaacccgtccaagcagtgagcatgacgtacgtacagctgctttcttgtacattgtttgttcagttttgtttagatttttttggctcattttatcgcatttgttcagattctttcctctcaattgatgaggcctggaactgtgtaacagagtctatgacagctggggcccgcgagcaggaggtggcgcatgcagtcttctgcagagaggagagagaaatcgtggaaaaagggagtgcagggaaccgtttgtctgcctagaatattgtcacacccggcttttagaagaaacacaatacatatgtatgtgttcccagtaaattactcacacatactacgacatcgttaatgataatattacactataccggcttactagagcatgcaaaacccacataaatgatatatatcttaagagatatcaagtgggtaagtgtaaaaaataccaaag

SEQ ID NO: 10277 - DNA, 2445 bp, Zea Mays
cggggcacacgatgcgttgcattgcatggctccgccacacacaccccttgcatgtaccccacccaccacggcggcataagtatctccgccggctacgcgcgatccaggcccggccgcgtgcgtgcgtgcgtgcgacgactgcacccatacacacatatacgcgctctggctggctgcctgcctggcttgcggagctccgtttcggccggccatctctcgctacgctacgagcgcgcgcggcccccgcgcccgtgtcttcccgctgtcgaccgtcgtgttgatcgtacatgcagctgctagtagcgaactatagttgcagaccgcatcagtgcgtgacaagaggatatatattatcagacacgcacgcgatcgcgcggagatgaaccagtgcgtgccgagctgggatctggtggacgacccgacggcggcggtagctggcggcggaggcggcctaaaccatcaggtctcgacgaccgggggcgcgcaccggggcctgctcctgcaggcgtcagctggaggagcaggcggcgggggcgcgttcgctcccgtcgtcgtgcccatgtcgaaccagtactacgaggtggcggagctgacgtgggagaagggcaacatctcctcccacggcctgctcaaccgcccggcgcacaataagtacccgcccgccgcggcgccgtcgtcggctcagctgcatgccatagcaggaggaggcggccgcggcggcgggtcgccatccggggaccgcgagacgctcgaggcggtggtcggcgaggcggccgcgcggtcgcacttcctctcgcagccggcgccgccgtggctgatcggcgccgacgccgtggcgcgggccgcggcggacgcgctagtgccgtgcgccgcaagggcgggcgagtccgctgcagacggcggagaagcgggcgcctcgaggaggaagcggccgcgcgtggtcggcgacgacagtctggtggtgtgcgccagccaggggagcaccgcgcctcgccgccgcggcgagagcgcgctgctcacgcagctggacgcctgcggcaccgaggccgacgacgtgtgcggcttcagaacgaccacaaccaacaactccacgtccatggaccgtgacgacaaaggctccccggatactgagaacaccagcatcggcggaggggccagtgattcgcgctgtttcagccgtcgctcacagagagacggcttatgcgacgacgacgaggagaacgtggtgatcaacggggacgacggggcgatgaggtcgtcgatttccaccaagaggagccgggctgctgcgacccataacgaatctgagcgtaaacgaagggacaggatcaaccagaagatgaaaacgctgcagaagctcgtcccgaactcgaacaagacagacaaggcgtcgatgctggacgaggtgatcgactacctgaagcagctgcaggcgcaggtgcagctgatgagccggatgggaagcatgatgatgcccatggcgatgccgcagctccagatgtcgatgatggcccagatggcacagatggcgcagatggcgcagatggcccagatgaacatgggctccctcggccagccgggctacgcaggcctcacgccgcccatgatgcacccgccccccttcgtccccgtgtcctgggacaccaccgccaccgccaccacctccctcgccccgcaggccggcagcggcacggtgccagcggacgccttctccgccttcctagcttgccaagcgcagcagaacgggcagttttgtttagatttttttggctcattttatcgcatttgttcagattctttcctctcaattgatgaggcctggaactgtgtaacagagtctatgacagctggggcccgcgagcaggaggtggcgcatgcagtcttctgcagagaggagagagaaatcgtggaaaaagggagtgcaggtacacggtgtctgttttgcggagacagatgtggaggctgctggagagcgaaatagtgactcagagcgtgtataatgcggatgcggagtgggatggggagtgtagctggagttggtcccagaagcaccggaagtcgaacaggtgatgaaggcgatgtcacgcaagtagtagtagtgtgtacggtactaaagactttatttatttctgctggcaaatgagtgcagattagataaatcaacccaagcacgattgaagaccattatctgattgcttaacttgtcaatcattaatcctacatctcaatttttagggaaccgtttgtctgcctagaatattgtcacacccggcttttagaagaaacacaatacatatgtatgtgttcccagtaaattactcacacatactacgacatcgttaatgataatattacactataccggcttactagagcatgcaaaacccacataaatgatatatatcttaagagatatcaagtgggtaagtgtaaaaaataccaaag

SEQ ID NO: 10278 - DNA, 2504 bp, Zea Mays
gcacacgatgcgttgcattgcatggctccgccacacacaccccttgcatgtaccccacccaccacggcggcataagtatctccgccggctacgcgcgatccaggcccggccgcgtgcgtgcgtgcgtgcgacgactgcacccatacacacatatacgcgctctggctggctgcctgcctggcttgcggagctccgtttcggccggccatctctcgctacgctacgagcgcgcgcggcccccgcgcccgtgtcttcccgctgtcgaccgtcgtgttgatcgtacatgcagctgctagtagcgaactatagttgcagaccgcatcagtgcgtgacaagaggatatatattatcagacacgcacgcgatcgcgcggagatgaaccagtgcgtgccgagctgggatctggtggacgacccgacggcggcggtagctggcggcggaggcggcctaaaccatcaggtctcgacgaccgggggcgcgcaccggggcctgctcctgcaggcgtcagctggaggagcaggcggcgggggcgcgttcgctcccgtcgtcgtgcccatgtcgaaccagtactacgaggtggcggagctgacgtgggagaagggcaacatctcctcccacggcctgctcaaccgcccggcgcacaataagtacccgcccgccgcggcgccgtcgtcggctcagctgcatgccatagcaggaggaggcggccgcggcggcgggtcgccatccggggaccgcgagacgctcgaggcggtggtcggcgaggcggccgcgcggtcgcacttcctctcgcagccggcgccgccgtggctgatcggcgccgacgccgtggcgcgggccgcggcggacgcgctagtgccgtgcgccgcaagggcgggcgagtccgctgcagacggcggagaagcgggcgcctcgaggaggaagcggccgcgcgtggtcggcgacgacagtctggtggtgtgcgccagccaggggagcaccgcgcctcgccgccgcggcgagagcgcgctgctcacgcagctggacgcctgcggcaccgaggccgacgacgtgtgcggcttcagaacgaccacaaccaacaactccacgtccatggaccgtgacgacaaaggctccccggatactgagaacaccagcatcggcggaggggccagtgattcgcgctgtttcagccgtcgctcacagagagacggcttatgcgacgacgacgaggagaacgtggtgatcaacggggacgacggggcgatgaggtcgtcgatttccaccaagaggagccgggctgctgcgacccataacgaatctgagcgtaaacgaagggacaggatcaaccagaagatgaaaacgctgcagaagctcgtcccgaactcgaacaagacagacaaggcgtcgatgctggacgaggtgatcgactacctgaagcagctgcaggcgcaggtgcagctgatgagccggatgggaagcatgatgatgcccatggcgatgccgcagctccagatgtcgatgatggcccagatggcacagatggcgcagatggcgcagatggcccagatgaacatgggctccctcggccagccgggctacgcaggcctcacgccgcccatgatgcacccgccccccttcgtccccgtgtcctgggacaccaccgccaccgccaccacctccctcgccccgcaggccggcagcggcacggtgccagcggacgccttctccgccttcctagcttgccaagcgcagcagaacgggcagcaaccgggtagcatggaggcgtacaatagaatggtggcgctgtaccagaagatgaaccaaacgcagcagagcgcgcccagcaacccgtccaagcagtgagcatgacattctttcctctcaattgatgaggcctggaactgtgtaacagagtctatgacagctggggcccgcgagcaggaggtggcgcatgcagtcttctgcagagaggagagagaaatcgtggaaaaagggagtgcaggtacacggtgtctgttttgcggagacagatgtggaggctgctggagagcgaaatagtgactcagagcgtgtataatgcggatgcggagtgggatggggagtgtagctggagttggtcccagaagcaccggaagtcgaacaggtgatgaaggcgatgtcacgcaagtagtagtagtgtgtacggtactaaagactttatttatttctgctggcaaatgagtgcagattagataaatcaacccaagcacgattgaagaccattatctgattgcttaacttgtcaatcattaatcctacatctcaatttttagggaaccgtttgtctgcctagaatattgtcacacccggcttttagaagaaacacaatacatatgtatgtgttcccagtaaattactcacacatactacgacatcgttaatgataatattacactataccggcttactagagcatgcaaaacccacataaatgatatatatcttaagagatatcaagtgggtaagtgtaaaaaataccaaag

SEQ ID NO: 10279 - DNA, 2102 bp, Zea Mays
caggatccgacggcgggaggacggccccgtcgagggcgcaagttgctgcggttggttcgttgggtggcgtccctctcctttctccctgtcgtctccaactttcccttggtttggcttcctgccttcctggcctggcctagctcctctcctctcctccggcttgattgatcgatcgatcgatcgatccagccagccatccacccatcccttccaagtttccaactgacattgccgcgccgcgcaggcgcagcgcacgacttccgccctcccccaccctccgcctcacgcatataaacgcgcgcgcctgcctcccctgcccccgcctgcctgcccacgcgctccgctcctcgccccctcctcttcccacgccgccgccgtacccacgggcagggggcacggctggtggctcatcgctcggcccgctccccctccgtcgcaaccggaacataccagcaccggcgctgcggtattattcagctccgtccgccggccggcgcggacggacgccaggcttccttcctgtctgcataacaaagccgccgccattatgatctccacatatgatgcttagcatttgtcgctcgcagctgtattgctcctctagctgcatccttgtactagagcatggcgaagctcgcatctattgctcgcagattcccaaacggaagcatgaggcttgttatggtaacggttattggagcagtccttggctttttcattgggatttcattcccttcggtcagcataacaaagcttcactttccagatagctttatttcgtacattgaagacaaagacgctggactcacgacccaagctatactcaatcatgcttggacttctgccagaaacgcaaggggaaatggtaccgaaccgacttcaaacagtaccttaaagatttatgtcccaacgaaccccaagggtgcagaggggctagcaccaggtatcgttgtatcagagtctgacttccatttgcgcaggttatggggagacccaagtgaggacctgcctttcaaaccaaagtaccttgttacctttactgttggagttgagcagaaagcaaatataaacagagctgtgaagaagttttctgacaattttgctattctgttattccactatgatggccgggtgagtgagtgggatgaatttgagtggtcccagcgagctatccatattagtgtcaggaaacaaactaaatggtggtatgccaagagattcctgcatcctgatattgtggcagcttatgagtacatattcatttgggatgaggaccttggggttgaacattttaatgcagaggagtacatcaaacttgttaagaagcataacttggacatctctcaacctggattagagcctgatcgggggttaacatggcagatgaccaaaagaagaggtgacagtgaggttcacaaggacacagaggagaggcctggctggtgctctgaccctcatcttccaccgtgtgctgcttttgttgaaataatggctccagtcttctcaagagatgcatggagatgtgtgtggcatatgattcagaacgacttggttcatggttggggcttggattttgcgctcaggaaatgtgtggagcctgctcatgaaaagattggagttgtcgattcgcagtggatcgttcaccaagtggttccttctctggggaaccaggggcagtcagaaaacggaagggcgcggtgcaggaaggaatggggcatgttccagaccaggatggcggaggcggagaaggcgtattacaagatgatgggcatcacccctccaaactccacgcgtgtctagccgcgcctctcttcttggttttccatccccgccaccctgacctttgtggtggcgggtgagctgatgatactatactatagcactacttgattatagggagttagagatggtgggtgtagctgcttttgatggagaggtccttctgtaagtaaatgcgaggcgaaactgtgatgagaaaacatgtacacgaggatgattacctgatgatgatgatgatgatctatctattataaaaaacatatataccgttaccgagcattgcgattgttctgcagcgcttttgtagcttgatccgaaaccca

SEQ ID NO: 10280 - DNA, 2196 bp, Zea Mays
gtactgagtactgactactgactacactcccaagtcaactccaccgtcggctgtgctgcgctgatcttctgtgagtagtgcgcgcggcgtggtctccgttcgaaccgatgcccatctgctgaatcggatcggatcgtgcgatcggccgccacgccacggcccgcgggtgaggcgtggtctccgggaggcagccaacctatcccgcccggtctagcctctagcgatcccggcgccggcagcgcgcacgagaggaatggacgcgtcgcacccggagggcgaggccacggcggggtggctgacggtcgaggagtggagcggctcgtcagcctccgcgctctcccgcaccgccgtcctcaccgcctccgcctcctctctcaccgcacacaggttcggcagccggtgggaacggatcgggagccgcatgctcggcgccttcgtgcctgagggctttcctgggagcgtgactccggattatgtcccgttccagatgtgggatacgttgcagggtctctccacatacatccgtgcaatgttgtctacacaagctcttctaggggcaatcggagtgggggaacagtccgcaactgtcataggtgctacttttcagtggtttctgagggacttgacaggaatgcttggagggatattgttcaccttttaccagggatctaatcttgatagcaatgctaaaatgtggcgtctagttgcagactttatgaatgaccttggaatgttgatggatcttttgagccctctgtttccttcatcgttgatagttataatgtgcttaggcagcctgtctaggtcattcactggtgttgctagtggagcaactagagcagcactaacgcagcattttgcacttgcaaataatgcagctgatatttctgcaaaggagggcagtcaggaaacacttgctacaatgttagggatggggttggggatgctgttagctcaaattaccagagggcatgctttgagtgtatgggcatcttttctttctcttacgatgttccatatgtatgatcggatactgcatacttagactcggatacggatcggagctcaacgcttttagacagataatatccgtaccatttacatccctacggctatcccatatttctcaaattacaaggcagtgcagtcactttcactcactacgctaaactatgagagagcttccatcttgctacaatacttcaaggaatgtggtgaagttcttgtgccacggaaggtttcccagcaggaacatattcttccttcttggtcaaactggaggaaactgaacagaattaaactgccacatgagcgtgtgcacttgggtgctaaagcctcgatgcttacacacagtgacatgttggtgattgcaaaaacaagataccactatgaaaacgcgaactactttttgctggataaacaaggcatcgtttacgttttcatccacaaggaggcaacaccagccgatgttttaaggtccttcgtacacgggctcgtgctagctagctcgacacagaacagcaaacctcagcacttagaggcccgtcgatggatggacgagatgtataccagttttatctcgaagggaaatattcgttcgttctcttttcgtgcaaacagctgcagactgaaggttactcgacggaacgccttctgtcgcattcgattctttggagggcacactggcttcacggccagctggatgagaagctcaagtaggaggaacactgcaagaccgcgtctgcttatccaaggacaggtcacaggtatatcgcccaggacgcgattattagctagggtgagaacgtgttaattgttcgcttgtgcatggcatgactgcatgatgaaagatagatgcatgagctgcaccgagcaccaccaaatatagttaaccgcttcgaggttctagcatatggacggacttcacgataaaagtgctggcctgtacgctcgagttcagcatgttaatggttcacactacgtccatccgcgccgctttagggcatgtacagtggtgtttaatgtggagtctcttaaggtgtttaagggggttatttgtaaaaaaatcttagagccgtctctccgtgaagagacgtctctggctcgtaaaccaagtagcaacagacgccttacttcccactgtacgaatttgtcgtctgttctatcgatctgatgctatacaaatacatttaattc

SEQ ID NO: 10281 - DNA, 1226 bp, Zea Mays
  misc_feature (1226)..(1226): n is a, c, g, or t
tcggcttatatgcatagtacttctttaaatgggccatgcggcccatttcctgcggtggcggcggcttgtgtgtgcaaactcctgtacggcgtctcacgcctcaccccaactcgctcccttccccgtgcttcccgccgtcgtggagaggtcacgcggctggttcccgccgcttccggacgggttccgagggaggaggatcagctgccgcgatgttcctcaggatctctcgtctcggggcgcggcttctgcgcgagtctggagcggagacgagagctggttggcatccccactttcctcctagttcatttccctctattattggtggcctagtcgttgttggcttattgcccatcaattgtggtgaaattttgctaacttagaccagctctatgattctgagggatgttaatcttgcagttcatactaatgtttcttgcatcttggctttgggattctcctgagtttatgtattgctcagccttggtgtctccttatatactgttgattgttgctacatttttctggcaggaaatttgctaagcagtccaggcattttgtatcaagctcatcttaaccagcattcgaccagagtggtgacttctactgtattatcgttgttaagaactaaagattggtagtgaataatctatttagatgaacatgttcccaattaccattcattcttgctaatagtaaatgtatcactagttattgattcacttaatgatctacattgatttggactatatctattattttcatgatttggtttctattcgatgaatctatctatacattccccattctgaaacggctgttgcaaaagaagatcggcattatttttcctcagcaagttagcttttttagagaactacaagcaaagcctttgtacttttgtactgcaggagtgatggtttctatctcaagtttatttgtattaattttttgtttatatattttcagcggaatgtccttttctcaactgcaacaagtggtgatcaggatgaaagcagtcaggcaaaggataagtaagtgcatttgtgtcttgttcatggtttttaaagcggtaaggcgaggcaaggcgttggacctccgcctggacgcctaggcgacgccttaagaacagtgattatgtttcatcctctatatataactaaatttgaactccttggttgttttgtatcttggaaccaggtatcagattagcccagttccttctaacatgn

SEQ ID NO: 10282 - DNA, 1984 bp, Zea Mays
cacgcaactcgatttgtgccctcttcttttgcaggcaacttttgtgcagccgcccccgctttcccccccgcgaaaacccagcagccgccgccgctgccgccgccgccgccgccacatccagtcctgccccggggccctgaaccctagccatggcgtcctccatactctccgactgctcctcggcccgcctcctccctctccgccgctcgctcctcccgccgcgggcgccccgcctccgctcctgccccgctctagctacccccaggcgcctactcgtcgccgccaggccccagctgcttccgcgcccgcgccacatggactcggtccccgcagccaccgcctcttccgccgactcagcaaccgtctcagccgatgcgcctgccaaactgattgacgggaagctcgtggcgaagcaagtgagagaagaaatagctgtccaagtcaccaggatgaaggatgtgatcggcattgtgcccggcctggctgtcatccttgttgggtcgaggaaggattctcagacttacgtgcggaacaagaagaaggcgtgcgaagcggtcggtataaagtcgtacgaggtcaacttgcctgaggacagctctgaggaggaggttatcaagcacatagcgagtttcaacagtgacccgtccgtgcatggcatcttggttcagttgcccttaccaaggcatatgaatgatgagaacattctgaatgcggtcagtattgaaaaggatgttgatggctttcatccgctgaacatcggacggcttgcaatgcaaggccgagatccgttctttgtaccttgcaccccgaaaggatgcatggagttgctacaccgacacggagttgaaattaaagggaagagagctgttgtgatcggacgaagcaatattgttggaacgcctgctgcattgttgttgcaaaaagcaaatgcaactgtcagcattgttcattcacaaaccaagaaccctgagcaaataacgagacaggcagatatagtcatcgcagctgttggagtcgccaacttggtcagaggggattggataaagcctggagctactattattgatgttggcatcaatccagttgatgactatgttccgacagtgtttgataacttcagtgccaacgttgtggttgatggtaatactgtcaacctcggcctctgggacactgcaggtcaagaggattacaacagactgagaccactgagctatcgtggagctgatgtttttcttctggctttctcactgatcagtaaggccagctatgagaatgtttcgaagaagtggatacctgaactgaagcattatgcacctggtgtgccaattattctcgtagggacaaagcttgatcttcgagacgacaagcagttctttgtggaccatcctggtgctgtccctatcactactgctcagggagaggagctaagaaagcaaataggcgctccatactacatcgaatgcagctcgaagacccaactaaacgtgaagggcgtcttcgatgcggcgataaaggttgtgctgcagccgcctaaggcgaagaagaagaaaaaggtgcagaggggggcgtgctccattttgtgatctaatcatcggtagatgaagaaacaagggcgaaggtgccatggctttatcatcgtcgcgtcttgcttcagtggaacagcatgaatggtccccaccccctctaggtttactggcggctcggctgcagcgagttctcatctctttgtcgaggcattgagcgatatgtttgtttcattttcctccttcctgccttgtgattatctggtgtgtgtgtgtgtgtgactgacgaagtcgcggcgattaggtaactcgcttagaaggtatttcccgtgtttgagcaaaagaaagtatccctgttatctctgttccataagttagacatgatgtaatcgtactaagtttatttttacttatttcacttgaatggaaaagtatgcttcccatttatatgctcgttgtca

SEQ ID NO: 10283 - DNA, 1885 bp, Zea Mays
atggcccccctctacctcctccaccttgccgtttgtggcctccgcaccgccccaacgtcgacacctccgtcctccccctctactcccagcgcaccaccgccgcgtatgcgctatcccacccgatggacgtgttgccgcctctgcagcacgccctgtcgctgccgaccccgcccagccatgcatttggagtttacaatgtggagacatggtttatccaccggacggcgaggttggtgcgcggatggcgagggaggacctccactgggcctactccacacctcttcctgtctaccgaggtcgagcacatggaggacctgctccgctgtcgggcactcctgagccagcgactacaaaatccactctgccgtgatggcatgggaggctggcaagtcgattctttgtatatagttagtagtacaaaactatatgctatgagggtccggagaaattgacgatgaggagcagctagaggtcgtggtggagaagggctagagaaagggatgacgagggacagttgcaagttgtggtggagaagggcgacgaccccatgacaacatggggtgaatttctatatcagttgccaatcataagaaacaaatcttattattgcactccagcaataaaagggccagatgctattattgttggctatatcagacagtttgtcatcaagcctttgtttggattcctttttggcactcttatggagtactaagctacactgaagaatttgggcttaagagtgaggttttgaaggtgactcttgcaactgacgtcgtgaactgagtgtgaatatctactggatgggcaagcaagtttccaaccccatgccctcccatcgattctgctgcctgatccggctagagtttattaggactcgcaactacctcggagttcactgctgtaaatatgggtaacaccctaccagtgcacgatatgtcggaatccacagcagccataggatctcccaacaaggaggatcttgcaacaatgacattgatcaagaattggatgttggaaattatggtttggcattgttacttctcttactcctgtttcatgtcccaatctgagctgactcgtgttggtaatcatgtaatttttccttcgtgcttctattcttcctatacgctttaggcatggcatgttgtgcactaacattttgattaacaatacaacacatggtcatacatatggtattgttgcactatttttttgttgcaacgcacgggtattcaaccagggcatctcagattgggagtgggaggaggatgaggagatgatttggtgctaccagggacaggccccatctcctagaaatggatcttcctcctttgcatgggcaacttgtgcatcgggctactcttcaccaacagaaaaccatcactgagaaagagcagttagcaagtggtgttgtcgtgttgcgactcaaaagggcttgcctatgggcatccacataggagccatccccaaatgctgactgaccaaatgttcggtatgggagccacaaatagcagcacgatgggaatgcagcagcagcagcaaggggtatacgggaacatgcaggcaggtgcccagaacgtgcaaagtatggcgggccttcagaaccagacccagaatcccaacttcactcagcagattcaacaaaaccaacaatgattcaacactaacggtcatggaggttgaaagatgagcaatatagccatcgttttgctatttgtctgttggtctttactcagcttatccgtgagactgatagtagccccaggttgatagccttcgtttttctgtaaatcaatgtagatgcatcgccattagcgagatgcaggtcaattatatacgttgtaactgtgtttcggatatgtgaatcgtgttacgtgcgttc

SEQ ID NO: 10284 - DNA, 2328 bp, Zea Mays
taaatctgcacggcaccctttcgcttgtccagcacagcaccagcagcactcaccttgctctgccctctgcgccccttagctgctgcaggagagcatggcgctcgctcgcctcctcgggacagcatttctgctgctcctgttttctcatgcagaggccgctggcgaggtaggcgtgaactatgggacggtggcgaacgacctgccgaacccggcgtcggtggtgcagctgctgaagcagaacggcatcaccatggtgaagatatacgacgccaacgcaaacgcgctgacgtcgctggcgaacacgggcatcaaggcgatggtgatgatgcccaacgcgaacctggcccgcgcggcctcggacccaacctacgcggcgcagtgggtgcaggacaacgtgatgccctactacccggccacgcagatcaacgccgtcgccgtggggaacgaggtgttcgacgaccccagcgtcgacaagatggacctcgtcccggccatgaccaacgtgcaggcggggctggcggggctgggcgtcgccggcgacatcaaggtgtcctcgccgatcaagttcgacgcgctccaggtgtcgtggccgccgtcctcgggcaggttccgcgacgacatcgcgcagccggtgatgaagcccatgctggacctcctgcagaggaccggctcctacctcaccatcaacgcgtacccgttcttctcctactacagcgatcctcgcagcatctcccttgactacgccctggggaactccaaccctggcgtctccgacgacaaagccaacctcaggtacgacaacctcctggacgcccaggtcgacgccacgcactacgcgatggaggctctgggggtgagcaccgtggacgcgtatgttggggagagcgggtggccgaccaaaggagttgttggagggaagataccgccggccgcaaggcgattgttgggcgccgccgaaggctcggcgaggcggcttctggacacgggtgacgacgccggctcgccggcctccattcccaacgctcgagcatacaacaacaacctcatcaaccgcatgctgtccggccggacgggcaccccgcaccgccctaatgccaacatggacgtgtacatcttcgccctcttcaacgagaacgacaagggcagcaacggtgcggacgacgtcgagcagaacttcggcctcttctacccgaacgagacgaaggtgtacgagttcagctttcagggcggcggcggcccgccaggcccgtccagtgacagctggtgcgtggggaacgcggcggccgggggcaaggcgctgcaggacgcgctggactacgcgtgcggccacggcgccgactgcagcgccatccagcccaccgggtcgtgctacgaacccaacaccgtcctcgcgcacgcctcctacgcgttcaacagctactacaagaaaaacaaccgggccgccgggacgtgcgacttcaacggcgccgcctccgtcgtctaccaggcacctgcagacacctgcagcagcgcacagcccacctggtgcgtggccaagccgggggtcggcgacgcgcagctgcagccggccctggactacgcgtgcggccacggcgcggactgcagcgccatccagtccggcggcgggtgcttccagccgaacaccgtcgccgcgcacgcgtcatacgcgttcaatgactactaccagcgcaacggccgggccgacgggacgtgcgacttctccggcgccgccgccgtcgtcaaccaggatcccggcctctgcgccgcgacggcgagctggtgcgtggcgaaacaaggggtcggggacgaccagctgaagcaggcgctggactacgcctgcggccacggcgcggactgcagcgccatccagcaaggaggggcgtgcttccagccggacaacatgccgtcccacgcctcctacgcgttcaacagctactaccagcgcaacggccgggctagcgtggcgtgcgacttctccggcgccggcgtcgttgtttaccagcaacccacggtcggaaactgtgtgctgccatcgaacggctgatcaaccggacaaacaaagctacaacagtgacgtcttgaggcgatggatgatgcatgctacgtgctaacatctcgatcacgatcagtatacaggatatcttattggggtgggcataaaatgtacagcattctgtacggcaaaactctaataaaatccggcacctgcaaagaaaaaaaaccgcgggtgcttcttacttcctctcaacctgtgcaatagccaatagtacaatacgacatgtttccattaatcggactggtatttaggcccatgggccctagcctcgt

SEQ ID NO: 10285 - DNA, 282 bp, Zea Mays
agagaagcgaccatgaggcctcgggtgttactcgtcacactggctgttatcgtcgtcgtccttgcagctctgccactcagcaaagggacggaggaggaagacggaggggcggcagtcgccgccgtggacgccgccggaacgagctcgtggccgtgctgcaacgagtgcggtttctgcaaattgtcttacccgccgcagtgccaatgcctggacttctcgatggtcgggtgccacccagagtgcaagcggtgcatcaggtacaccgccgacggtggcgtcgac

SEQ ID NO: 10286 - DNA, 1725 bp, Zea Mays
ccaatgtactgtgtacacctatcctgaaatgaggatgactatatgttgctttaggataataacatcactgccatcactctcccaaagtcgctatgtttttctgtcatagtttgttgtcctgaccaaattttttaatttgttgtctatttctcttaggttgttctttcaataagctgtatctttctctcgtatgcaatgtaaatttcaggtatttgtgaaatatgagtgttgttttggtctcaaaataaatccacaaaagattttagcatctgtaagcactgttgcacattatccaattatatcagggtggtctagaactgttttgtgttgtttatttttagttgaggtgtgtatctttccccaccattgtatgttacaattttctaactacatctgttatgtttgggtgctcttgcattctcgcaaagtgctatagaggagcaacggtaccaggacgcgtcaaggttgacaaagctatctgggaccacttttgtaattgccaactcttcactgattattttcctatatgttgctccagaataaatgggtgaagccttcgtgtctcctcgagggaaagtcactgacctttcttgggacgtggaccactgacggcccccgtcatcccccatgacggtgatcctagggtgaagccttcgtgtttcctcgagggaaatctaccagtgcgggattgatttagtcagcaccattggacacagggtttagttccattgcctggacccatcaatgaatcatggtgccaaggtcttgatggttcgacttcaaggtactgatattctccaggactattgttagcatcccttgtggtccatctgcattagcagtgaagaaagtcgcatggggacttgcttgatatgttgttattgctcagacatggctgagaaggaggaaacaaagggccgctgccctgcctgccacacacgttatgacaaggatatgatcgtcaagatggccgccacttgtgacaggacagtggcagataaaaatgcggagaagaagcaaaaggcccaaagggttaagccaaaggcagcaccaacagcaacaacaacatcaaccgtagaatctaagaagcatcttgctactatcagggttatccagagaaatctggtgtacataattgggctacctgcgcatttatgcaatgagagcgtacttgagcgtagggagtactttggtcattatgggaaagttttgaaggttttagtttcccgtccgactgggcctccctctcagcaggcatcagcaaacagcagtattagtgtgagatatacgtggagcgtcagaattatatgtgcatctacaagaacagttacaacaattctccatcaggttgatgttcatacatctcagatataaatgtgggggagacggtgcctcatcaatgatgagtaggttgattctcatctagcggcaccattgctcactacaactggtttgcttgagcaacttaatgtcactctcaagaggaccctcctttcgaccgacaccctgaagcaccacacaagctttagaaaagtcggaattgtacttcgtatacataaattacatgatattatatgttcatgtaattctatgttgattctttagaaataatatatatgatattgtaatgtgtgttcgacatcaatttattttatttgagttcgccgtgcgtacgtttggggttgtttctccctcgcttcttcctggcggcgaaagatagagaag

SEQ ID NO: 10287 - DNA, 2994 bp, Zea Mays
cacaggaccttgttctgcctccccgcgcatcggctgctgccgcgcacaaatccgccgcgccctcggtcccgcaaatccgccgtgccagctccgcccgctcgattcccctcctagcgcccgcattccccgccgccgtcctcgcggccgcagcgcccctggaccccacgccagcaacgcccgcagtccccgccgtggatctcgcccgaaggcgccgccatggacgccctagatctaccacctcctcctctccccatcactgcgccgcctgcccccgccgcacacctacagcgcgccccttcccccaccgtggatctcgcccatacgccagcggatctcgcactccttccttcgacggcgcggtggcgaggaggtcagcgacggcggcgtcgagtcgaggtcgggcacgaaggcgcggaggccgtgggagcggtcgtggcctacgcacgcacgacgccgctcccccagttcaaaccgaggtcagcgacgacgcacgcacgcaccaccccttcccccttcgtcttccattcccagctggaggtgcacgctgccgggcagagcgtcttgctggaggtgcgatagccatgtctggacctccgtcgccgccatagaagtgccttgtcattgatgaagccgatcgcatacttgagcaaaactttgaggcagactgttcttttttctgctacacagactctagatgttgaaaaaattgctaaactgtcatttgagaaaaatgaagtaaaaaaagcctgattatgttggagttgatgatgataagtcaaaggctactgttgaaggcctgcagcagggttattgtgtcatttctagcgataaaaggttcttggttctgtatgctttcctaagaaagagaagataatggtgttcttctcatcatgtaattcagtaaagttccacgttgaacttctgaatttctttaggatagagtgttttgatatccatggaaaacagaagcaactgaagcgaactactacattctttagcttttgcaaggcaggaaagggcatcttattgtgtactaatgtggctgcccgtggacttgatactcctgacgtgaaggaaggcagtgttcatgtctcatccagttcaaatgaagtgacaggaaccattccagagacgaatggaggcgatcatcatatacctggaagctcttttcatgtttagtgaaggtctatgacatgtctgatagtcaaatgaagctaaatgattttatttcaagccttgttcttgagaggatggtcaagattaatttgagtagggtgacttcataatggacgacgaggaagaagtggaaggagaggaagaggaacaaaagagtgatgaccagaagcgaagaaacaaaactaaaaagaaaaggaagaggttgttctttcaataagctgtatctttctctcgtatgcaatgtaaatttcaggtatttgtgaaatatgagtgttgttttggtctcaaaataaatccacaaaagattttagcatctgtaagcactgttgcacattatccaattatatcagggtggtctagaactgttttgtgttgtttatttttagttgaggtgtgtatctttccccaccattgtatgttacaattttctaactacatctgttatgtttgggtgctcttgcattctcgcaaagtgctatagaggagcaacggtaccaggacgcgtcaaggttgacaaagctatctgggaccacttttgtaattgccaactcttcactgattattttcctatatgttgctccagaataaatggatcatagtgcggtggtcatgggattgggatctgctccgtatttgcagggtgaagccttcgtgtctcctcgagggaaagtcactgacctttcttgggacgtggaccactgacggcccccgtcatcccccatgacggtgatcctagggtgaagccttcgtgtttcctcgagggaaatctaccagtgcgggattgatttagtcagcaccattggacacagggtttagttccattgcctggacccatcaatgaatcatggtgccaaggtcttgatggttcgacttcaaggtactgatattctccaggactattgttagcatcccttgtggtccatctgcattagcagtgaagaaagtcgcatggggacttgcttgatatgttgttattgctcagacatggctgagaaggaggaaacaaagggccgctgccctgcctgccacacacgttatgacaaggatatgatcgtcaagatggccgccacttgtgacaggacagtggcagataaaaatgcggagaagaagcaaaaggcccaaagggttaagccaaaggcagcaccaacagcaacaacaacatcaaccgtagaatctaagaagcatcttgctactatcagggttatccagagaaatctggtgtacataattgggctacctgcgcatttatgcaatgagagcgtacttgagcgtagggagtactttggtcattatgggaaagttttgaaggttttagtttcccgtccgactgggcctccctctcagcaggcatcagcaaacagcagtattagtgtgagatatacgtggagcgtcagaattatatgtgcatctacaagaacagttacaacaattctccatcaggttgatgttcatacatctcagatataaatgtgggggagacggtgcctcatcaatgatgagtaggttgattctcatctagcggcaccattgctcactacaactggtttgcttgagcaacttaatgtcactctcaagaggaccctcctttcgaccgacaccctgaagcaccacacaagctttagaaaagtcggaattgtacttcgtatacataaattacatgatattatatgttcatgtaattctatgttgattctttagaaataatatatatgatattgtaatgtgtgttcgacatcaatttattttatttgagttcgccgtgcgtacgtttggggttgtttctccctcgcttcttcctggcggcgaaagatagagaag

SEQ ID NO: 10288 - DNA, 3642 bp, Zea Mays
cacaggaccttgttctgcctccccgcgcatcggctgctgccgcgcacaaatccgccgcgccctcggtcccgcaaatccgccgtgccagctccgcccgctcgattcccctcctagcgcccgcattccccgccgccgtcctcgcggccgcagcgcccctggaccccacgccagcaacgcccgcagtccccgccgtggatctcgcccgaaggcgccgccatggacgccctagatctaccacctcctcctctccccatcactgcgccgcctgcccccgccgcacacctacagcgcgccccttcccccaccgtggatctcgcccatacgccagcggatctcgcactccttccttcgacggcgcggtggcgaggaggtcagcgacggcggcgtcgagtcgaggtcgggcacgaaggcgcggaggccgtgggagcggtcgtggcctacgcacgcacgacgccgctcccccagttcaaaccgaggttgaaaaaattgctaaactgtcatttgagaaaaatgaagtaaaaaaagcctgattatgttggagttgatgatgataagtcaaaggctactgttgaaggcctgcagcagggttattgtgtcatttctagcgataaaaggttcttggttctgtatgctttcctaagaaagagaagataatggtgttcttctcatcatgtaattcagtaaagttccacgttgaacttctgaatttctttaggatagagtgttttgatatccatggaaaacagaagcaactgaagcgaactactacattctttagcttttgcaaggcaggaaagggcatcttattgtgtactaatgtggctgcccgtggacttgatactcctgacgtgaaggaaggcagtgttcatgtctcatccagttcaaatgaagtgacaggaaccattccagagacgaatggaggcgatcatcatatacctggaagctcttttcatgtttagtgaaggtctatgacatgtctgatagtcaaatgaagctaaatgattttatttcaagccttgttcttgagaggatggtcaagattaatttgagtagggtgacttcataatggacgacgaggaagaagtggaaggagaggaagaggaacaaaagagtgatgaccagaagcgaagaaacaaaactaaaaagaaaaggaagagtgctatagaggagcaacggtaccaggacgcgtcaaggttgacaaagctatctgggaccacttttgtaattgccaactcttcactgattattttcctatatgttgctccagaataaatggatcatagtgcggtggtcatgggattgggatctgctccgtatttgcagggtgaagccttcgtgtctcctcgagggaaagtcactgacctttcttgggacgtggaccactgacggcccccgtcatcccccatgacggtgatcctagggtgaagccttcgtgtttcctcgagggaaatctaccagtgcgggattgatttagtcagcaccattggacacagggtttagttccattgcctggacccatcaatgaatcatggtgccaaggtcttgatggttcgacttcaaggtactgatattctccaggactattgttagcatcccttgtggtccatctgcattagcagtgaagaaagtcgcatggggacttgcttgatatgttgttattgctcagacatggctgagaaggaggaaacaaagggccgctgccctgcctgccacacacgttatgacaaggatatgatcgtcaagatggccgccacttgtgacaggacagtggcagataaaaatgcggagaagaagcaaaaggcccaaagggttaagccaaaggcagcaccaacagcaacaacaacatcaaccgtagaatctaagaagcatcttgctactatcagggttatccagagaaatctggtgtacataattgggctacctgcgcatttatgcaatgagagcgtacttgagcgtagggagtactttggtcattatgggaaagttttgaaggttttagtttcccgtccgactgggcctccctctcagcaggcatcagcaaacagcagtattagtgtgtatgtctctctgaattatacggtgtacatgcatgatctgttcatacttcatatgaatttagatttatactttcagtactggtcaattagcctgatggaatatcaaataactatctactgattctatgcaattgcatgtttcaagtttctaatgctgccttgtaatactggaacattggtattataagaaagtaaattcaaacttcaatattgttatgtggttttctattgaacctggtgaaaatgtgataattatgtccatatccttgcaagcagttcagtcatttaagtttaatctaggctacttagcagtgtgattttcctgtagcctcttgatttgcatagccgcacagcccgtgcttgaaagtaacatttttatcctcattgctgacattaggatatgtattgtattattggtgtgaaattcaaagaatcagatagatgcaagatatctgtttgtgggataggatcagaacccaatcctgtgtgtgcagatatagataaaaatcatcttttaatgaaatgtctatttttttctcggtttgagtactttatattgttctcctgggatgtgttttttttctttatgggtgatttctcttggaaatcctaggatagtgtttcgatgtattctgaaactttgttgtgccagaaacatgcattgttttatcattaaccagaattgagttagggattatcattaaggcattaaccaaaatggagttaggatgtctttttttgtagtgtagaaaacgttgtgtatactgaaatgtgcatgcttgcaacatgtctaatatagattatatttgagtggtatctttgttgaagaacatgtgaaattagagttctggtggtcttctagaacacacactgctcctcatctttactttctctacataattcttcaatatgttggtatgttcccgtgactccttggtttagctatccttatacatgcatgttgttacataaatcaattagtttttccctgaaggacaggcctggtgcagtggtgagaggcctttccactgagccaaagggcctgggtttgacgcagcctctgcgcaaaaatgtagggttaaggcttgccttggttattacttccccagacccgactcatgcgggagccgtcagcattgggagatatacgtggagcgtcagaattatatgtgcatctacaagaacagttacaacaattctccatcaggttgatgttcatacatctcagatataaatgtgggggagacggtgcctcatcaatgatgagtaggttgattctcatctagcggcaccattgctcactacaactggtttgcttgagcaacttaatgtcactctcaagaggaccctcctttcgaccgacaccctgaagcaccacacaagctttagaaaagtcggaattgtacttcgtatacataaattacatgatattatatgttcatgtaattctatgttgattctttagaaataatatatatgatattgtaatgtgtgttcgacatcaatttattttatttgagttcgccgtgcgtacgtttggggttgtttctccctcgcttcttcctggcggcgaaagatagagaag

SEQ ID NO: 10289 - DNA, 1177 bp, Zea Mays
ttcatgcacaagagaaaaggaatgggttaggctctttcgaaagaactctgcaaggtccaaccaaaattcaagtgatagtattcacaccatgataaggccttcatttccaaaatggtattttgtgcatgaagttcctgagcagttcccaaatagtgatgtcacagcaattgttgatgaaacctggcaaattggtgatcgagttgattggttgaaggaaggttgttattggtctgggacaattactaagataatcaatgaagatctggtcgagatagagctgccggcacctcccataggtgaaggaaaatgttataaagctaaatgtagtgatctgaggcctactctcgagtggtctctagcaagaggttggatggtccctctttcacagaatcagatgatgataatgacgacaacgatagctgggatgcccggcaaacggtgtgcagagcttcaaacacgcctgaggaagctccaggccccatggtccctgcacctccgtcagccacaaacaacgctcccagccacatgtatcagaaggatgctgctgtcacatccacagaggacctgctgaagcccagctcaacatccaagtcgccagaccccaggcacgacgcccaagctagcactcaacctgcaggtacgggggtctccatgaagccggaaccggttattggagtctcaacaatcaagaaagaggactcctccttgacagaaggtgaggttgatggcggcacggaagagtgcctggagaagctgggcgcgatcaaagccaggctcaaatacctcatgcagggcacgcggctggaacatgagcgcagcgccaccttccgtgggtagtcaggcagatgaagctgcatcaaaggtgcaacttcacgcaggggtttagggtttagggccatctaacgcctgttgtggttgctgaattttgtgtcctgtggttacaggtattattgtcctgaataatgacgttgtgaataagtggtttgtttttttgagtgcggcaatttgtaggagctaagaggaatgtgttgctgagttaagttatgaattagaccgtgtccagcagttcactcatatggtcatcctaaacaccgtgcagtagagtttgaatattagtatgaggatggataaactggtgcagatagccttatgttgtgaatgaatatgttgctgagta

SEQ ID NO: 10290 - DNA, 1777 bp, Zea Mays
agccttttagtttccttctcccaccgcggccccggaaaatttcccccttccccgtagcgaaaccctagccgccgcgccaaaaccaaatcccgccacgcccgaaaatttccggtggtttccttgccgcgaatcgatcgattccgagcgattcggttgatttgatcgatttcgggtgcttcgcgattgattaggccggcaaagccgccaatccttgtgatctctcgaaggggtagagcgcggtcgaccgtcggtcatgtcgagcttcagaaagaaagggaaagggctcacaagaagaaagataaaaggagtgacaagaaagctccccaactgggtgagacgtccaaacattcaaagcacaaccataagaagagaaagctcgaagatgtcagcacaggtgatcaggagcccaaaaaagtattcaaagaatcagctgagctattggagaagagtggactctcagaagagcatggagctccttgttttgtacagatgtttcgtgactctcctgagagctcgcaggacagcagcaagagaagaaaggctgtcctgcccagtcccagccaagctaagaatggtaacatcattcgcatcaagctaaaaagtaaccaagatccccaatcagttcttttggagaaaccaagggttctggagcaaccactggtccaacaaatgagttcggtttcatccctgtcgagcaaacaaaattcaatcaatcgtaaggtgaatgtgagatctacagctggccagcagtgggtcaatggtgactcccaagcagtacaaaaatctttggttacagaaaccctgtcaagggcaatgcagagaactgtcccccagcctgcagtgaaggtcacacgtcgggctgatccccagctatctgttaaggcgccggttggaagatctgacctacctccaaagttttcgggaagtgtgggcccttcacctgctagagtgaccggaagattttgtcctgcacctgttaagacgcaacagagaattgagcatccaccttccatggtgtcacagagagttgatcctcaggcgaaggtgtcacagaaggaaatgggatctgctgtttgcctgccacaagctccacatcctcctgttttgcagaaacccaaggacttgcctgttcctaaacagcgggagcctatcaactctttgccaaaagaagagccttgtttctctggaaggactgtggaagcagatcaagggaaggaagctaagctctcccgttcagatcggaagaaaatccacaaaactgagaagaaaaataagaagttcagagatctgtttgttacctggaatccgctattgatggagaatgaaggttcagatttgggtggtcaagactggctgttcagcagtacaagaagctctgatggtagcatggctcaacccacagtacctgatggtttagggccgattcatccgatggtgcagcagcagccttatttgcaacccagggcaacttttttgccggaccttcatatctatcagctgccttatgttgtaccgttttaagtctgttcgtagatgagaagtagatgagatgttgtgaaggagctgtgtggatgtgggatataatggttccctgccgcaattttccagctttgttagcaagattgtaatgtaatgttggttaattattttgctcatttatgtaagcagttgaactgcaaaatcttctttctaggcagttactgtaatacgacacgcaatatttgtttttatccataataatagccttgccacaatataaatggattaattgcagcaa

SEQ ID NO: 10291 - DNA, 1630 bp, Zea Mays
ccgggccgctgcgatcgcgccctaccgggagaccggcgacggcgaatcgacgagctcgccatgtcggccttagcggcgggcggtggcgccgccgccgatggtgccccggaggcgacagcggcgccgacaaggagggagaagcggagggagcggaagaaggagcgccgccggagggcgcggaggcaggccgcggcgcgcgctcgtgcggcggtcgaggcggaggcacccgcggtcgaccccgaggaggagcgccgactccttgagatccaggaggccgaggcggctgctgagtccgagcgtgcgctccgcgccttcgaggacgccgagcgccggtggctcgaggccgccgctgcccgcgccgcagagaaggccgcggctgctgcggccgaagaggatgcaagggctgcggaggcttccgctcgaaacaagcctaaagatggccaaggaaaccagtcagaagaagatagtgaatgggaatatgttgaagatggtccagcagaaattatatggaaaggaaatgagatcattgtgaagaagaaaaaggttaaagtaccaaaggggtccaaggaaaagctgcaaattcaggaggaagatagacctacatcaaatccgctcccaccacagtctgttgctttggctgctcataggagagaaccttctttgtctgctcaagaagtacttgacaaagttgctcaagagactccgaattttggaacagaacaggataaggcccattgtccatttcatctcaagacaggggcttgtcgctttggattgcgctgcagcagagttcacttttaccctgataaatcaatcacattgctaatgaaaaacatgtataacggtccaggccttgctttggagcaagatgaagggcttgagactcgcgacagattgcatgttctttcgtgttatcttcagaacttcgacttgaggcatacagtgatcagaccagttgatttcacttgattgaggacgtcttgaactttgatctgctaatttcacagatgaagagattgaacaaagctatgaagaattttatgaagatgtacatacagaatttctgaaatttggtgaacttgtgaatttcaaggtatgtagaaatgggtctttccatcttcgagggaatgtttatgtgcactataaatcgttggattcagctcttcttgcctacagcagcatgaatggacgctattttgctggaaaacaggtaatcactctatttccttcctcaagtattatgtgaggataattgttatagcttaagggagaaagtacaaattactactctgaaatttgtctggctggataaaccccctagaatattatattttatttcccaagctatttcagttggttcaatctactcctttataaagtttgtgtactaagttgagttttaagttatgttaaaaaagttacgtccggtatcaccccacaaaattgcactccctcctttaaaaattataagacattttagctttttctatatatgtagttttcactatgcatttagctatacattatatttaaatacatagtaaaaacaatgtatctagagaagccaaaatgccttataatttggaagagggaataagttgtaagtcagcttgtacatggagaaacaaaa

SEQ ID NO: 10292 - DNA, 1883 bp, Zea Mays
ccgggccgctgcgatcgcgccctaccgggagaccggcgacggcgaatcgacgagctcgccatgtcggccttagcggcgggcggtggcgccgccgccgatggtgccccggaggcgacagcggcgccgacaaggagggagaagcggagggagcggaagaaggagcgccgccggagggcgcggaggcaggccgcggcgcgcgctcgtgcggcggtcgaggcggaggcacccgcggtcgaccccgaggaggagcgccgactccttgagatccaggaggccgaggcggctgctgagtccgagcgtgcgctccgcgccttcgaggacgccgagcgccggtggctcgaggccgccgctgcccgcgccgcagagaaggccgcggctgctgcggccgaagaggatgcaagggctgcggaggcttccgctcgaaacaagcctaaagatggccaaggaaaccagtcagaagaagatagtgaatgggaatatgttgaagatggtccagcagaaattatatggaaaggaaatgagatcattgtgaagaagaaaaaggttaaagtaccaaaggggtccaaggaaaagctgcaaattcaggaggaagatagacctacatcaaatccgctcccaccacagtctgttgctttggctgctcataggagagaaccttctttgtctgctcaagaagtacttgacaaagttgctcaagagactccgaattttggaacagaacaggataaggcccattgtccatttcatctcaagacaggggcttgtcgctttggattgcgctgcagcagagttcacttttaccctgataaatcaatcacattgctaatgaaaaacatgtataacggtccaggccttgctttggagcaagatgaagggcttgaggtttgttagaggaaattctctaatgcataactttactcgcgacagattgcatgttctttcgtgttatcttcagaacttcgacttgaggcatacagtgatcagaccagttgatttcacttgattgaggacgtcttgaactttgatctgctaatgtatcctaaattatcatggtcttgctgatgttgctgagctttttgatgttttctattgctattagaaatgtgcccaatatttgaaatcggtacatgtattgggtatcatttatcaagtagatccttgacaattttgataatattcgggaaattttaaatgttgaaccgttgaggagtatttcttttattggacgtctttggtgaccattagggtgacagttcacagatgaagagattgaacaaagctatgaagaattttatgaagatgtacatacagaatttctgaaatttggtgaacttgtgaatttcaaggtatgtagaaatgggtctttccatcttcgagggaatgtttatgtgcactataaatcgttggattcagctcttcttgcctacagcagcatgaatggacgctattttgctggaaaacaggtaatcactctatttccttcctcaagtattatgtgaggataattgttatagcttaagggagaaagtacaaattactactctgaaatttgtctggctggataaaccccctagaatattatattttatttcccaagctatttcagttggttcaatctactcctttataaagtttgtgtactaagttgagttttaagttatgttaaaaaagttacgtccggtatcaccccacaaaattgcactccctcctttaaaaattataagacattttagctttttctatatatgtagttttcactatgcatttagctatacattatatttaaatacatagtaaaaacaatgtatctagagaagccaaaatgccttataatttggaagagggaataagttgtaagtcagcttgtacatggagaaacaaaa

SEQ ID NO: 10293 - DNA, 1954 bp, Zea Mays
cccaggcccacttgtacgcgactcgccaacgccttttcccccgggccgctgcgatcgcgccctaccgggagaccggcgacggcgaatcgacgagctcgccatgtcggccttagcggcgggcggtggcgccgccgccgatggtgccccggaggcgacagcggcgccgacaaggagggagaagcggagggagcggaagaaggagcgccgccggagggcgcggaggcaggccgcggcgcgcgctcgtgcggcggtcgaggcggaggcacccgcggtcgaccccgaggaggagcgccgactccttgagatccaggaggccgaggcggctgctgagtccgagcgtgcgctccgcgccttcgaggacgccgagcgccggtggctcgaggccgccgctgcccgcgccgcagagaaggccgcggctgctgcggccgaagaggatgcaagggctgcggaggcttccgctcgaaacaagcctaaagatggccaaggaaaccagtcagaagaagatagtgaatgggaatatgttgaagatggtccagcagaaattatatggaaaggaaatgagatcattgtgaagaagaaaaaggttaaagtaccaaaggggtccaaggaaaagctgcaaattcaggaggaagatagacctacatcaaatccgctcccaccacagtctgttgctttggctgctcataggagagaaccttctttgtctgctcaagaagtacttgacaaagttgctcaagagactccgaattttggaacagaacaggataaggcccattgtccatttcatctcaagacaggggcttgtcgctttggattgcgctgcagcagagttcacttttaccctgataaatcaatcacattgctaatgaaaaacatgtataacggtccaggccttgctttggagcaagatgaagggcttgaggtttgttagaggaaattctctaatgcataactttgtatccttaaactactgtttatttacgtttaaggatgctcaattttggtttcatgggcagtgccattttaagttgtgatagtttaatactaaagcaagctcatgtcaaaataacaagtattccactttaagcttgtaagcctttataagaagacatgagtataaataactgactacttggaactatttgaatttttttaatctactgctcaagataactcttaccccaagttttccttggctactatcagactcgcgacagattgcatgttctttcgtgttatcttcagaacttcgacttgaggcatacagtgatcagaccagttgatttcacttgattgaggacgtcttgaactttgatctgctaatttcacagatgaagagattgaacaaagctatgaagaattttatgaagatgtacatacagaatttctgaaatttggtgaacttgtgaatttcaaggtatgtagaaatgggtctttccatcttcgagggaatgtttatgtgcactataaatcgttggattcagctcttcttgcctacagcagcatgaatggacgctattttgctggaaaacaggtaatcactctatttccttcctcaagtattatgtgaggataattgttatagcttaagggagaaagtacaaattactactctgaaatttgtctggctggataaaccccctagaatattatattttatttcccaagctatttcagttggttcaatctactcctttataaagtttgtgtactaagttgagttttaagttatgttaaaaaagttacgtccggtatcaccccacaaaattgcactccctcctttaaaaattataagacattttagctttttctatatatgtagttttcactatgcatttagctatacattatatttaaatacatagtaaaaacaatgtatctagagaagccaaaatgccttataatttggaagagggaataagttgtaagtcagcttgtacatggagaaacaaaa

SEQ ID NO: 10294 - DNA, 2309 bp, Zea Mays
cgactcgccaacgccttttcccccgggccgctgcgatcgcgccctaccgggagaccggcgacggcgaatcgacgagctcgccatgtcggccttagcggcgggcggtggcgccgccgccgatggtgccccggaggcgacagcggcgccgacaaggagggagaagcggagggagcggaagaaggagcgccgccggagggcgcggaggcaggccgcggcgcgcgctcgtgcggcggtcgaggcggaggcacccgcggtcgaccccgaggaggagcgccgactccttgagatccaggaggccgaggcggctgctgagtccgagcgtgcgctccgcgccttcgaggacgccgagcgccggtggctcgaggccgccgctgcccgcgccgcagagaaggccgcggctgctgcggccgaagaggatgcaagggctgcggaggcttccgctcgaaacaagcctaaagatggccaaggaaaccagtcagaagaagatagtgaatgggaatatgttgaagatggtccagcagaaattatatggaaaggaaatgagatcattgtgaagaagaaaaaggttaaagtaccaaaggggtccaaggaaaagctgcaaattcaggaggaagatagacctacatcaaatccgctcccaccacagtctgttgctttggctgctcataggagagaaccttctttgtctgctcaagaagtacttgacaaagttgctcaagagactccgaattttggaacagaacaggataaggcccattgtccatttcatctcaagacaggggcttgtcgctttggattgcgctgcagcagagttcacttttaccctgataaatcaatcacattgctaatgaaaaacatgtataacggtccaggccttgctttggagcaagatgaagggcttgaggtttgttagaggaaattctctaatgcataactttgtatccttaaactactgtttatttacgtttaaggatgctcaattttggtttcatgggcagtgccattttaagttgtgatagtttaatactaaagcaagctcatgtcaaaataacaagtattccactttaagcttgtaagcctttataagaagacatgagtataaataactgactacttggaactatttgaatttttttaatctactgctcaagataactcttaccccaagttttccttggctactatcagactcgcgacagattgcatgttctttcgtgttatcttcagaacttcgacttgaggcatacagtgatcagaccagttgatttcacttgattgaggacgtcttgaactttgatctgctaatgtatcctaaattatcatggtcttgctgatgttgctgagctttttgatgttttctattgctattagaaatgtgcccaatatttgaaatcggtacatgtattgggtatcatttatcaagtagatccttgacaattttgataatattcgggaaattttaaatgttgaaccgttgaggagtatttcttttattggacgtctttggtgaccattagggtgacagttcacagatgaagagattgaacaaagctatgaagaattttatgaagatgtacatacagaatttctgaaatttggtgaacttgtgaatttcaagggtcgtggttgccttagtgagagagagttggagaattagcttacaattaaattgatcatggtttatcggtatttcttaagctctacatgaggagactggttcactttagtagtccactgctattgcatactagaatatgtccaaacttctgaagacttagggggcatttggttccctagctagttttccttaccttgctatgctaggctagagaacctttgctaggcaaggtgagcagattttgctttctgaccacagcacggtaaatccttggcagcacagacctcaagataggcttaccaactattcaaatgcatgtccctgttctgcattgtctctcagcaaggctaaacagtccctggtaaagaattcaaacgcaaacttagtcttagctaagcattttaacctcacctcgctattcgcatatatgattgactgttagacctctttctatttttatctttctacttactagaatgcacaccacttgttactatgggcgaagttaaattttgacacaaatttgaaatagaagggctgcagagtattagccactcagttgttagcgctgtgaatcagataggcacctctaaacgattgttccccgtgggagttgaaacactgttttgcaattttcataaatttaggcttatgtacaatttttcatccgatagaattatcgaaatgattc

SEQ ID NO: 10295 - DNA, 1694 bp, Zea Mays
aagatcgggcgtcgcccgtccgtctcctctccccgctccgctggtcgccttctcccctccccgcgaactcgggctcaaagcaaaccaaaccccttctagggtttgcgctccgggcatgatccccttgtagccaccgcctcccatggccctagccgtgtcctgctggccatgaccacctcggcttccccactcttccccaacccgcgcaagcgccacctcgacgcctccccccttccccgccacttccacggcccgcagagccaaacccgcctaagccagcgccaccgccgccggttcttcttgccgctaccaccgaaggcgcggtccttcgcttccgacatgggaaatcacatgtccagtgccttcggttggcccagtgatgacgggcgggggctcctctgttgctggatcggcaaggcgcggggtctcacggtggccatggatgtggaggcggggacgggactgcatttggtggaccggcggagggttacggattcgaggaagactacgttgaaggaggaggcggtgaagcctccccaatggaagaaaaggaggcccttctacaaggaggcgttggaggcagcagcgacacattacgatccgaggctggaggcaatcgggatcgagataaggctccaaaaggagaagcttgcctatataccaaagtcggataaggctgccaaggaggttattaatctgtaccttgaattgttgaaggagcgagaaaaaagagaaccaaacaggtttctgaaatgtcatttctttaatacattcttttataagaagcttgcttgtggaaaaaatggttatgattacaaatctgttaaaagatggacctcccaaaggaagttgggatatgaactcattgaatgcgataaaatatttgtccctgtgcataaagatgtacattggtgtttagcaattataaacgtgaaggaaaatttctttcagtatcttgattcccttggtggcatggatcataatgtaccaaaagtactggctcgatatatttcagaggaagtgaaggacaaaagtaacagagtaatcaacaccagtttgtggcatgaagagctagttgatattcctttacagcggaatgggtgggactgcggtatgtttatgctcaagtacattgatttccacagcagaggactgcccctgtcttttagtcaggaacacatggagtattttaggaagaggacagcgaaggagatcttaagactaagagctgactgatggatagacattcatcactttttggaacagaggctgactttttttactgcattttggggattataataaataaaagctgctaagtcaagtctatggcattgttgagcatgctcagggtggggtcatctacctgagatggttggtaatgtggccctgataatgtaaatactatagatattctgtagagaaattttgtttagggatttatttgactcggagaagcagtgaggggggaaatagatgtagctacgctgatattcgttgttggtttaaagttgtttcagattaatttgttcttgtggaattattttgcagccatggttgtcatacttaagttacccttgaatctccttggagaatagttgtatccgaaatctaatttagcgctaaagggttggctgccctggtctggcctagacggtggactgatgtcaggacttttacattaaggaagggcg

SEQ ID NO: 10296 - DNA, 1331 bp, Zea Mays
cgcccctctcctcccacatgtggtgctcaagccgctttacaactccccaccccatcccatccacacacacttcacccagcgcggcggccgccggccgccggcaatggaggccgtggcgcgcagcggcgactacctttggcggttcgtggcggagacagagtggtacaacgaggttgtcctcagcgccgtggcgccaggcgactggtggcgcggcctgccgcacccggtgcagtcatggatgcgcaactgcgtcggcggttacctcctctatttcatctctggtttcctctggtgcttcgtcatctactactggaagcgccacgcctacatccccaaagatgccatccccacaaatgaagctatgaagaagcaaatagttgtagcatcgaaggctatgcctttttactgcgctcttccaactttatctgaatatatgattgagagcggatggactcggagctacttcgatatcagcgaaattggtttttctatgtacctctgttatatggctatgtatctcatctttgtggagtttggaatttactggatgcacagagagttgcatgacataaaaccattatacaaatatctgcatgcaacccaccatatttacaacaaggagaataccttgtctccatttgctggacttgcatttcatccactggatggtgttctgcaagcaataccacatgtgttcgcgctcttcctctttccaacgcacttcaggacacatattgcactcttgttcctagaggctgtgtggacaacaaacatccacgactgcattcatggcaagatatggccagtcatgggtgctggatatcacaccattcaccatacgacataccgccacaactatggccactacaccatctggatggactggatgtttggtacgctcaatgagccagaagatatcctcaagaaggcttgagtttctcggagctgtggtattcctatggtgctggtgctggaactgctcgatctgttcccagtgtttctaatccgttgagcctgttcagcactgtctgtttatgtaggcatcagtgtgttaattagtttgctaggttcatatggctttgtgcttattctgtaatttagcgatgtttgtctcatgacgcaacggagttcaggacgaataaaactttgctagacacattctggattccagctgcttgtacaatgttgcaactcaactgtcaatataggatgtaaaacggattccttctagtcttgtacctgatgagttatttgtggtttctgtgcatgcattgctcagcctatgaatgttgcttatgttttgtggtcaagccaaatgaaggtcacatttg

SEQ ID NO: 10297 - DNA, 650 bp, Zea Mays
tcagtgccgacacttgatgaaaatgatgagtctgaatcgcctaacagaccaagtggattcgttttagaagagttaggaggattgaatgaagaagagatggttcttttaaattctaggattggttctggtaggaaaaatggtaggaaaaggaatgatgtagaagaagatattggagatgatttcttatcagatagtagtgagggaggaggtagcccaacctacaacgaatcaggtgatagtgactctaatgatggtggtggtgatgacgaagatggtgaacctagtggtccatgttttgcagctaggacacaacctaaattagctacagaccaatataatggtcctggtcaagatgaacaagcagtgcctctccgtccaagatcaaaaaggcagaagaagctctccatcaagggtctgtacatgcttcagaagtgatctaatcttcaagcacaagcacaagaatatggcgtatacatggactgattcaatggcaagattttgaacatgtggctctattgtatcaattgtgtgttttgtttcagtttcagcacaatattgctgtcatatttggttcatgtggcctaacaatatttataactgtgattgatttctatgcattatttgaactattgactaccaaatatttgtga

SEQ ID NO: 10298 - DNA, 1842 bp, Zea Mays
cgcgttaaaataacctaaaatcgacttgaatccaagaataaaaaaaggagtgatttgattcagatgatcgaactggtacacaggaaaattgaaaaaaatgcaagtattgactgcatgttactttagggaagttccacagacaagtcagctaccccatagcaatcacttcaaggacaagtgattcgctcagcaacagctctcaccaaactaaatgcttcacccattcttgcttgcacatttgtaagtttctctagccaaggctcaaacaatgatacaacacctcacttacaaaacatcacctttagtgctaccactatacgagttaggaggcaggagacatatatgaggaaccagtagcaccatactgtaacctcatcttctctgatgagaaagagatgatgagagagggtgatgcacgtgttacgcttctaagaagcaagctccatggcctggtcgaaaggaaccgagatctggaagaggaaaacaagcaattgagacaccaagtgagccaattaaaaggtcagatctcctctctcgaaggccaggaaactaataagaggatgctgtggaagaagctggagaattctgcaaccggcatcagctactccaaggaaaagcagtttgtccagagcaacgatggtgctaaggaagccgtagatctcaacagctcattgtctcacagcaggcagcaattctccagtgtaaaccaagtgagatcaagggcgccaagggttccaaatcaacctcccaatccgacaagcacccaaccaaaggcaactgtgagaaaggaaggatgcatggcccctcctcctcctcctcctcctctaccttccaagttgcagaggagcacaaaggcgatacaaagggtaccagaggtagtcgagttgtaccggtcgctagtgcggcgtgaaggcaaaaataatgcaaagtctggatccgtaggaattccagcagcaacgaacagcagagagatgatcggggagattgagaacagatcagcttatgttttagctattaaatcagacgtagaaaatcaaggcaacttcgtgaacttcctcgcaagtgaagttcaaaacgcagcatacaaaaagatagctgacgttgaagagtttgtgaagtggcttgatggggaattgtcataccttgtggatgaaagagcagtgctaaaacaattccccaactggcccgagaagaaagcagatgccttgagagaagcagcattcaactaccgcgatctgaagaacatagagtcggaagcatcatccttccatgatgacaggagagtggccacacctatggctctcaagcgcatgcaggcattgcaggacaaaattgaacaaggtattcataacactgagcgagtaagggacagtgcaagcggaagatataaggaccttaagataccatgggaatggatgctcgactctggagtcataagccaacttgcaaaagagtacatgaaccgcattgtgaagacactgaagtcagatccatttgcgaatgaggaggagctgcttctgcaaggtgtccgctttgccttccgcatacatcagcttgctggtggctttgacgaaggatgcagaaaggcatttcaggaactaaatactaatgcaagcaagtcagagtgatccgagttcacgtgggttcaaataaaagtcgagatcacacatagataaatatgacacacatagattatcaagttttgccgaggttggctccaagggtctccaccaagacttgatgatggtgctgcatcttctaaagtttaatttatttggcatcaggtgctgatctcttggatacaagttgaggctctgaaaaatttctaaacgaatcgtacat

SEQ ID NO: 10299 - DNA, 1112 bp, Zea Mays
cgcggcctttcaggcactccctggcggcggcccctagccagcctctcgcgcgtgcgcagccggcaccctgtggctcactcagcagctgcgcgcggcaggccagcagtggtagtggacagcggcagcggctgtgctcggcggcccctgtgttgatgtgcgctgctcagctgctgtgcccagcggccgacacctctgcggctctcctttgctcgacgtcgagttcgtccctgatctggctcaacgatttactggtttttttgccgatgcttcatagttggcgagggagaaattccagcaatgcttgtcgtgcaactgccgccacctgaggtagcgggtgaggatgagagcaatagccgtggtgtcttcgtggagttcatgaccaaggtcgctcagttcaatgagcttgttgaatctggggagcgattgcttgggagatttcgtgaggagcttgagtattttcgtaggccgcagatttctaaggaagcagatgtaatgaatcagatacttaaatcaaactgcactgtcagaatgaggtcctatattgaaactggctgcagggtccactgccaaaacatctcaaacattaatcagctgagctcatgcgaaaatggacttaaagatcatataaagaaagttaagaccttgcttgaagagcttgaatgtctggttgagaatgtctatggcatcacactaacagccagtttaagtgctctggaagtttcagacagtcagtgccttgacagcatgctaagtaccgatcgctgctccgtggaggaggacagaagtgcagatcggttggacagggatgtgtcgtttgctacagtaatggtcatggttcgcaacgcgctgaaggctgactacacgatgcaggaaaagattgtctgtgcattgtccttgaaaacaccatcatcagagctcgagggatactgcctcatgtggaatttacgcccgtacatcgatgacgatgtgatgcgtcttgcgtggaaaatgtgtccttagtaggcgcaaggttcgtcattctagcaacaagtaccagaagccgatcaaaccaccgtcctctcttccctcgtacccatgtgtcagggatcaaaagagataatggagccagtcag

SEQ ID NO: 10300 - DNA, 1201 bp, Zea Mays
cgcggcctttcaggcactccctggcggcggcccctagccagcctctcgcgcgtgcgcagccggcaccctgtggctcactcagcagctgcgcgcggcaggccagcagtggtagtggacagcggcagcggctgtgctcggcggcccctgtgttgatgtgcgctgctcagctgctgtgcccagcggccgacacctctgcggctctcctttgctcgacgtcgagcgagggagaaattccagcaatgcttgtcgtgcaactgccgccacctgaggtagcgggtgaggatgagagcaatagccgtggtgtcttcgtggagttcatgaccaaggtcgctcagttcaatgagcttgttgaatctggggagcgattgcttgggagatttcgtgaggagcttgagtattttcgtaggccgcagatttctaaggaagcagatgtaatgaatcagatacttaaatcaaactgcactgtcagaatgaggtcctatattgaaactggctgcagggtccactgccaaaacatctcaaacattaatcagctgagctcatgcgaaaatggacttaaagatcatataaagaaagttaagaccttgcttgaagagcttgaatgtctggttgagaatgtctatggcatcacactaacagccagtttaagtgctctggaagtttcagacagtcagtgccttgacagcatgctaagtaccgatcgctgctccgtggagcaggaggacagaagtgcagatcggttggacagggatgtgtcgtttgctacagtaatggtcatggttcgcaacgcgctgaaggctgactacacgatgcaggaaaagattgtctgtgcattgtccttgaaaacaccatcatcagagctcgagggatactgcctcatgtggaatttacgcccgtacatcgatgacgatgtgatgcgtcttgcgtggaaaatgtgtccttagtaggcgcaaggttcgtcattctagcaacaagtaccagaagccggtacggattaaagccaagcttgtttaagctgtttgtcttcaaaaactcacagcagttcacgattacccaaaacattgtttgtattgtacatttcactgtttgcatatgtatacactatattaaagccccctcaaattttcttagatcaaaccaccgtcctctcttccctcgtacccatgtgtcagggatcaaaagagataatggagccagtcag

SEQ ID NO: 10301 - DNA, 1255 bp, Zea Mays
acgcggcctttcaggcactccctggcggcggcccctagccagcctctcgcgcgtgcgcagccggcaccctgtggctcactcagcagctgcgcgcggcaggccagcagtggtagtggacagcggcagcggctgtgctcggcggcccctgtgttgatgtgcgctgctcagctgctgtgcccagcggccgacacctctgcggctctcctttgctcgacgtcgagttcgtccctgatctggctcaacgatttactggtttttttgccgatgcttcatagttggcgagggagaaattccagcaatgcttgtcgtgcaactgccgccacctgaggtagcgggtgaggatgagagcaatagccgtggtgtcttcgtggagttcatgaccaaggtcgctcagttcaatgagcttgttgaatctggggagcgattgcttgggagatttcgtgaggagcttgagtattttcgtaggccgcagatttctaaggaagcagatgtaatgaatcagatacttaaatcaaactgcactgtcagaatgaggtcctatattgaaactggctgcagggtccactgccaaaacatctcaaacattaatcagctgagctcatgcgaaaatggacttaaagatcatataaagaaagaccttgcttgaagagcttgaatgtctggttgagaatgtctatggcatcacactaacagccagtttaagtgctctggaagtttcagacagtcagtgccttgacagcatgctaagtaccgatcgctgctccgtggagcaggaggacagaagtgcagatcggttggacagggatgtgtcgtttgctacagtaatggtcatggttcgcaacgcgctgaaggctgactacacgatgcaggaaaagattgtctgtgcattgtccttgaaaacaccatcatcagagctcgagggatactgcctcatgtggaatttacgcccgtacatcgatgacgatgtgatgcgtcttgcgtggaaaatgtgtccttagtaggcgcaaggttcgtcattctagcaacaagtaccagaagccggtacggattaaagccaagcttgtttaagctgtttgtcttcaaaaactcacagcagttcacgattacccaaaacattgtttgtattgtacatttcactgtttgcatatgtatacactatattaaagccccctcaaattttcttagatcaaaccaccgtcctctcttccctcgtacccatgtgtcagggatcaaaagagataatggagccagtcag

SEQ ID NO: 10302 - DNA, 591 bp, Zea Mays
atggatcgatcgaccattcaccagcaacagttcctccaaagaaaagaaaaaacacgtaagtacagtacaccaatgggctcatcagcagcagcagctggagacctgacgaggggatcgcaatcgcagcatccggatcgatcacgggtccagtgctcgccggtccgcgcagcggcacctccagttgagaggcttgtagtcggtgtagctctcctcggcgctgccgaacagccctccgcggcgccggggctcgcccccgcggctgtcggcccgcggcgccaccggcacctgcaccgcctcgcaccgcccgcacggcgcgcacttgccgtcgcaccgcggcggcctcgacccgatcagcgactccgccgtcgccgccccctcgccgtcgccgatctgctttggtggacgcggatccttgagccggtaatgcggcgctctactacctgcaataatcaagaagaaagcggcgcacttgcgtaaacaacgtctacgaatcgaaggcatagaggtttttaggcaggcgaacgaaagatgtttttttttaccgtcggcagagcgcaggccgtgagaggaggaggaagaagaagagggtag

SEQ ID NO: 10303 - DNA, 1866 bp, Zea Mays
gacaataatgtccttattttggagctcgcgccgcccgccgcccgccgccgcgcccgaacgcagccatcgattccccatttctttcccgcctcctcactcccgcctcttctactcccaaaatcccaaaaccctagctcgctaacgaccccaggcagacgcgccgtcctcccctcccccatggcgctcaagcagaaggacaccgacgccgccgccaccgccaccggtaccaagaagcgccgccgcgtcttcttctccgacaccgtatggaatccaggcgaggtgagctctgtagactgcactgctattcagccatttgacctaaaccatttttttggtgaagatggaaaaatatatggttacaaaaatcttaagataaatgtgtggataagtgcgaaatctttccatggatatgctgatgtttcatttgacgaaacatctgatggagggaaaggaataacagatctaaagcctgttcttcagaacatttttggagaaaacttggtagaaaaagaggaattcctgcatacattttcgaaggaatgtgaatatatcagaactgcagtgacaaatggtagtgccattaagcatgatggctcatatgaatcagatcctgcagttgagattgttcgagttgaactccaaggtgctgctgcatttctttattctcgtctggtacctcttgttcttcttctggttgaaggttccacgcctatagatattggagaacatggatgggaaatgcttctggtagtaaagaaggcaacacaagaggctggttcaaaatttgaactgctaggttttgcagctgtgcataacttctatcattatcctgagagtattcgcttacgaatcagccagatacttgtgttgccaccttatcagggtgaaggccatggtcttggtcttcttgaagcaatcaattatattgcacagtctgagaacatttacgatgttacaatagaaagcccttctgattacctgcagtatgtgcgatcatccattgactgcctccgtttgctcatgtttgatccgatcaaacctgcactcggtgctattgtcttgtctctgaaggagaccaacctgtcaaaaagggcccaaagtttgagaatggttccaccagctgacctgatggagactgtccgtcagaagctgaagataaacaagaaacagttcctccggtgctgggaaattctgatcttcctaagcctcgactctcaggatcataagagcatggacaacttcagggcctgcatatatgaccgcatgaagggggagatccttggcagtgcctctggaactaacaggaagcgtctgttgcagatgccaaccagtttcaataaggaggcatcttttgctgtgtattggacacaggagattgaggatgaggatgaacaaactgttgagcagcagccagaggatctcaagacgcaggagcaacagctcaatgagctcgtggacatccaaatcgaggagattgctggggtcgccaagaacgtcacttcacgttgcaaggataagatgacagagctggtggttcaatgaatctgggtgaggttcctacttcaaacgatgttaaaatgctgtcgtagcttatctggtgaggtctcttttatgggttggcttcttggtagaaagggaatgtttggttattgcactgtcatcgtagtgttagaaccaacacaagcataggcactgagtagattgtcacggcagattattatgtacttcaattctggaatatttgatgggaatgctattttagattgcttggtaagtggtaaccgcctcaaatcacagaagtagaaccagcttctgattcagccggaaccatttattgaattttatggtgatcactgattagtaatc

SEQ ID NO: 10304 - DNA, 3558 bp, Zea Mays
cgtcagcgtcgagaggagaaaaagtcaccgcgagtccaggatccatgctgaggcacttggtccggacgggccagctcgccgacgcgaggagcctattcgacgcgatgccgcgccgcgacgaggtcgcctacgcgactcttctctcgggctatgccgcggcagctgacttcccgggcgctatggcgctcttctcccgcttccgcgcctcctcctcccagccacacgacgccgcggatccgttcatcctcagccccgtcctcaaggcgtgcgcttccgctgccgccagcgcagggctcctccccctccctcacgccgccgcggcggccgctctgcacgcgttcgccgtccgctcctcctccctgccgtccgtgttcgtctccacggcgctcgcggacgcctacgccaaggccggccgcctcgacctggcgctgcaggtgctcgacgaaatgcccagcaggaacgtggtctcgtggaccacgctcgtcgcctcgctggcgcgtgctggccggcggcacgacgcgctccgccgcttcgccgagatgcgggcctccggcgtggcctgcgactcccacgcctgctcggcggctctcacggcgtgcgccgacgcggggctgctgccacgcggccgcgaggtgcacgcgctctgcgccaagctcggcctcgacgccgtgcccttcgtcgccaacgcgctcgcggcgctgtacgcgcggtgcggcgatgtcgaccgcgcgctggccgcggtcggccgcatgggctcgcacgacgttgccgtgtgcacaacgctgatcgcatcctacgtccagaccggccgcacggaggaagccatcgaggcgtttgtgagaatgcttcgcgatgagtcgtcaaattctgcttcaccaaatgagtatacgttctctgccgtaattgccgcgtgtccaaatatggatcgtgcatatcttggagagcagttacatgcacaagctgcacggagagggctatctcatgcccgctctgtggccaattcccttgtcaaactctattcccgccgtggccatctttcagctgctgatgctatcttccgggagagtgtcgtcaaggatgttgtctcctggagcacaattatatcaggatacacacaagaaggcctcgccgaggagtcttttgccttgttctcagaaatgcggcatcacagtagctgccctcggccgaatgagtttactcttgccagtctcttcagtgtgtgtgcaagtgctgcgtcgctggatactggacgccagctgcatgcactcgctgttgctgctgggcttgaacaccatgcaatggtcaggagtgcgcttgttaacatgtatggaaagggtggtagcatgtcagatgctaatgtcgtattttccaatcgcactaaagatgatgtgatttcatggactgcgatgatcgttgggcatgctgagcatggtcacagcaaagaggcttttgaactgtttgaggaaatgtgccgtatcgggctaaagccagaccatgttacgttcattggtgtactcactgcttgctctcacgcgggggaacttgagctcggattgagatacctcaatgcaatgaacaaaagctatgggctggagcctgaaaaggagcactacggttgtgttgttgatttgttagccagagctggtagaatacatgaggctgaggagttgattggaagaattgctgctgaggaaagagatggtgtggtttggacatccttgcttagggcatgtgctgctcgaggggcagaggaaactggaaagatagctgcagagaggatgatggaggcagagccatggggttcaggagcacatgtggtgatggccaacctctatgcaagcaaggggctgtggtgtgaggcagcacaggaacgccatttgatgaagcagaaaggtgttctaaaaggtgcagggtggtcatcagtcgaagttggaggggacgacaggggggttggagtgtttgtttcaggagatcggacaaatccccaagacagtgccatctacatgatgcttgagctgatgtactatggagccggaatggttcgacaaatccctgatcagttggatttaggatctgaaggggagctaacagtttactaagtcatcctgaaagaagcactgactaaatagagaaatttacatggtaccttgtcaatgatggaacatccatcggaggacaacataaggatacacattgtatcctgctcttcagttgcttcaacttcaagctataatacctgtccatttattgtatctattgttttttgtgggtggctttgccctattctaaatgcaccaactgttttttatttagctatttgatattttccctgctggacataaatcactacatttatggctgatgtatttctactaaatggaacatagtgtagcagctctagaacatggaaaaccttaaatgcttgtttatgattaatctaactctttttttattcatggctgttcagatacttcatgaagtgagaataaagcgggatagcaaaagggaggggaagttgagatcaaactaagatacctcaatgcaacgaacaaaagctgcaggttggagcctaaaaatgagtactacagttgtgttgttgatttgttgggcagaaatgttaagttttccggtgcttctaggcccatcagtcactaaaccaatagaatctaagcagaccttccttcttgcaactggtatttgctgagctgaaatggtccgccatatccatgatcagttggatttagaatctgaagtggagctaaacagctaactgagtaatctcggaaggagcacttactgcaagggagaaatttacatgaggccttgccatcggaggacaatataaggtcttcataagatatctgcaaatcattcagaaatctagggtgcgctgatgacttccagtccaatcaagtattctaaaaaagaattatgtcccaaacaaactacaatacctgtggccagtacaggctaaatcgtgctcaagttagtatctgcatcagatttgtattttagtctaccaaactgatataaccttggtagttggtacattgctcaagtgacttggagcagagcagaatgtgaatatctgcctgatgatcccttttacagcaaaagcatgccagagtgtgtgtgtcgtattcattcgttttccagaagggagcccggccaccatatggaaggaaattcactcttcatagtcacaacagcatcagtgtattccgtgttgcacgtactgctctttaaatctgtacactgctagtaaaatatttcttgactgacttgctggatattcttgtgcagcctggtgatgttttctaatgttacagtaatagagttaattttcatcccttatgccaactgatcacatgttactttacagcattgacgatagagtgatgtaaaggttaatggtgtcgattctttgtacagccttttttttacttttttttgtctctgttgagatgccaagttttggtgtaaatttttaatgcctggttttcatgagctagactgccaccagaagtctgtttttttatcattttgtgtgaagtgttg

SEQ ID NO: 10305 - DNA, 1103 bp, Zea Mays
ggttccttctgggattttccgaagtcccattgaaactttcttggcaatttgtgtttttttaccgttgatgttgcagcgagataaaaatggatgatcatcgttatgatatgctctttattagtgccacgtaaatcaccaaaaatattttaatgttcctgtaaaaatatggaaataggaccatagaagtggcatgttgcaagattattttaaatcctcggtgaataagtgtcaaccaagagaatctgcaacaaaaatgttgtaattttaaccagtgatacctttatgaatatttacctaggccattgggaaagtcatttatatatttgattatctgactcacaaatgctctttcatcggttatattatgtttacacagtacatcagagatcagtaaattatgaagcgataactgatgttgtatcagggtgattgtgtgccttcgtatcattatatgtgggctattctggcttgtgaaataattttgtaactatttctctgcaacttgttgtgtgggttcaaaaatcacagctacttgaacttgtagagcgtgattatattgcacgtgttgatttaacagctaaggtcacggtgttcataaagcagaacagcatactcagaaaattcctgcatcttataggggtgagattgtgtatagaacacttttgggcttttggccaattgtgttgctgcagccacataaaaaatcagagcatttttttaataggatgacctcccctgacccctgggcctggcagcgcactgccatcagcgcaagcacgatggcagcaggtgaggcggagggatgagcagccttgccatactggagaagaagtcgacgctgttccccgatggcggtggtatgggcggtgttctcttccaactctgagctccaggtgcgaccacgggattccaggttcattcaccatttgctctgtaacactattggtgtattgtgtggagcaggtttcagtgaactcagggccgcagggtttggtttggtgtcaaagatcggcctggaggcgaccaacacaagtggttccctgattctgcattgtggaatccttcgcccagacaagagattgaatttgacatacttgagctac

SEQ ID NO: 10306 - DNA, 942 bp, Zea Mays
tgcctgacctatttaaatatttaataaatctaaaaaacgtttgttaaacaagcatttcagattattgtttcggcctactataaacctctaacagaaacaataattctgaacaaaaacgaactcgcacaaactctcttttctttcccccaaccctcccacatatacactttttttcttctcttttataaaaccccaccccgaaaatgtctccgctagtcagagtcctcgcaccgcacgcaacaagtacgcaggcagcgcagcctcgagccgtcgccatggcgagcaagcacctcgtcctcgccgcatgcctcctcctcctcctgcccaccgcctcggtcgccaccgacgtcgactactgcaaaggactacccggtgaaggtgagcggggtgcagatcctgcccgatccggtcgaacccggcaagcccgccactttcaagatctccgcttctactgataaaaccatcgagaaggggaagctggtcatcgacgtaaagtatttcttcttctatgtgcactcggagacccgcgacatctgcggagagacttcctgcccagcgaccggcgacttcgtgctgtcccaccagcagacgctgccaggcttcactccgccgggctcctacacgatctacatgaagattgtcggggacgacaacgaggagctgagctgcatctcgttcgggttcagcatcggcttcgtcgcgtccagctgaacacgtccgagcccgggcacgagaggcatccagctcatggatgtaattacgtgaagcacactctgtatcctatgactttttgtgggtgtctgtgttcaactgagacgtttttatccggagttgaacatcacagtaaagcaaagtcactgataccatgtaatggaactctgagcgcttgatggggcccgtgttttttagactcacaataaagccggtttgtgtttgtgccta

SEQ ID NO: 10307 - DNA, 1419 bp, Zea Mays
tgcctgacctatttaaatatttaataaatctaaaaaacgtttgttaaacaagcatttcagattattgtttcggcctactataaacctctaacagaaacaataattctgaacaaaaacgaactcgcacaaactctcttttctttcccccaaccctcccacatatacactttttttcttctcttttataaaaccccaccccgaaaatgtctccgctagtcagagtcctcgcaccgcacgcaacaagtacgcaggcagcgcagcctcgagccgtcgccatggcgagcaagcacctcgtcctcgccgcatgcctcctcctcctcctgcccaccgcctcggtcgccaccgacgtcgactactgcagtaagaaggactacccggtgaaggtgagcggggtgcagatcctgcccgatccggtcgaacccggcaagcccgccactttcaagatctccgcttctactgataaaaccatcgagaaggggaagctggtcatcgacgtaaagtatttcttcttctatgtgcactcggagacccgcgacatctgcggagagacttcctgcccagcgaccggcgacttcgtgctgtcccaccagcagacgctgccaggcttcactccgccggtgagacttctccgcacagccagcaatcgcacgtctgggccctgtttggcagcattgttttctaatactgtggtttagaataccatagcatatataattttttttgggttgtgcagagaaaacttgggtcaagagtggagtatccaataccacagaaacactacagtatcgaacaaaaccataggataaaaaaaacagagttttggaagtggtcaatgaaacatcttttagctagcctataaaactacggtattctccagtactacagtatttaccttgaaactaggaaatcacggagcttctgaacgggtccttttttttagttctgttcaggaaaacccccagattccctctgttgtgttttcttaggacctggcagattgtgcgcctgatattcagactcggattggtgtcagtcaaacgttgttcatgcacactgatgcgttctgaggttctttccgctccgtcgcagggctcctacacgatctacatgaagattgtcggggacgacaacgaggagctgagctgcatctcgttcgggttcagcatcggcttcgtcgcgtccagctgaacacgtccgagcccgggcacgagaggcatccagctcatggatgtaattacgtgaagcacactctgtatcctatgactttttgtgggtgtctgtgttcaactgagacgtttttatccggagttgaacatcacagtaaagcaaagtcactgataccatgtaatggaactctgagcgcttgatggggcccgtgttttttagactcacaataaagccggtttgtgtttgtgccta

SEQ ID NO: 10308 - DNA, 1627 bp, Zea Mays
tttacggttcttaccctgtcaagttgcgggaaaaactgagctctccgaggtcagaagggagcgagcccggtcagtcccagtgggtctcttcccttgcctggatcgccacgtatttatggcacaagccacgcggtcttcttcttctcctcccgcggccattgcaggtcttgcagcaacgtctctctcctctgggcggtgggcgctcgatgttcttggctccttcacttggacttcgccccgtcggcgtccactgatcaattgatcatctgcagataagctaccagcatctattttgcgtatctgaactccaaaaaggagagctcgaaactacagcaatgggttgctaccctgtgttctggaggaagaagaactccagaagccaggttgtgcagcttgaccaagacatcccaatcgcgggcaacgtgaaaatctactcgtccaaggagctgaggaaagccacgggaaatttctgcccgggaagcaagcttggacagggttctttcggccgtgtatacctgggaaaactgaacaatggcgagaaagttgccatcaaggtgctctcctcagagtccaggcaagggacaaaggagttcttgaatgaactgagtgtcatatccaacataactcaccacaaccttgtcaaactgcatggctgctgcatcgacggaggccagaagatgctggtctacaactacgtggagaacaacagccttgcacaaacccttttcggtaattcccgcagcggcatcagatttgactggagaacaagggtggagatctgcgttggcgttgccgatgggctcacgtacctccacgaagaagtccgtccaccgatcgtccaccgcgacatcaaagcgagcaacatccttctcgacagaaatctgagacccaagatagcagactttgggctggcgaagttcttccctggcaacatgacacacatcagcaccagagttgcagggacgctaggatatcttgcgccagagtacgccatccgagggcagctgaccaagaaggccgacgtctacagctttggtgtactgctgctggagatcgtcagtggcagatgccacactgatcccacattacctcttgacgagcagttcctcctagaaaaggtctggacactctcggagtccgatgatcttgagagcatcatcgacggtaccatggagcgcgatttcgacaccgaggaagcacgtcggttgctgaaaataggtcttctgtgcacccaggatagccccaagatcaggccctccatgtcaatggttgccaagatgctgaagggtgagtgtgatgtgagtgaaaagatcatgcggcccagcctgatcacagacgtcatggacctgaaagtcaggacagtagagccgatccagttcagtttatccccatcgatgtcacctgcgctgagcagctcactggtgtccacacttgcattagctggtagcacagttgtagagagccgctgaaggaactagttaaaggaccaggttcctacaaaaaatggtttgttagaagcagcatgaattgtttttttgtttgtgttttagtacattgtaaggttgtcagtttgtatatataacatcctagtttgattatcgagattagagattttggccatatgaag

SEQ ID NO: 10309 - DNA, 1233 bp, Zea Mays
ccaagtgaccagtacggattgcctcctcgctactggtcgccaccggggaagccgcggctcccccgtcatccacgacttcgggaccatggccacctcgcactggcgctggcagatgggtctgctgtcccgtcactctgacctgctcaagacggccgacgacgacagggcgctcctctagtgtgccggcgccgagtttgcgctcacggctaacttgctcatgccgttggacgcgcccggcacacggtgcctcatggagttatccttgtatcggaggcagggcatcattaagttccacaacccttccccctcctcgtagaattgcttgtccctgttgatcgaagtgagactgaatcagggggcccgcactcgcacctcccacgacctctttccgccatggggctccggattccaccgtttgtcaggcatgagtagcgagcgatggactggcggatcccggtagagacctgaaccccgcgccaccaccatcgccacagcaggctacatgtttgttctcttgttctagacgcaagcagcagatgcgaaataggcatccgtctcatggtggggaaattgttcacagttgaggatgtcgtaattggtggcctattcgtgatatctcttcttctagagagtatgcaagacaaggatttgctttgggtcttgttgttgtgctcaaatcgattcgggcaatcaaggaagctaaggacaatattttggggcgccagtttggatttggagcaattgtgaggtctgaccgtgtttcacaacagtggacatgtgacaaaagctcacccatcgttaaggaatttgtgagtgtggatgtagaactcggtggcaagaaacgatacttgacagagcctgcagttgccgtgattttggaattagttaggaaggcatgatgctatcatatcagaagaatttttgctcaacttttggtgagcactggaagaggatagagtggtgaagacaatggcatagctatactgtcatgggcatcatagggagcgagaggcaacagccaggctgggataaggctagagaataagattgagatgagctgggataaggctagagaataagattgagatgagagaattgtggagagttggttagcagtagataagtccaagaaagtaggagttagttgagagtttgtatgagaagttggttagctatagggctatttataagccgcatggcagcagggaataaatcaagcaagatcattaccaa

SEQ ID NO: 10310 - DNA, 1105 bp, Zea Mays
tctctctctctctctctctctcctgtctgctcgctttcttctcgcgcggtgcgggagaaccggagaaccgccgcctcagctccgtctcgccgtggacgcagaccttcagatttatttgggcggtatacttggaaaatcgaaaacttttcaaaggagaagaagagagaaatgaaaagtgaaccgtttgaagctggtggctacaagtggtatattctagtttaccctcaaggatgcgatgtctccaatcacttgtcattgtttctttgcgttgctaatcatgaggaacttctcccaggatggggccattttgcccagtttactatagctgtgggcaatcttgatccaaagaaagttaaatattcagacacgctgcacaaattttggaagaaggaacatgattggggatggaaaaagtttatggagctatcaaagattcaagatggttttcttgttgatgatgttcttgaaatcatagctcaagttcaagttatcagagagaaagcagacagaccatttcgctgccttgatcgcccttatcgtcgagaacttctccgtgtctacatgacaaacatagagcaaatttaccgacgttttgttgaagaacgcagaaggaaacttatcaggcttattgaagacaaaatgaggtggtccagtttccgtgctttctggcttgcgattgacccaacaaccaaacatcgcatgtccagagagaagagtgacatcatattgaaaatggtggtgaagaatttttttgtcgagaaagacgtgacctcaacattagttatggatgctctatatacaggtttgaaggctcttgaggcctgtagcaatggcaagaaaggaatggtaacttcaattgacttggaggagctatcagcttctatggtccatgtcgatatggacatgtttgttttggctggtgacttcataactttgattgagagggcagctttagagcccttgtcttgtcaatctctgtcaccaaaaggtgacaaatgttcccaaacccgtgctaaggatggtggtactggagaaattaacaaagttcctattgagcttcaagaaaggcgtcttacggagcttggtcagaagatactgaaatatt

SEQ ID NO: 10311 - DNA, 473 bp, Zea Mays
tatggacccacccactgccgagtggcgtccagcagtgtccgcagcagcggtggtggcgagacgagaggccgctaaaacccaagcgcggcccgagccgaacctgaacctgaggtggagagatcgcacgcgccctctgccgcttgttcgttcctcgcgcttgccaccaggcaccaccacacacatcccaatctcgcgagggcaagcagcagggtctgcggcggcggcggcggcggcggcagcgcttccggctcccctttcccattggcctccacgatggcgctccgcctcaacgacgtcgcgctctgcctctccccgccgctcgccgcccgccgccgccgcagccgcagccgcagcagcggcaggttcgtcgccgtcgcctccatgacgtccgccgtctccaccaagattggatggataacctggccggttcctacgtctggcggcgacgcgtacgccgagacggttcgcgacgg

SEQ ID NO: 10312 - DNA, 782 bp, Zea Mays
cacggttctgccataccccctcctccgcgattcgcgtctctgccgccatgcccgctctccatcgaaggaaggcgccattccagggattatcgcaccattctcgccctcgtccgctctccggcaccattctagcattccagggattaccgcctccccctcgatccgcggcactctcccccgtccttctcgagtatggcaccgccagtccgcctcgcgacccctgcctcctcccccctcgctctcttgttcccccagccaccgcgaggaactctgaaccccattccccaccaccgtaccaatccccgcatctacgccgctccccccgccccctgtcaactacgccaggtcctcgccatcgatgtcgcccaagcgcgtcgtcctcgcccccgacctcggcgtgcgggattcggtaccgaaagaagagacaggaggagaatacaagccctcagcctcggtgttccccattcaccgctcaggcgcagtccatcgctccttcgacgagggctccagcgactacggctccatcgctcctcatggtgatgccgccgagggttgtcctacgaagccgtccgcgatgccgagggttgtcctacgaagcagacacgccctgcggctgcccacacaaaggctactgcgcgtgtgctttcacattcggcacagtgggagccctcatggcagcagacgacgtgtgactccagactcggcgtagacgacccacaaggagctgctaatggcggaggctgagcgccgccatggatctgacacggtgtggaatgggagga

SEQ ID NO: 10313 - DNA, 1884 bp, Zea Mays
gaaacattttttttcttctgaatccctggtctgcttgttcattcctcattcctctacacgcatattcctacatgccatgcccacacgcaaatatgtcagatgctcagcgctcgacttagccctcgatcacgggcgcacaacaacacagcgacgctatctgaccgagtgttcaaataaatacccacacgggcacgccacgagacgatgagacccctctgctccaatccgccgctccactccaagtcacacggaggcagccatcgtagcctcgcccgactccgcttcccctgttctttgggcatggagctgatcacaaatgtcaccgagtacgagaagctcgcgaaggagaggctgccgaagatggtgtacgactactacgcctccggcgcagaagatcagtggacgctcaaggagaaccgggaggccttctccagaattctgtttaggccacgggtactgatcgacgtctcccgtatcgacatggccacaaacattctgggcttcagcatttccatgcctatcatgatcgctccttcagccatgcagaaaatggctcatcctgatggagagcttgccacggcaagagctgcagcttccgcaggaacaataatgacattgtcctcatggtctacttccagcgttgaagaggtcaactcagttgggccgggcatacgtttcttccagctctatgtctacaaggacaggaatatcgtacggcaactcgtgaaaagggctgagatggctggcttcaaggccattgcactcacggtagacactccaatacttggccgcagggaagctgacattaagaacaggttcgccttacctccacatctggtgttgaaaaacttccaagcgctggatcttggcacgatggacaagacaaatgattccggccttgcttcctacgttgctggtcaagttgaccgcaccctttcctggaaggtattattcgtacacccttccttcctagcttcattatttttcttcttcttcttgcgaataccttcctagttgcagataacagctaatctgaagtttgaaataaacagaagatgcactcaaaaaaaaaaacaaatgcaatagtgtctcacttctgcttgcatccaagtgttccatgtggcaatagaatgctgacaagtagcaatgcaacaaacaggacgtcaagtggctgcagacaattacctcgttgccgatcctagtcaaagggatcgtgactgcagaagacactaggcttgcgatcgaatatggcgctgctgggatcatcgtgtccaaccacggcgcgcgccagctagattatgttcctgcgactatcagctgcctggaagaggtcgtcagggaagcgaaaggccggctaccggtgttcctcgacggcggcgtccgccgtggcacggacgtcttcaaggccctggcgttgggagcttcaggagtgttcatcggccggcccgtgctgttctcgctggcggtggacggcgaggccggcgtgcggaaggtgctgcagatgctgagggacgagctggagctcaccatggcgctcagcggctgcacgtcgctgagggagataacccgcgcacacgtcatcaccgacagcgaccggatcggccgctcgcggctgtagaatcattgtgcagttcacctcaggaatgatgttggtctcgactgaactgtcctgattcgggatctatttgtagctcttgtgctctcattttacgttaggcaaataaggaagctgcgtgcgtatgtgtgactgctgctgacgtttgtttgcgccgctgtcgtggttgcctggttggcacttggcagtgttgattggcgttagtggttggtttgggtgaaaggagtttatgagatctggtgccggtttctaagatactagcccatcaa

SEQ ID NO: 10314 - DNA, 836 bp, Zea Mays
ctgtattgttgcctggcccattctcgtgactgcttcctcgactcgaaaatcctccgaacagaacgcaggcaggcggcggcggagacaggatcaggttcctcgcggccggcgttaagtagggcggccgccctacatcgtcccacctgtaggtacgacactgcgccgcttgaaggaggctttgcggcgatggaccgggtcggcggcggcgaaaagcaactggaggattgcacagtagccaattgggcacatgccaccgggagatggctcggtggagtcagcttgtggggaggagagtgctctaggaacttggttcttctcagttgcgggtgctcttgttgctattcctgtgggcataaagaagaaatccttagccccactcgtcttcttcggcactactggaaccatgctggacattatcatgggcattacccagtgtgagcgagagcatgctgagcgggaaatgaagattttggaagcccagaaattttcggtcgatgcttcagctcagaacgaaagctctgattcctttggcagtgctgacaagtgaaacacttctcctgttttccctcacttgtgacctggcttcacctctgttaattagagttgttgctcagatgccaatttgacacctttaaatttctgaatacactattcctactccctcaataacgtgcaattgtgcatttgatcaaccattagtttttatatatattgtgaattgaaaacaaaatataaaaggttcagtcttgctcctcaagcaagattgccacatggtgaaaatagctcaatccattgtacggcttggtatgggactatatatatataatgtttttttt

SEQ ID NO: 10315 - DNA, 2523 bp, Zea Mays
gcctgtacgaaaataagaataagaagaaaaaataagaaaattggtccagcagcaccggaggaatttgccctcctggtgttcacagctgttcgctgttgctctctccagtagtcccgttgagtgacctcccctgcgcgacaactagggcgaccgccgccgccccacgcctgctggccaggtcttcggcggaccctttgccgtcgacgggcatccaccacaccagatggtatatgctttcgcctaggagcaggctttttaaatggacttttagaggctggtgccagtgccacagaaagttcaggtttttccaattgtcaactaggaaatgacgtctcttcagaagaatcaacaacaattgatattctgcagaagatgttccttccatcaagtggtccatggcatgcgaataacgagttagcagggaactatcaaaaacaaagagattcgagtgcctggaacagagctgaacagaaacgtctgaaagaggagttgactagtgttgttgccaagttggaagaaagcaaacaaaaactggcagtactgaaagcacagggagacaataagcaagcaacaccgatccttgttcctatgctgggaaagaaaactgcagaaaaggtgggagataaacaaacagaactgcaagatcttgaagctacccacaaggagttaatggaatcgatttcaaagcgtctggaggaaattagaagactgcatacagagagaattggaattttgaacaatttagcgacttttcagaatatactgacggatttcaaaagcattcactcttccaaagcttttcaacttgtcaatgaccaacttcagaagtcacaagcagaactggatggtcaccaaacattgttagagaaattacaggttgacatggatacctttgtttggagagaaaggcaatttaatcaaaaagttgatttggctgaaatctcccagaaggtttctgcatactatgtatctagaattgctgatcttgaaaaggatgtccagaaactatgtaatgaaaagaatatgcttgtgctgaaacttgaaggggctttgagagaacctggtcggaatcaggttatctcagaatttaaagctctggtgtcatcgctaccgagggaaatgggtgctgtgcaaactgaactgtccaaacacaaggatgcttccttacagttgcattctttgcgagcagaagttcattcactttctagtatccgaaccagaaaggaacaagaaattgaagaaacatcaagatctgctcatgctggatctgatataagccaacttcaatctctggtccatgagctgagggaaaatacacaggagcttaaactatttgtggagttgtataagcatgactccgctgattccagacagctgatggaatcgagagacagggaacttgctgaattggctggagtccatgttctcagatattctcttaatgaaagtaaattagagcagcgtgtaattgcagccaatgaagctgaagcaatctctcagcagagactggcaactgccgaagctgaggttgctgaattagggcagaagctagaaacttctaggagaaatctagtgaaacaatctgatatactgaagtctaaacatgaagaatgtgaagcgtacatggtggagatcgagagcattggccatgcctatgaagacataatgtcacaaaatcaacaattgctacagcagattattgaaagagatgatcataataccaaggtatggcgacatggcgttgagattttcagtgggcttttaaaacttttcatggagggtgttaaagcaaaacagtcacacgatgctttgcatttggaagtgtgctcgttgcaaagaaatttgcagcatgcaagcactttgatggatctgtgcaaccagaaacttatccacctggaggacaagctaagaggttggtcagagcggttgaggagactgtcagaggatggaatgcagcaatctatttcattgggcatttctcaaacaaagcttaccggtatgcatggggaagctccaaagctcgggcaggcattgaatgttctacaagcgaaggttgggagcaatcggctggaagttgctgagctgcttatagaactagagacggagaggtttagtaaaaagagattagacgatgatttggatctaatgtcaagcaaagctagttctctaagagagaaggcggataattctcaagtccttcaaaaacttctccatgaggctaaggagtacaggggaatactgaagtgtggtatttgtcatgacaggcagaaagaggttgtgattgccaaatgctaccatctcttctgcaaccagtgcatacagaagtcgcttggtagccgtcagaagagaaggttggcgcctgtgtcgcacacaccagaactgcctggtgctctactgattcccggtatatgtgcagcatctcagaggctacgttaccaaaaggttcttaggtctactgagaagcattcacagttcagtagtagatcacagttgccagagacattttccaacaagcagagatag

SEQ ID NO: 10316 - DNA, 2936 bp, Zea Mays
ctggtgttcacagctgttcgctgttgctctctccagtagtcccgttgagtgacctcccctgcgcgacaactagggcgaccgccgccgccccacgcctgctggccaggtcttcggcggaccctttgccgtcgacgggcatccaccacaccagggttttgcacattaatgaagacttaaaagttccagaacaaagcactaagggtgctcgaaggaaaaatgctttaggttaggcactggttgaaaacagattttgttggcgctcctggagttcatacttatgtactttcctttctcaaatcataacatatcttaggcagttaaagcttagctgaatgccaacttgcctccacgtgcaagatcccagaaacattgctatgtctcgtccgcttgattttgctgtgcttaattacaaaaatcaaaggcttgcggaacaactggaagtccacaaatttgagttccgtgctcttgagagtagatttaatgatttaaaagagaaacagaggacacataatgagacacttatcctagtagaaaattattgggagcgactcgtagcagagctgggtatagtccctgtttgcaaaagtgaatcttcacattcaagctgcagtacaggaaacaacaatatacggaaggatggtatatgctttcgcctaggagcaggctttttaaatggacttttagaggctggtgccagtgccacagaaagttcaggtttttccaattgtcaactaggaaatgacgtctcttcagaagaatcaacaacaattgatattctgcagaagatgttccttccatcaagtggtccatggcatgcgaataacgagttagcagggaactatcaaaaacaaagagattcgagtgcctggaacagagctgaacagaaacgtctgaaagaggagttgactagtgttgttgccaagttggaagaaagcaaacaaaaactggcagtactgaaagcacagggagacaataagcaagcaacaccgatccttgttcctatgctgggaaagaaaactgcagaaaaggtgggagataaacaaacagaactgcaagatcttgaagctacccacaaggagttaatggaatcgatttcaaagcgtctggaggaaattagaagactgcatacagagagaattggaattttgaacaatttagcgacttttcagaatatactgacggatttcaaaagcattcactcttccaaagcttttcaacttgtcaatgaccaacttcagaagtcacaagcagaactggatggtcaccaaacattgttagagaaattacaggttgacatggatacctttgtttggagagaaaggcaatttaatcaaaaagttgatttggctgaaatctcccagaaggtttctgcatactatgtatctagaattgctgatcttgaaaaggatgtccagaaactatgtaatgaaaagaatatgcttgtgctgaaacttgaaggggctttgagagaacctggtcggaatcaggttatctcagaatttaaagctctggtgtcatcgctaccgagggaaatgggtgctgtgcaaactgaactgtccaaacacaaggatgcttccttacagttgcattctttgcgagcagaagttcattcactttctagtatccgaaccagaaaggaacaagaaattgaagaaacatcaagatctgctcatgctggatctgatataagccaacttcaatctctggtccatgagctgagggaaaatacacaggagcttaaactatttgtggagttgtataagcatgactccgctgattccagacagctgatggaatcgagagacagggaacttgctgaattggctggagtccatgttctcagatattctcttaatgaaagtaaattagagcagcgtgtaattgcagccaatgaagctgaagcaatctctcagcagagactggcaactgccgaagctgaggttgctgaattagggcagaagctagaaacttctaggagaaatctagtgaaacaatctgatatactgaagtctaaacatgaagaatgtgaagcgtacatggtggagatcgagagcattggccatgcctatgaagacataatgtcacaaaatcaacaattgctacagcagattattgaaagagatgatcataataccaaggtatggcgacatggcgttgagattttcagtgggcttttaaaacttttcatggagggtgttaaagcaaaacagtcacacgatgctttgcatttggaagtgtgctcgttgcaaagaaatttgcagcatgcaagcactttgatggatctgtgcaaccagaaacttatccacctggaggacaagctaagaggttggtcagagcggttgaggagactgtcagaggatggaatgcagcaatctatttcattgggcatttctcaaacaaagcttaccggtatgcatggggaagctccaaagctcgggcaggcattgaatgttctacaagcgaaggttgggagcaatcggctggaagttgctgagctgcttatagaactagagacggagaggtttagtaaaaagagattagacgatgatttggatctaatgtcaagcaaagctagttctctaagagagaaggcggataattctcaagtccttcaaaaacttctccatgaggctaaggagtacaggggaatactgaagtgtggtatttgtcatgacaggcagaaagaggttgtgattgccaaatgctaccatctcttctgcaaccagtgcatacagaagtcgcttggtagccgtcagaagagaaggttggcgcctgtgtcgcacacaccagaactgcctggtgctctactgattcccggtatatgtgcagcatctcagaggctacgttaccaaaaggttcttaggtctactgagaagcattcacagttcagtagtagatcacagttgccagagacattttccaacaagcagagatag

SEQ ID NO: 10317 - DNA, 1863 bp, Zea Mays
acccagcgtttgccgaggcttgtaggtctacccaaagcaattgaaatgatgctgcaagacagcaagcaatgaagatcgcaccaaacatgccacaaaaccaggcctgcctggatgtgatggaggaaggcatattatgtggaggccaagctggtgttttgaaggaggccatggttttcaaggagctggtgatagcaccaacatcaaaggctcttgtctatgttttctttgctaacgttccacgacaaaggtgccaggtgtaactgatgttcaactgaaaccaaggccaattagaaaagttgctgttattggtggtggtctgatgggatctggaattgccacatcacttcttgttagcaacatttctgttgtgctcaaggaagtaaaccctcagtttctgcaaaggggagagaaaacaatagcaggtaatcttgagggcctggtcaaaagaggttcactaacaaaggataggatgcacaaggccatggcccttctcaagggtgctttggattattcagatttcaaggatgttgatatggttattgaggctgttatcgagaagattcctttgaagcaatcaatatttgctgacattgagaaaatctgtccaaaacattgcatacttgcaacaaacacatccaccattgatttgaatgttgttggcaagaagacaaattctcaagatagaattataggggctcactttttcagccctgctcatattatgcccttgcttgaaattgttcggacggagaagacatcaccacaagctatccttgatctcatcaccattgggaagataataaagaaagtccctattgtggtcggcaactgcacaggatttgcagtcaaccttacattttttccttacacacagggttctcatcttctagttagtcttggtattgatgttttcagaattgatcgagtaataagcacctttggcatgccaatgggaccttttcaactccaagatgtggctgggtatggagttgccttggcagtaaaggatatctacgctgatgcctttggagaaagaaatttggactctgaccttgtggatttgatggtaaaggatggacgacaaggaaaggtgaacggcaaaggttactacatttatgagaagggtgggaagccaaagccagatcctagtgttaagcatgttatcgaggagtaccgaaagcacgcaaacacaatgcctggtggaaagcctgttactttaacggatcaagatattttggagatgattttcttcccagttgtgaatgaggcatgcagggttatggatgaaaatgttgtaattcgagcttctgatcttgatattgcttctgttcttggaatgggctttcctaaatacaggggtggtcttgtcttctgggctgacactgttggagcaccttacatacattctaagctaagcaagtgggctgaaatttatggccccttcttcaaaccatcatcatatttggaacagcgagctaagagtggtgtaccattgagcgcaccaggagcttcgcagcaaggttcggcgaggtcacgcatgtgaggtgctgtccagcattgagcagaataatgcagaatacttgcgggatgagccattgacggctgcttcgctgatcaaaacacctccgtgaacacaaacatgaggcacagaagaaatgatgaaaaataaagggattgtaacagttttggtgcctttgactgtaactggcagagtttctggggacagagtggcatggattaattgcacctgatcactctgtatgtcgctgtcatgtgtgcaatgttcaatacgtacgtaataaagaatggaaatatatgccgcaatcagtgcgtcgtcttctcgagttaatcgcttgcgccaac

SEQ ID NO: 10318 - DNA, 2431 bp, Zea Mays
cccggctgtcccgtctcgaccaccagcaccagttcagcccatccaccgccaccacctcagacgctcctagtcaccactcgctgtcctcggcttctcctaaaagctcgacgcgatggcgacgctggtgcggccgcccgcgctgcacgtccgcgccgtgagcggcggcgggaacaaggacagggtggcgccgcagcggccttggtggggcgggaacaagcccatctcaccgcgccagtcgggcgggagcggggcgcgaggaggcgcgggcggcggcggcgtcgcgctggaccaggtgctaggtgtgctccgccgcgacggcgaattcgtccaggccgccgtcggcgccccgctccgcgacgtcttctggctccgcttccttgagaagaagcagcggaagcagcagcagccgagacctaagcacaagcctttccggcagcagcaggaagaggaggaggtggtagtggtggacgagtcgcccccggccttcccgcccccctcgtacccgtcagggttgtcgtgcgtggagctaatggcggccgacttccaggccctcaaggtgtacgccggtagcgcgcggcactctctcgcgcgccgattcctcggtagcaatagcaagggaaagtctgaacagcaacctaaacccaaaccccaggagcagcagaaagagcagcaacatatacttcaggccccagccttccctccgccctcctacccaccaggattatcctgtatggagttgatgatggctgaccttgaagccctgaaactgtacatcaactactattcggccatcctgactacgccgctcccccagcattatgatcctgacctccttgcccagtacttcgcctcacgtccgcatatccttgcctctcgcgtcattcagatactcttcacatttctctcagctgtggtgaagatgcggatttcaaaaagagctcagttaaccacagatgctacctatagtagtggtaacagcggcaacgggtttgatgatactcaatatatggtcggccaacttctcaaggagacatttcttaaccttgggcctacttttattaaagttggacaatcactttctacaagacctgatatcataggttcagagatttgtgaggttaggcccttgctgagttgcatgaaagggttcctactttcccaagagaggatgcaatgaagatcattgagggagaatttgggtgccctgtgtcgcatatgttcagttatgtttcagatgagcctgtagcatctgcttcctttggacaggtctaccaggggcgcacagttgatggttctcttgttgcaataaaggttcagcggccagaccttctaccttctgtactgagagacatctatattctacgccttgggcttgctttcatacggaagatagccaagcgaagaagtaacatttctctttatggtgatgagttgggtagaggtttcgtcggcgagttggactacaatattgaagctgctaatgctaccaaatttatggaggttcattccagatatcctttcatgctagttcctaaggttcttaaacaacttactcgaaagagggttttaacaatggagtgggtggctggtgagaaccccaaggatttgctttctttgtctaaaggagtttctgaaaaatttactcaagcttcagataatcagaagttggaagcaaaatctcgccttcttgacctggtcaataaaggtgtagaggcatcgctagtgcagcttcttgagacaggcttgttgcatgctgatcctcatcctggtaacttgcgttatactcctgaaggccgtgttgggtttctagattttggtttgctgtgcatgatggagaggaaacatcagcgtgctatgcttgcaagcatagtgcacatagtaaatggtgattgggcttccgtcgtttatgatttgactgaaatggatgtagttccaccaaaaaccaatctacgtcgtgtgacaatggtgcttggaaaaatttggtctgtggcatttaaatatcacttccgtatgccaccttactacacacttgttctccggtcacttgcctctttggaaggactagccgtggcagcagatgggactttcaaaacatttcaagcagcatacccatatgttgttcggaagcttctgtccgaaaattcacttgaaacaagaagactcttgaatcaggcaatttttaacaaaaggaaagagttccaatggcagaagattgacgcgtttctaaaattggcttcagcaaggatgatatgcatgtgccaactgctaaccgtacttggcaagcaaacagacagttctttgtaatacttacatgcccactcatgggaggaggacccagtatggcgatgtatggcgcttgccataccttgattcttccatgagcaatcctagaaaatcgctgaccggctgctctcctccgatgtccgccata

SEQ ID NO: 10319 - DNA, 3136 bp, Zea Mays
gatccagtgccatcatatgatagataacagtagcagtgagaacaaattgcacctgggtagctctgccagcatgggtcatcaggtattcaggtcagctttccaagccggtaagaggtcagccaccttgtcaatgagaggtcattactctaaaatgctgccctctccatttatgtttcccatcatttaatcaattgaaagtgtgactggtgtccgctgttctaaagttctgtagccaaagtttgtcatgtcctcaatggatgctttaacaagacacaattcacaaaattcgctacaatgccttgtgtcacttcttcaactttgatgttccagtaagttcagatgtctttcactcgttttagctggataagctaacagccattatttgacttgttttgaaggatggcccgctaaagattagagcaacatgtactggaccatcatcaacaatagctaagatagtccgcatggttgaggatgcccaagcacgtgaagctcctgttcaaaggctcgcagattccatcgcaggaccatttgtgtatactgttatgacgttggctgcaacaaccttttccttctggtattacattggcacacacttatttcctgaggttcttctgaatgatattgctggtccggatggggattcattacttttgagtataaagcttgctgtggatgtattagttgtttcctgtccttgtgcacttggattagctacacctacagctatcttaataggaacttccctaggtgctaaaagagggttactggttagaggaggtgatgttttagagcgtttggctggaatagatactcttgtgcttgataaaacagggacgcttacagaaggaaaaccagtagtgacttctattgcttctctggcatatgaggagacagaggtccttcgtcttgctgctgcagtggagaaaacagcattgcacccaattgcaaatgctataatgaacaaggctgaactactcaagttggatattccgatcacaagtggtcagcttacatcgcctggatttggttgtttggctgaagtagatgggagtttagttgcagtgggcactttggattgggtgcatgatcgttttgaaactaaagcatcgccaactgaactgagagaccttagaaaccggctggagtttatgttgtcaagtgaagcatcatcatcaaaccagtcgaagtcaattgcttatgttggccgtgagggagaaggaattataggtgctattgctatatcagatattttacgagaagatgcaaacttaactgtggagaggttgcagcaggaaagcattacaacgttcctgctgtcaggggataggggagaagcagtgacaagcattgggaggaccattggaatcaggaatgaaaacataaagtcttccctgactccgcaagacaaagcaagcattatatcaactttgcaagcgaagggacacagagttgcaatggttggtgatggaataaacgatgccccgtctttagcagccgcagatgttggaatagccatgcgaactcattcaaaagagaacgctgcctctgatgcagcttcagttgttctactaggcaacagactttctcaggtggtagatgcgctatccctgtcgaaggcaacgatggcaaaagttcaccaaaatttggcctgggcagtggcatataacatagtagccattccaattgccgctggagtgctgctgccacaatatgatttcgccatgacaccatctctctcaggggggttgatggcccttagctcaatctttgttgtcagcaattctttgcttctgcagctgcatgggtcgtttcagaacacagaaaaacggcagggtgatctgagctcaagattaaactgaattgttgggtttagtttgacccagccgaaggacagtggtattgaattatagagggttctgatactggttttccagctccggctaattgaactgagtcagaactataagtagcaagctattcgtgtcagtagtagcatgttcctgtactgtttgtcaacccaactatagtagcaagtatgacccagaaggacaataatctaccacggccttcaaaaacattgtaaattagtaatggtactgctgtaagcctgtaaacaaagttaaggcgtatgactatcgttcatggtctagcaatgtgcaacaagctataagcttcatttcacacaggtatgggaagttcagtcaacagaactagtcgaatagcaagcagtacacatagcaactatggccacactataatggcaatcatacccctgaacaatagcatagctaggagattactggcgattcttctacttctacttctacttccatgtgttggttgttctaggcttctagcactcttcgtatccatcgttgttggcccagtgcaccttcttgccgctgctgctccgcatcaccttctcgtcgacggccttcaccccggcctccgcagctgccgccgactcggcctgcacacgcgccatcttcctccctcgctttctcgccgcggccgccttctccgtctcggcctcctggtactccctcgcccaacgccggctcagcacgcatgttgcagctagcgcgacggcctgcgccatgaacatggccagcagcagtagctcctcgaggaacgccagcacgaactgctcccggcgatccctggcggagccgaggaggcggaggctgtggtcgtggcggaggaagaaggccagggaggccagtgcgtggccggacagcgcggcgagcgcgagcgccgtgctcgcggcgaggcagaggtgggtgagctgcgcgtggagcgctgcgagtgcggagagcagggtggtggcgtgcacggagacgagcgcccagccgaagggcgtcggccgcgggcggaggaggaagaccgggccgagcgcggcggcggcgaggacgaggagggagaggttgaggagccagaccagtaggttgggaagagaggagcatctccgtaggctcgagttctcggtggcggacgccattgctttactgggtgcttgtgttctcagtgcgacagtgatcgtgtgagtctgatctgttgctgaatgctgagttcagaggagcggggaagtgcgtggcgcgtggggtaaggtttatacagagtgggaagactgacc

SEQ ID NO: 10320 - DNA, 3488 bp, Zea Mays
gggggctggggagagcgcgcgcaagtggagggagatggcggccaggaaggaggaactcctggtgcggagccggggccgagtcgcgttcgcgtggacgctcgtcgcgctctgctgcggctcgcacgcgtcccacatcctgcactcgctcggtatccatgtcggccacggaacgtttttggatctgttgcataatccttatgtgaaatgtggcattgctacaactgctttgtttgggcctggaagagatatactctttgatggttttagagcattcaagcaaggttccccgaacatgaactctctagtaggatttggatctgcagctgcatttactatcagtgctgtgtccttgctgaaccctgactgggagtggaattcaaccttttttgatgaaccgcatgcaggtcatgcttcttggatttgtacttcttggacgatctcttgaagaaagtgcaaggcttaaggcatccagcgatatgaatgagctcatttcactgttatcacctcagtcgaggttaattgttacttcctcaagtgacaacccttctgcggacagtagtttgaattctgatgcgatcacagtcgaggttcctgttgatgatgtccgtgttggagactcaatattggtcctgccgggagagactatacctgtagatggtaatgtcattgaaggatcaagttttgttgacgaatcaatgcttactggagagtccttgcctgtagccaaggagactgggcttcctgtattttcaggaactgtgaactgggatggcccgctaaagattagagcaacatgtactggaccatcatcaacaatagctaagatagtccgcatggttgaggatgcccaagcacgtgaagctcctgttcaaaggctcgcagattccatcgcaggaccatttgtgtatactgttatgacgttggctgcaacaaccttttccttctggttgtttcctgtccttgtgcacttggattagctacacctacagctatcttaataggaacttccctaggtgctaaaagagggttactggttagaggaggtgatgttttagagcgtttggctggaatagatactcttgtgcttgataaagtgcgtgtttcttttatcattttttcatggtaaagtactattcccattgttgcgtttttttcattagaaacaatgtattccgattctagacagggacgcttacagaaggaaaaccagtagtgacttctattgcttctctggcatatgaggagacagaggtccttcgtcttgctgctgcagtggagaaaacagcattgcacccaattgcaaatgctataatgaacaaggctgaactactcaagttggatattccgatcacaagtggtcagcttacatcgcctggatttggttgtttggctgaagtagatgggagtttagttgcagtgggcactttggattgggtgcatgatcgttttgaaactaaagcatcgccaactgaactgagagaccttagaaaccggctggagtttatgttgtcaagtgaagcatcatcatcaaaccagtcgaagtcaattgcttatgttggccgtgagggagaaggaattataggtgctattgctatatcagatattttacgagaagatgcaaacttaactgtggagaggttgcagcaggaaagcattacaacgttcctgctgtcaggggataggggagaagcagtgacaagcattgggaggaccattggaatcaggaatgaaaacataaagtcttccctgactccgcaagacaaagcaagcattatatcaactttgcaagcgaagggacacagagttgcaatggttggtgatggaataaacgatgccccgtctttagcagccgcagatgttggaatagccatgcgaactcattcaaaagagaacgctgcctctgatgcagcttcagttgttctactaggcaacagactttctcaggtggtagatgcgctatccctgtcgaaggcaacgatggcaaaagttcaccaaaatttggcctgggcagtggcatataacatagtagccattccaattgccgctggagtgctgctgccacaatatgatttcgccatgacaccatctctctcaggggggttgatggcccttagctcaatctttgttgtcagcaattctttgcttctgcagctgcatgggtcgtttcagaacacagaaaaacggcagggtgatctgagctcaagattaaactgaattgttgggtttagtttgacccagccgaaggacagtggtattgaattatagagggttctgatactggttttccagctccggctaattgaactgagtcagaactataagtagcaagctattcgtgtcagtagtagcatgttcctgtactgtttgtcaacccaactatagtagcaagtatgacccagaaggacaataatctaccacggccttcaaaaacattgtaaattagtaatggtactgctgtaagcctgtaaacaaagttaaggcgtatgactatcgttcatggtctagcaatgtgcaacaagctataagcttcatttcacacaggtatgggaagttcagtcaacagaactagtcgaatagcaagcagtacacatagcaactatggccacactataatggcaatcatacccctgaacaatagcatagctaggagattactggcgattcttctacttctacttctacttccatgtgttggttgttctaggcttctagcactcttcgtatccatcgttgttggcccagtgcaccttcttgccgctgctgctccgcatcaccttctcgtcgacggccttcaccccggcctccgcagctgccgccgactcggcctgcacacgcgccatcttcctccctcgctttctcgccgcggccgccttctccgtctcggcctcctggtactccctcgcccaacgccggctcagcacgcatgttgcagctagcgcgacggcctgcgccatgaacatggccagcagcagtagctcctcgaggaacgccagcacgaactgctcccggcgatccctggcggagccgaggaggcggaggctgtggtcgtggcggaggaagaaggccagggaggccagtgcgtggccggacagcgcggcgagcgcgagcgccgtgctcgcggcgaggcagaggtgggtgagctgcgcgtggagcgctgcgagtgcggagagcagggtggtggcgtgcacggagacgagcgcccagccgaagggcgtcggccgcgggcggaggaggaagaccgggccgagcgcggcggcggcgaggacgaggagggagaggttgaggagccagaccagtaggttgggaagagaggagcatctccgtaggctcgagttctcggtggcggacgccattgctttactgggtgcttgtgttctcagtgcgacagtgatcgtgtgagtctgatctgttgctgaatgctgagttcagaggagcggggaagtgcgtggcgcgtggggtaaggtttatacagagtgggaagactgacc

SEQ ID NO: 10321 - DNA, 2224 bp, Zea Mays
aactacagctacgctgattcaacgaatgcatactggactgggtactttacgagccgtccaactttcaagcgatatgttcgagtacacagcggatactacttggctgcacgtcagatagagtttttggtgggcggtaggagctccttgggattgttcacttccagcttggaagatgcgatggggattgcccagcatcacgatgcagtctcaggtactgcgaaacagcacacgactgatgactacgcgaaacggcttgcgctgggagcagcaaaggttgaaaaaggtgtaaacaccgctctggcttgtctgaccagctccaacgggacatgtggatcctctgttgtaaaatttagtcagtgttcacttctcaatataagctactgcccttcgaccgaggaagcaatttcatcaacaaagcgtttagttgtagttgtttacaatcctcttggatgggaacgtagtgacttcataagagttcctgtcaatgatcaaaacctagttgtaaaaggctctgatggaaatattgttgagtcacagctagttgaggttgataatgtgacgagaaatttaagaaagttttatgtgaaggcttatcttggaatcacaacacacaaggcccctaagtattggctactatttcaagcttctgtaccaccaatgggctggaattcctacttcatttcaaaatcaactggagcaggatacaacagtactgagcatgtctcggacgtggtttccccaagtaacagcacgattgaagttggaccaggacatctaaagatgtccttctcaaaagcatctggacaactcaataggatattcaattccatctcaggagtggatttaccagttcaacaaagctttctttggtacagatcaagtgagggtgatgcctcagactcacaggcatctggagcatatatatttcgaccagatggtaatacaccgactacggtttcatcctcggtgccactgaaagttatccgtggaccactggttgacgaagtgcatcagcaattcagctcatggatttatcagataacacgactctacaaaaacaaggagcatgctgaagttgaatacacgggaaggaggtcatcacacggctgacagcaaatatggtcacaaacagtacgttttatacagactccaatggaagggatttcctcaaaagggtgagaaactacagggaggactggaatcttcaagtaactcaaccagttgcaggaaattactatccggtgaacctaggagtgtatgtagcagatgaaaaatatgagctatctgtgcttgtggaccgtgctgtcggagcatcaagcattcaggatggtcagctagagattatgctacacaggcgtttacttaaggatgatggcaggggtgtcggagagccacttgacgaggtggtttgcgtggatcaagattgccaagggcttacggccaggggcaattactacgtcaatgtcgagaagctagggcatggagctcactggcgacgtacatatggccagcaagtctactcaccctttctccttgctttcactcatgaggatgagaccagctcgaaatcctacagcgtggccaaagctggtatgatgaatgccaactacagccttcctgataatgtcgccattgttactttgcagaatctagatgatggtaccacactactccgcttggcccatctctttcaagctgctgaggacccgagatattccaaggtggcaaaggttgatctgaaaaaggtgttcggaaagagaactatcaaggaattgacggagactagcctctccgcgaaccaaaagaagtcagacatgaagaagctcagctggagggtcattgggaacactgaaactggtcctgccgcagtaaaaggtggcccagttgacagtagggctctagtcgttgaactaggacccatggagatacgcaccttcttgctgaaattttagtggcagttgttcttttgtttgtaaacaaacaatagtccatagagtaatttctaccttttcattaacgtgcccaaatcttagttcaaataggatcaaatacttgggcaatggaggtgcacacccacaccaagtttgttcatgtaataatagctacatgtcgggaaaaaaaaaaggaacggttgtggtgcttttcattgtgtaaagcgggtatttcttcctagcggataccgttatctgttgggctgattgggctgatctcgggtctggtttga

SEQ ID NO: 10322 - DNA, 1560 bp, Zea Mays
cagctgaacgcctgaacccaatcctaaggagtagccatttcccccactcttcccgccaccatggccgccgccgctatctctttgccccgctctccctctctccttcaacccacgcgccggcgctcagcgccaccagcctgcacgcagtccgagcgcggcgtctccttcgaccccggctccgccttctaccgcagcgacagcgccgcgggtcgtgacctcgccgtcctcgcagccactctccaccgccgccgtggccgtcccgacccttccgccccattcctctgcctcgatgctatgtgcggctgtggcgtccgcgcgctccgctacctcgcgcaggccggcgccgacttcgtctgggccaacgacgcctccgaggcgcttcgccccatcatccttgccaacctctgtcgctttgagcggggctcgccggaagcggtggcggggtgcaggaggtgggtggtgtcgcacaacgacgccacccgtctgctcgcagagcgctacctccggcgcgagtacttcgatgtcatcgacgtcgactcgttcggcggcgacgccgcttacgtgagggcagcgctcttggcgctcaaaattggggggctgctctacctgacgtccacggattggcggtcggcgagaggatatgggtcgagaaggtggcgctgcacgggaagcatctcttttgggatttcacataacacccctattctcgtattttgcgtatcatggtcctatttatcgagtaatggtacaactatgcaacggaaaagatgatggcatcagagttgtggtcagtctcaaacttttggatttgatgagctggggcagatttcttgtggatgtacagacacaacagatgccgattcaatcactgttgtaggcccactttggacaggtcctctccacgatgcctctttccttaccgaaatgctaggcttggccaacgaatggggatgggcatgcacaattgaaaatggtgtctctttggaaaaacttcttggcatgatgattgaagagagtgacccgaggttgcctcctggatatataagacttgatgagatttcgagacgagcaaaagttaactctcccccactcggcaccctcatcaattcattgcggaaggaggggttttctgcttgtagatctcatattagtgcaaatacaatcaagaccaactgttcaatggcttcttgcatcgatgttgcccggggcatccgaaactcaagatgaatatcaattaccaactatatatggtatggctgcgtgtgcccagcgaggctcacgcgagcttggtgcataaggggctgattggttggatgcacagccagctatccaggctagttaagtatatgcaaatctaggtgtttggtttcctgtattgcttcagtagcctgactaaactgtgcaaaagtggcatccaaacttggctctaggcttgttcgttttgctcttaatccatgtggatttggtaggattaagtgggttttaatttcaaacaagataaaatcttttataatttttttccaatctcatccaatacatataagatgggaataaccggac

SEQ ID NO: 10323 - DNA, 1588 bp, Zea Mays
cagctgaacgcctgaacccaatcctaaggagtagccatttcccccactcttcccgccaccatggccgccgccgctatctctttgccccgctctccctctctccttcaacccacgcgccggcgctcagcgccaccagcctgcacgcagtccgagcgcggcgtctccttcgaccccggctccgccttctaccgcagcgacagcgccgcgggtcgtgacctcgccgtcctcgcagccactctccaccgccgccgtggccgtcccgacccttccgccccattcctctgcctcgatgctatgtgcggctgtggcgtccgcgcgctccgctacctcgcgcaggccggcgccgacttcgtctgggccaacgacgcctccgaggcgcttcgccccatcatccttgccaacctctgtcgctttgagcggggctcgccggaagcggtggcggggtgcaggaggtgggtggtgtcgcacaacgacgccacccgtctgctcgcagagcgctacctccggcgcgagtacttcgatgtcatcgacgtcgactcgttcggcggcgacgccgcttacgtgagggcagcgctcttggcgctcaaaattggggggctgctctacctgacgtccacggattggcggtcggcgagaggatatgggtcgagaaggtggcgctgcacgggaagcatctcttttgggatttcacataacacccctattctcgtattttgcgtatcatggtcctatttatcgagtaatggtacaactatgcaacggaaaagatgatggcatcagtaactatggcttcatttgtcattgcaagagttgtggtcagtctcaaacttttggatttgatgagctggggcagatttcttgtggatgtacagacacaacagatgccgattcaatcactgttgtaggcccactttggacaggtcctctccacgatgcctctttccttaccgaaatgctaggcttggccaacgaatggggatgggcatgcacaattgaaaatggtgtctctttggaaaaacttcttggcatgatgattgaagagagtgacccgaggttgcctcctggatatataagacttgatgagatttcgagacgagcaaaagttaactctcccccactcggcaccctcatcaattcattgcggaaggaggggttttctgcttgtagatctcatattagtgcaaatacaatcaagaccaactgttcaatggcttcttgcatcgatgttgcccggggcatccgaaactcaagatgaatatcaattaccaactatatatggtatggctgcgtgtgcccagcgaggctcacgcgagcttggtgcataaggggctgattggttggatgcacagccagctatccaggctagttaagtatatgcaaatctaggtgtttggtttcctgtattgcttcagtagcctgactaaactgtgcaaaagtggcatccaaacttggctctaggcttgttcgttttgctcttaatccatgtggatttggtaggattaagtgggttttaatttcaaacaagataaaatcttttataatttttttccaatctcatccaatacatataagatgggaataaccggac

SEQ ID NO: 10324 - DNA, 294 bp, Zea Mays
gcacaaggcattacagcctgtccacccgattttccgctattgtgtgacattgttctgtcaggacaggggtaacactagaagctccaagttcatttctctataagccaatccgcacgtccgcctttcagtgtccttggatatctcttcaactcacactggatgaggtcataggggaatgggcagagctgctcaactctacatatagcaacatcagtgcgctccgtcttccttctttcttcatccagttcgtagtacacctttccagagcaaagaactagacggttaattccctcc

SEQ ID NO: 10325 - DNA, 722 bp, Zea Mays
cagcctatcacgaccaaaaccgccaaaccctagttgtgcatgcatagcccctcacgccagccgccaacgccccaatcccgtaaccgcagcctcgccctgctcgcatcttcctctccctctcagcgctggtgctcaatctacaggtcgtcccgctccctacacacccgccctccggtgtgaaccttcatgacgtccgcaaccactctccgatctgctgtcgtgacctcatccagccgtgctgtggcagtggatcggagttcgctccagctctgattgaattccactactatatgtgccacttaaagttgttatgtcaaaatattatggtgaaagcgagcgtctattgggatctattttttatcttgcaaatgatcttcctgaaggagacaaatccccacgtccagagttacaagaagatcaagcttggctgtggctgcagctgtgttgcctcctcttgttggaccgaagagagggaggggagaagcagctggcgtgcagacttctactcaggtggtcttttattctctatggggcttctaggatacatcttctccagaagcaccataagtcttgtcttgggcattacaccagggctagccactctgctacttggcactctcagtctgaagttctggaggagcgacagatccagcttcctgcttatcttggctcaggcagaggtgatgctgatgtgcaagcatcttcaccttgagttctgccta

SEQ ID NO: 10326 - DNA, 2439 bp, Zea Mays
cagcatttgacgcttcgttctttcgtgggcggggggaaagcccagctgcgaaactctggccgcgaactctctggcatcgccgtcccggcctcgagccatccacgttccacggtctcgaactcgaagcccagcaccacgcgaccacgagccgcccttctccggcggcgtcgcagtgagcccggcatggccatgctactccgccgccgactcccgctgctccgcctcctccggccgctgcatactggatcgatggcttcgatctcttcgtcctccacacctccccctccccctccccctcctcttcagaaacctcacgccgccttcgtggggccaagatcacgccgcctgcggttccccaatgccgcgcccgttgagtcggggcggggggctgggaaatcatctcccgctgccgcctatctcgctatgggcgcggccgccgccctcgcgtcactgccggtggcctacgcagacagcaatgagcagggagcggtcgacacagtagcgagtgccgatcccgcggttggggaggatttggcccgcaaggagaggaagaggatattggagcttgtccagagccgagggatgcagcgcgggtcatacccgaagtttgatgttgcagtgaagggccagaaggtggttgttaaattcaacatgccatctaattgcaatgtatcacaccttatcgttgatcttgtaacacatattggacttgaggcagaacaacatggtggtggctcagaggttttagtgcgtgcttgggacagtccagctgcacgtcaaatcacactgaaccctcccaagaagactagcactggagatcacaatgaagatggtctctgtgttctgatatttgaaccacttattggatcagattattctgaaattgaattcatcaagcctgggagttttagtttgaaagaacttgaggctttgataagtgctttaaaaatagcctctgaaaaggggtcatcagggaaaaacacaccaagaaaaggaaatggtcaaagatccaagcatttgccctctttggagaaagttgtatctgatttagaggctatgggtgttagagtctatggatttgatgaaacatcaagtgttccaatggatggcactgtaatctgggagaaccttgcaggatatgaacctcagaaaagggaaatagaggatactgtactcttagctttacagagtcctgaagtgtatgatgatattgctcgcggcacgcgctgcaaatttgagacaaatagacctcgcgctgttctttttgagggcccacctgggacaggcaagacatcttcagctcgagttattgccaaacaagcaggaattccactactatatgtgccacttgaagttgttatgtcaaaatattatggcgaaagtgagcgtctattgggatctgttttttcacttgcaaatgatcttcctgaaggaggtattatattcctagatgaggtggattcttttgctattgctcgagacagtgaaattcatgaagctacacgaagaatcttgtcagtaattctgcgacagatcgatgggtttgagcaggatagacgggtggtagtcattgctgcaacaaatagaaaggaggaccttgatccagctctcatcagatcagcaaactcgtgtggaaatagctgcacagtatgccaagcatttgactagatcagaattggttcaattttcattggccactcaagagatgtcaggaagagatatcagggatgtgtgccaacaagctgaaagacactgggcgtcaaagttaataagggggcaggttccaaaagatgagaagggggagccgagtcttcctccaattgacgaatacctttcctgtgctgaacagagacgtaagtccttgcctggtagaacgagccagacatccaggtcccctgcccttaagttagcatgaggaatgtacctaccagtttacctttacatgttcatatatcacatatagtattaccgaatgtagttcagatggaagtatgtaggcggttctaaacagtttttgttatgcgacatatgctaatacttaggaaatgtgacatctatgatctatccaaattttgacgtcagcacacctaaaatttttggagaggaaagcttaagtgacagatacatggatttcttgtgttgttttttctaaactaacgtacagagattatcaacgtacaagtgaatatcatgtttgagtgccagtttcatctcttaagatgaacatttggtacaaatttgtattgcccaagcaactctgaagctagtaattttgacatactgtgtttttctggtcaaattttgtagtcatcgctcatatgtctttatttatagttttgtacatattagattggatataaagatgatagctatggacatgtctcgagaagtaattcctggtgatcatcttaatttggagacttgtgagttgcaaaaggt

SEQ ID NO: 10327 - DNA, 735 bp, Zea Mays
atgactgatgtggttatttttctctgtattatgcacagaatctcggtaacatttgttaacaaggatggctcagaaaagacaatacgtgttccagttggaatgtccatgttagaagctgctcatgaaaatgacatagagcttgaaggagcatgtgagggttcacttgcgtgttctacttgtcatgtaatagtaatggatgtaaactactataacaaattagaagatccagcagatgaagaaaatgatatgcttgaccttgcatttgggctcacagagacgtaagtcaagacccttcgaacagaatctcgcctcggctgccaagtgatcgcgaagcctgaactcgatggtattcggctggcattacctgtagccacaagaaacttcgcggtagatggctatgtaccgaaaccacactgaagacagttatgtacaccacactgaagacagttatgtacaccacactgaggcagtcatcttggggggcacggattcgtacaagtcaattttgtagtttataacctgtataacctaactacacctttgctacttgtagtcggggtagcttaggactaccttgttgagggagggttcgttcattgatgaacccctccattactcccagataacagtgcttccttcatctgggcgaataaacatctttcgttttgtgcgagagtatgtagtgtactcagaaatatttgcattgtagtgctcccaatatttgatcttttgcta

SEQ ID NO: 10328 - DNA, 2104 bp, Zea Mays
aacccacttcagcaggatgccaggatcactcccactcggcggctccccctttgccccgtgaggccgtgactcggcgacggagaagacaaaccatgacgcctcccggccaactgctccccttgtcccggctgcctcccggcctctccagccgctgcccgcctcccgctcatgcccaagccagagtgtcgcttctgcatccatgggcccaccgcctccatggccgcttcatgccttctcctcatctgttccggtctccagcctgcccccctcgtgctccaacgcctccagggctttcggccgccgcaggaggcgaggctcaggcggctgcggtggcggagttcgtgacgtcggagagggtcaaggtggcggcgatgctggggctagccctcgcgctctgcaacgccgaccgcgtcgtcatgtccgtcgccatcgtccctctctcgcaggcgtacgggtggaccccgtcattcgccggcgtcgtacagtcatcctttctttggggatatctgatgtcgccgataattggtggagcacttgttgattactacggtggaaaacgagtcatggcttacggtgtagcattatggtccttggctacgttcctgtctccatgggcagctggtcgatctatctggttgtttctctttaccagagtcctgctgggtattgcagaaggagtggcactcccaagcatgaacaacatggtgttgaggtggtttcctcgcacagagagatctagtgctgtgggtattgcaatggctggctttcagcttggcaataccattgggttacttctttccccaattatcatgtcacgaactggaatatttggaccttttgtgatatttggattatttggatttctctgggtgttggtgtggataccggctatatctggcacgccaggtgaacatgcacagatatcagcatatgaactgaagtatataaccaaaggccagaaattggtgaaaccacaaattggaagtgaaaaaacaaaaaaggttccccctttcagtaaactgctttccaaatggccaacatgggctttgatttgtgcaaacgccatgcatagctggggttattttgttatcctttcatggatgccagtctatttcaaaactatatatcatgtcaatttgagagaagcagcttggttcagtgcactcccttgggtgatgatggcagttttaggctatgtggctggtgttgtatcggacatgcttattagaaatgtcaattggctttctggggccaggtattgctttgctctgtctgaatgcagcaaagagtccaatcattgcttcagcctggcttacagttgctgttggattgaaatccttcggccactcaggtttcttagtaaatctacaggagattgccccacaatatgctggagtcctacatggaatgtcaaatacagctgggacatttgctgccattctaggaactattggagcagggttttttgttgataggatgggttctttccgtggatttttgatattgacgtcgctcttatacttcagcagtgctcttttctgggacatctttgctactggagagcgtgttgattttgatggcactggctagcaactcagaggaactctgcggttttctgtccttaaaacacataatgttgattcaggacagtgtttttaccgccaaccatcaagaagttatttgcacctgaagataaacaacttcagttacgactgtacagtattgggttcaactttttaaagcacgcagtgagtttatcttggatgtcgagtatcagtgatagataaacacacgctgtgagtttatcttggaagttgaatatcagtgatggataaacacatggaactgtctttatagatcgttttagattttcttggagggatagtccctgacgatgtaacatggaataaacaacgggcaggatgccaaccattaatggcgccgaaagtagtacataactgaaactgatttgcagggtagttaggaaattggaatcccaaccattaagggagtatgggtttgaaaaacatgtgaatctggtgtacatgctacggaaagttgtgccctcgttggctcgttataacttgcaacttttttactgtcc

SEQ ID NO: 10329 - DNA, 2274 bp, Zea Mays
cccgtttccccccttccccttccgcttcgccattccttctcggtcagaacgacgcgcatccccgcccgcacgttcccgtgctctcgcttctccggaggcgaccagggttgggacttgggaggctagcgagaaggtgctacccgggccaactcctccgatcgcccgcaggagaaggggatctctccgcctccccgccctcgtcgggcctttcccatcgccacccgcgaggccacgcgctccagctcttgtgaaccggaagggttctggatttctgagccaagcgaccagcacggtggctcggccgggctgacactcccctcccctgtcgcccggtctcttccttcccgagcagaactcccctgcgtcttgccgcttctagcatcggggagaaaaattatagaggaaggatatgcgggatccatttgatgcaccggttgatctcattaacccggaccataatggtgggaacaaactttctaggactggtgcagtgtctgctggggactatggtttacaaaatggacccaaatcctttgccccaaactccgacaccctagtcaggcatcaagtccaggttgcatccttgcacaaagacttagttttggaagatcccaatactcgtatcatggatcctgagaccaaggaactttactttagatcacaatcacaaggggacgagatcttgttgcttcgcaagaaaattgctgaggcatctctcaagttatttcattgcggcaggagctgagattactgggtgaaaaacatattctggagaggaggctcacagacttgaggatggctgttgacgagaagcaggaagaagctatatctggtgctttgcaacaattgaaccagaagaaaacccatcttgaggacaatatgagactggcaaatgaactaaaagttgaggaagaagagctatacttttttacttcttcattgcttagcatgctagcagaatacaatattcgcccacctcaaataaatgcttccatcattacaactgttacaaagcgtttgtaccaacagatgcatttgaagctcagatctttaaatgacaatttaggtgatatgactcaacctggaaatatatataatcccaatcttcagcaagtaaccctatcaagaaatgaaccttccccatcttataatttggattcaaataggaacactcttcaacagtatgctcaaggtccaagtgaccgacatatggatcaaatggatactggcggtactactccctctaattattttgagggagacagaagagtagatggtgactcacagttataccaacctgatggtgacgctttacctggtattgaggggtttcaaattgctggtgaacctagaccaggatttcaattaacagcatgcggttttcctactaatggtactaccctttgcaatttccagtgggttcgccatcttgaaaatggtaccagacagtctatcgaaggtgccacgatgtatgactatgtggtcactgcagatgatgttggtacttttcttgctgtagactgtacacctatggatgataatggccgccagggtgatttggtgacagaatttgctaacaatgggaataagataacctgtgatccagagatgcagagtcatattgatgcatatatttctaatgggagagctgaatttgaagtttttgtcctgcaggcttattctcctgaggagtgggaattggctacattggtgctaacacgacctaactatcagattaagttcaaaaagaccggtgaagctataattgatgagaagtactcacaaagtctacagatgaaaattccaaatgggcgcacaactcaatttgttttagtaactgcgggtgcaactctcccatttaacacacagggaatatcagagccaaacaatgaggattacgatgttaggttacgcgatctaatcgtattagtcatgagaactttccagaaaaaggctttagatgccaaaaggaaagtcaacacttagaatccatgttgatctgttacaaaagattctatgtaaaaccgtagaaaattttcctatttttgattgttttgtgcagtattcgatgatttttgttcttgagatggaatgagctctcgatcaaagttttgctaggtgctagacggaatctaggcgatgacccttagcctagggactagtccaagcctaggcgatgctagacgttttgccaacttatataatatatacatttatagataaaaaagagggaaggaccagtagacataccttttgtccttgcagatctgctaa

SEQ ID NO: 10330 - DNA, 2305 bp, Zea Mays
ttcctcctcccgtcctccggtcctcccgtttccccccttccccttccgcttcgccattccttctcggtcagaacgacgcgcatccccgcccgcacgttcccgtgctctcgcttctccggaggcgaccagggttgggacttgggaggctagcgagaaggtgctacccgggccaactcctccgatcgcccgcaggagaaggggatctctccgcctccccgccctcgtcgggcctttcccatcgccacccgcgaggccacgcgctccagctcttgtgaaccggaagggttctggatttctgagccaagcgaccagcacggtggctcggccgggctgacactcccctcccctgtcgcccggtctcttccttcccgagcagaactcccctgcgtcttgccgcttctagcatcggggagaaaaattatagaggaaggatatgcgggatccatttgatgcaccggttgatctcattaacccggaccataatggtgggaacaaactttctaggactggtgcagtgtctgctggggactatggtttacaaaatggacccaaatcctttgccccaaactccgacaccctagtcaggcatcaagtccaggttgcatccttgcacaaagacttagttttggaagatcccaatactcgtatcatggatcctgagaccaaggaactttactttagatcacaatcacaaggggacgagatcttgttgcttcgcaagaaaattgctgaggcatctctcaaggagctgagattactgggtgaaaaacatattctggagaggaggctcacagacttgaggatggctgttgacgagaagcaggaagaagctatatctggtgctttgcaacaattgaaccagaagaaaacccatcttgaggacaatatgagactggcaaatgaactaaaagttgaggaagaagagctatacttttttacttcttcattgcttagcatgctagcagaatacaatattcgcccacctcaaataaatgcttccatcattacaactgttacaaagcgtttgtaccaacagatgcatttgaagctcagatctttaaatgacaatttaggtgatatgactcaacctggaaatatatataatcccaatcttcagcaagtaaccctatcaagaaatgaaccttccccatcttataatttggattcaaataggaacactcttcaacagtatgctcaaggtccaagtgaccgacatatggatcaaatgtaccatggatccaattttcagcaggatactggcggtactactccctctaattattttgagggagacagaagagtagatggtgactcacagttataccaacctgatggtgacgctttacctggtattgaggggtttcaaattgctggtgaacctagaccaggatttcaattaacagcatgcggttttcctactaatggtactaccctttgcaatttccagtgggttcgccatcttgaaaatggtaccagacagtctatcgaaggtgccacgatgtatgactatgtggtcactgcagatgatgttggtacttttcttgctgtagactgtacacctatggatgataatggccgccagggtgatttggtgacagaatttgctaacaatgggaataagataacctgtgatccagagatgcagagtcatattgatgcatatatttctaatgggagagctgaatttgaagtttttgtcctgcaggcttattctcctgaggagtgggaattggctacattggtgctaacacgacctaactatcagattaagttcaaaaagaccggtgaagctataattgatgagaagtactcacaaagtctacagatgaaaattccaaatgggcgcacaactcaatttgttttagtaactgcgggtgcaactctcccatttaacacacagggaatatcagagccaaacaatgaggattacgatgttaggttacgcgatctaatcgtattagtcatgagaactttccagaaaaaggctttagatgccaaaaggaaagtcaacacttagaatccatgttgatctgttacaaaagattctatgtaaaaccgtagaaaattttcctatttttgattgttttgtgcagtattcgatgatttttgttcttgagatggaatgagctctcgatcaaagttttgctaggtgctagacggaatctaggcgatgacccttagcctagggactagtccaagcctaggcgatgctagacgttttgccaacttatataatatatacatttatagataaaaaagagggaaggaccagtagacataccttttgtccttgcagatctgctaa

SEQ ID NO: 10331 - DNA, 1085 bp, Zea Mays
agggcagcgtccagggggcactctgcaaagcgcgcgaccggacggcccggttcgttctcgacctctcgtctcgctcatccgcccgcccccgaggaaggaaccctagcctagccttgctccgaccggtcgccgcggcgactgcgacgatgatggactgcgctggaggccgagaccccgtggaggacttcctcctcggcggcgccggcgccggcgacgacggagatctcgtcgccgtcttctgcgacgacggagggggtagagatgaaccatgttcatctggcccaacatccaaagcttgccgtgaaaaaatgaggagggacaagctgaatgacaggttcctggaattaagttcaattatgaatcctggtaaggaagcaaagttagataaagcaaatatattgagtgatgcagcccgtatggtggcacaacttagaggtgaggcagaaaagcttaaggaatcaaatgagaagttgcgggagaatatcaaggatctgaaggaggagaagaacgagctccgtgaagagaaagtgagactaaaggtagaaaaggataggctggagcagcaagtcaaagctatgagtgtagctcctacaggatatgtcccccatctccctcatccagcttcataccatcctgctgcgttcactccatttgcgccgccacagcaagctccagccaacaaaagtgctccaatcccagcaccgttccctgggatggcgatgtggcagtggttgcctccgaccatcgtggacacaactcaagatccaaagctctggcccccaaatgcttaggggcagctaccttggaatgttgactcattgtgccttttcatgcatttggtgggcaaatcagtgtcagttaggtccctggagactggagaggaatcaagttcgcaactcgcgccatgtttatgctgtaacagctggtttccagcactacttatgaacttactttgttctactgaagggtggtgcctgtaattaatatatggatcttaaccctctagttggcatgtatatcatttgttctattcgagagctgaattttaaggaccattattgaagtcatgagtgcagtaaaaaaaa

SEQ ID NO: 10332 - DNA, 904 bp, Zea Mays
gcaaatatgtgttcgtcctgctgtcgtgctacaagtcgcgctaggccgctggcccattgcacacacggcccaaaatagtcttgcaaagtccaaggaaacgacgggttcacagccgctgcgctcaattgaccctcccctcgccggcgtccggcgatcgccggcatccgagcgatggatcacccatccacgtgatggatccgacagctccttccccggccccccctgcgggcgatggggcacagccatcggaccagaaccggcagcgaccaaggtctgcactccgtggcgccctcggggtggccttccccatcgcggtatcgttcctcttctccttcctcgttgggctcgctgggctcgcgcttggtggcctctcgtccaccgcatcggtctccatgccctccacctgccgcatcctctccagtggcgttgaccttaggtcatcaaaagtttgcgagcttgggttattgaactatagagctaagcatgtcttctacccatcgagtaagaggagattccgctgccatgatgactactactgggcttcagttttacaggttgaatacacagaatatttttctggccaattatcttatgcagtggccgaggccccgaaagaggctcttcctcataattgtcggcctgattttggtgctgcatggtcaacaacattaaagttcaaggtcaatgaatcatacagctgcagatatatgctaggtagtaacaaggctgatattcactcgaacaagctattcaattgtactgctgaggaaccttcgactggggagctgttcaaaaggatacttatactcatcatgcagacttcgatatatgccacgatttgcatggtttcatcattgaagagcacgtgtcaaacctgccggtagaagttccctcgtacattgtc

SEQ ID NO: 10333 - DNA, 1595 bp, Zea Mays
cacagtccaccgttccctcgctgagcaagttgagcccaaccctagcagcaccccgcgctgaacccatcaccgtcaggccatcaccatgcgaggcatcggcgccgccgccgccgccaggcggcacactccattcctctcctcccgcgctctcgccttctcctcctcttctagaagcgggggcggtgatggcggtttcgggcacgggcgcggacgcggcctgccgaccgccgggcagccgcgcgctcccgggaggcccatttccaacgacgatgacgcggatccccactgcccccaccgccaccccctgaggacgcttcaaagcagccgaccttcaccaagggcttcgacaacgctcctcagcgctcctatccggagccgccgagcctcgatgcttcctcctccgcgccgccgctgccccgcccgctcccgatctccggcgccggccgcggggtcccctggacgcagcagccttcgccggataagcctccggaagagaacaggttcatccggcgccgcgaggcggtgaaacagtctgccgccgagccgccgaaacaggctcccggggcgcagcaaccgaagttgtcgccacaagaagctgtgagacgggcggttgaactcctgggcggcgggggccgcagcggcgaagatggcggagggcgtggtggtgggggtcgcctctcccgtggccgtggccgtggcacaggccgcggcaggcgtcccgggcgtggcgaccgctctgatgatgtggaagacgtctggcaagcgagctacttgggggacaaagctgatggcgataggctagagcagcagctcggcgaggacaagatgaagattctggagcaggcgttcatggaggcagcagataatgcgttgccacatccaatggaagatgcttacctcgaggcttgtcacacaaacaacatgatcgagtttgagccggagtaccatgtgaattttggtaatcctgatattgatgagaaaccaccaatgtcgttggaggagatgcttcagaaggtgaagccatttgtagttgcatatgagggcatccagaaccaggaagaatgggaggaagctgtgaaagatgtaatggctagagccccccatatgaaagagctcatagatatgtacagtggacctgatgttgtgactgcaaaacaacaagaagaggagttgcaaagagttgcaaacactcttccagaaagcatcccttcttcagtaaagcggtttactgacaaaactctactctctcttaagaacaatcctggctggggttttgacaagaaatgccaattcatggacaagtacgctcgcatagtttcagagcaatacaagtagaaaggcatcttataccctgttgtagtaaccatattatttgtcctccaaggagacaagtacgctttgttttgagagaaggtgagatgcccatatctaatccgtgcaatgtttttttatttatttcactgagatgctagtttgataaataaaattggtgacaaacatgtttctttttttcatcatatgaagcaccaattccttgctcgggcttactgaagtgcttgtcgctattttttttttttttttagggagggagggag

SEQ ID NO: 10334 - DNA, 1930 bp, Zea Mays
atggtggctcgagagattgctccatgcagagcgaggaactgctcgacagcctgctgtgggttctgctcctccgccgacgagctcacctccgcgtacgagctgaaacatcgaacgatgctctctgccgcagaagcttcttgcatggcttcaacagcagccatttgtgctgcatccctgtacttcagaagctccttccctagtttaacgagtgatggaggaagcgttgtccacgaagcgctagcatctgtcagtttcctgttacttgcagcaaccttcactagattagtgacattcgggttatttaaaacccctgatgtcctccttataggagaagaaagcttgttgttcacaactttgtcggaatcgtctgcaggagcactcgctgagctcttcctgggtggagtcagaatcttactgtcatccttattcgatggtttctcttctgctaatgattttcgtctgggagtcgaagagcttcgattttcagacttcttttcagctttggcaggctttgaatccgaattgcctttgtcctttgcatctgctttcccttcccagcttcttctcaaggccttgggcccagattcgaagctcaacaaggtgttactaatggagttacccagggaggacttcctccctgccgtagtggccttcaacacagacgcagccttttctagcaaggacagccttgacggcggcgatttctctgctcctttggttctcactctctgtttcatgtcactcgagaatttatcgaacgacgcaggcagagaatgggcgctggtcggggaagacggcgtcgacctagcgctggttgattttgccttcgagctaaccacgtccttcttgtccgagaggaggccattgagcgcctgtttcgagaggttggagttcgacttgggcaccggcatccttggaactaccattggtggaggaggcttgggcggccttgccgctgccaagaagaaaagtggaggagctggtcaccacaagatcctccgggctgccgacgcaggcatggcggcccgggaccggcctgacccccctgaggatcggcaccggggtggctgcctcgagacggtcgacatggacgaactgccccagctggatgacgtcgctgaggatgaggtcgtgctgctcgtccggcagcgacacgtaggtggcgtgcgacgagtcggacaccttgaggagcttgaggaggaccccgggtaccagcgacgccatcgctgcagctcctagcgccgcatttacctgcgcagtgttgagccctggttcagtaaccccactccaatatgtaggctaagcagtggagccttctgagagaacaatgatgttgtcggtagccatggcaaaagcggatcactccaagctacctaatgcaaataaaggctgcgcgcgcgcggctttacaaccagagcagcaaatccagatgagcatgtcggtagccttggcgagcgaaatgagcaacaagttcaggtagatcaaaacagatttcacccttttttttcccatgctaattaacaagaaagcaaacaatcttgtgaagccaacagcaaaggcagagcacagtgccgtaaggaggaggaggtgaactagtaaagaggtgtactagaaacggtggctacaatgagtaaggacggcgttgttcgtcgcaagggcattcaattgggtccggaaagggatacgggtactagcgcatggccgccagtctcgactctagagacgagaaggtgatgggagtcgagacgagaagacgatgggtaaggaggaggagaagcaaacacacctcgtgatggactgccgaatcccgcaaggcccgatcccttcctccggcctcacttcggcgtgcggcctacgatctttgaaaagcgcggaaggctttccgcttcctgctcagggagaagaaggagagggggagggtctctcctgc

SEQ ID NO: 10335 - DNA, 639 bp, Zea Mays
cagtcttcgagcagcgtcgttccaaaaagaaaaaagaaaaactcagccgccggccgctgcccctctcggctgcacgacgtccgtgagggcgtgccccctggccccgtcccttgtcgcctgcccgccggtgcccgcacaggctgccagtgccatactgccatccctccgtccggccgtctgcccaggctgcctgcccggcgccctggcctcccggtcgctggctctctgcccaggcgccaggccgcaggtcccaccgccccagaccacccgcgaaccagtccgctgcaggctgcaggccaccgtccctccagttcgccggtcagattattaaccattcagataccccagctccgcctagacgcgaatcctccgccactatggtggcagcggtgtccctgccgagccaagcacaggccgtgcttcggagccggctctgcgacccggtcttcatccactccgccctcagtagctccctggacactaattacagcaagctgaagtacctcgtcgccagctcggtctccgaggcctgcaacaattctgtcctcctcttgggtccccgcgggtgtggaaaagcaggtggtcgacatggttcttgatgatctgaaggaggagcacccagatgcgatttccgtggta

SEQ ID NO: 10336 - DNA, 3035 bp, Zea Mays
tccacctcaaagcctcccgccctaacgatttcgaaatttgaaacaccctttcctccaaatcattcaaccattcacaagtccaaatcaaagcgtcctttcctcttgtaccatctccaccggatccccaaaccctagctctgcatcgactcccgctatgtcctcccgcctcaaggataccggcggcggtggcggcagggccacggccgcggcaacccgcccgctcaccccgaagcccttctctgtctcgtcatcagcccggcggacgaccgccgtcgccgccgccgggaaggagaacaccgcgtccaagccgtccaagcccacctccgccgtgcggtggtccacatcgtcgcttccgcgggccagcaggatccaaagctcggtggagtcctcgaagctcgtctccaccctcagggctcccgtgctgcccgggaggccttccgtcggtaaggataacgtggtggaggcaggcttgcggcggagcgtcaatggtgggatcagggcttcttctgtagagaaagggaggaggtcggttagtgttgttggatccagggcctccgaggctaggagagggagtgctggcgctggtggtgatggcactagcagaagggagaggcttgatgcgaaggccaaggggttggatgagatcagcaggagaagagatgatcttgatgccaaggggaagcagactgatgagattggcaggaaaagggagagctttgatgcaaagcccaagcagatcggtgggaaaagacagggctttggtgtgaatgtgtccaagcaatgtgatgagatcaaggggaaaactgacgcattcgtgagtaatatgaagaagcaaagcgaagatgttggtgggcgaagagtgggctctgattcgaaggcaaaggcaggtgaagaaatcaatatgaggaaagaggggctcaataaattggtgaaggagatgcatacccaaaaggctgatccaggagaagtttcttccaaatccgtggaatgttgtgccacccagaaggatgatgagataggcaacacttctgtcatccctgttttcactgttcatgtggtggattcaatggatgcccctgatccaataaggaaacagcaaaagaataatgaagagggtaggaagccggaagaaaagggaaaattgtcagacaggataagagtttttgagaaagtggctgcaggtggggagggagcgtcagcaaaacctgtgtctgctgtgaacaggtacccaagcaaacttcatgagaaactagctgtgttggaagggagggttcagaagattgctaccgatatcaagaaaaccaaagaaatgcttgatgagaacaacccggacgagccaaagcagatcttgtcaaatatccagaaggaaatcactgccattgagaaggcaatttctcatgtcaaagatgataataagatacagctgggtactgcagagaacagtgaatgtgagaactctcaccctgaaacagctgaaaaatgtaccattgcaaagccaggtgacctgaagcaagctggaaaaggcttgaatgctgatgagctggaggcaaggttccttccacaccacaaattattgaggggccacatatcttcaacttctactcaacaggagtcatctgttggtatgaggaaagattgtaatggaaaaacaagatctgcagcatctaaccctgacgatgatgaaaacagtatagccatggagtttctggcttctttagatggtgaagaaaatgatttcttcaaggagcgaaaagctaataaattggaaaagaataagacatgtgaagtagcagatgctaccagcaagacatcaagtcaaggtagctcaaagaatccagttgttcccaatcataaggaggaaactgaattgcttgctacggaggagctagaagaatttgatgatcgggaaaacaagtcctccatgatgttacaggaagaaactgatgagtcatgcaatagtcaattatcaggtataggaaacaagtcttcaaccggtggatggtttgtttcagagggagaagctgttcttcttgctcatggagatggcacatgctcctattatgacattgcaaaccacgagttcaaatctgagtacaagcctcccagcatggtatcaaataacatgtggggcgattgctggttgattcgtgccccaggcgttgatggatgttctggtagatatgttgttgctgcgtcagctggcaatgcactggatcctgggttttgcagctgggattactataccagagaagtaaaatcatttcatgtcgaggaggaagcttctcaagcctttgctccaacatcaagggctattcttggtgctctctctaatgtaggttcatcaagatctagctctgcactgtcaaatgcagaaagacagcaatggtggtatagaccgtgcggacctctcctgctttccactgctagcaagcaaaagatggtcacagcttatgatatacgtgacggcgatgttgtaatgaaatgggaagttagcaatccagtaatgggaatggagtactccagcccgttacagtggcgtagcaagggaaaggtagtaatcgctgggagtgagtcaatagggttgtgggatgtgaattcacttaacccacaacccttgttgtctgttgcttctggtaagaaattgtactgccttcatgtcaataacactgatgctgaggtcggcggcggagtgcgtcaaagggttagttcatccgaggtggaaggaaacgatggtgttttcagcacacaggaaagcgtaaatgtagcacagaaggaaggctgcaaataaaaggagggtcgaggtcacgagtccagcattactcgctgagaaaggggaaacttgtcgccacctatgagctaccagaattctgcaacgtgtgtcatgtaatatatgtacttcgtttatgcttcacatgtgatgccatctgccgtgtcaagcatcttgctttcactgtagtacttgctagcagatgttatctagttcttacccctggaatgataaattagttaacgaccatatgtttcgttccatgcaa

SEQ ID NO: 10337 - DNA, 1822 bp, Zea Mays
cgcggatctccctgtcgcccccaaccaccttccatccctcgtgacctgttcatgccgtcgccgcctcgatcctgtggatctccctgccgcctcccacgtccgtgctcatgacctgttccgcgtccgctgtcacccccagatcgcgcgaggcccatgtccacgcagtcatcgtcgccgccccctggccacgcgagatgccagcgccccctccaccttgcgtgagcgaccccttcatctaccttcaccaccatcttcaatccgcctctgcatcaccgccaaaaccctacccacttccctgctgcccaacaatgaatctgcctccgcaccaccgccaaaactctagcaactatggcagtgaacaacatccggtttcaagtctttggcagctatgctcatggaaaatacgtctatgttgatggtgaccgatctgttctcgcagaatcagcaaaggcttgatatcattgttgttttgctttatcatttgggcatttgaagcaaagctctatggagaaaaggcagggaaatgttgtctttctcatttttgcaggctgacgaatttaatgcagtggcaagagttggggttgctgctgaccatcgtggaatcatctgcagtcgtcgtgtgtccacactccctaacatgttgagcctcttgctgatcagatcaggcttgagaaggaaaatttggttttaataagtgttcttgtctggttcgattaaagaaagattcagtaattgtcttttttaggaacatagattcttcatctgtgtataatgtatttttattatctagattgtgatagttatttcaaggcctggtgatcgtatagcttgaccattgattgatgattatctgttgtcttaaggattggtacactgtatgtgttctttggtgttggtggtactttgctgacttctctatttatggtatcaaatatatctattgagtgttggtacttcaggtgcactatttagactattgggatcaatgctgtcagagctcataataaattggacgatatacgagaacaaggtcaattctaaaatatatgcagtattgcaatagtggatggaaacagaacaaaatagttgttccttgcagctatggagcagaaaattcatgtgaacccactgaagatactaagccaaacgaagtgtacacatattcagaattctagctcaagctgccctaatcaactgaggaggataaggatgccgtggattttgagagggaggagcccgccaattgccagaagtctgtgcaagctgatgcaaatgcgacagctgccccgtctaaggctgttggcttcttcgggaggacattatacaccacattaattctgcttgttgcgagccatccagatgtgtatgagccatgtgatgatttctttgcccttgttgatgcactactctcagacaaagcacaacttttgacactacaaccaaggttatacgatgacactatcatgcaaggcccactatcctctttgttgtcctctcatggatcctggtccagtggtggaggctgaggaatcagaaaggccctagatcatggccagtcatcgacgcaacggtggagcttatggctggaagtaatatgaagagtctatatctgacaaaaaatcatctaaaattaaatagtgagataagctttgaatagctgatgtaaaattatggagtaacattgtattagttgttgacaaaaaatgtgagaaatttaggtcaataataatatatgtattgtttgtttatatgtacttattgtgcactaatattttatcatataatttgtttgttgtcgtaacgcacgagcgtgcattccgac

SEQ ID NO: 10338 - DNA, 1576 bp, Zea Mays
aagctccttctcctcctcctcctcctcctcctcctcctcctcctccttcctgccgtcgccgacgactgccccacctgtactctcccctgcgtcctcctcctcggctctgctacacgccttccttgcttcctccctccaggcaggccagctccttcctcctcacgctagctcggtgtcttccttttcccttttccagcgcgcgccggccggccggccggccaaattccaatcccatccaccatcttgttcttgtcttctccgacaattaaccatcaatcccaaaacgtcatattcatcttgtcgaggccataaagtcacaacaaacacgtcgtccatgcatccaccaccgcatccatccatgaagcccggcggcgaggaggaggaggatgtgcaggtgctggtggtgcggtcccaccaccactcggaccagagcagcacgaggagccaccaccaccagcaggtcgtcatcagggcgcggccctactaccggcggtggtcgccgtggctcgtctccggcgccaccgtggcctgcgtcgccatcttcctcgtcaccatgttagtgaagatgggggctctcgatgtggctaaggtcgtccatggccggcaaggatggcgtctgatcacctgcatgtggctccacgccggagttgttcacctgctcatcaacatgctgtgcctcctagtcgtgggcatacgcctggagcaagaatttgggttcgtgaggatcggtctggtgtacctcatctctggttttggcgggagcctcatgtctgctctcttcatacagtccagcagcgtctccgtgggggcctccggcgctctcttcggcctcatcggatccatgctctctgagctcatcaccaactggtcactctacgcaaacaaggtggcggcgctgctaactctgcttctggtgatcctctccaacctggcgctgggcctcctcccccgggtggacaacttcgcccacatcggcggcctcgtctccggcttcctcctcggcttcgtcgtcttcgtccgcccgcacttggactggctcacccagcagcagagaagcggcggcggcgggcaagggcaacagcaagctcctccgccggtggcagcggcgaggaaacgcaagcacaggacgtaccagtatgtgctgtggctggccgccgccgcgctgctcgtggccgggctcacggcggccaccgtgctgcttttccgcgggtacgacgccaaccagcactgcccgtggtgccactacctcagctgcgtgcccaccaggaggtggaggtgcgacgggtcgccgaccacgtgcacggccacgacgcaggagaacaacacgctcagcgtcgtctgcgagggcggcagcaaccgcacgtacgtcgtggcggcggcgtcgcaggacaggatcaaggacctctgcaatcagctctgcacctagcactgcatattcttcgtgtacatcgatccatttttactcaccgtcagagtgaggtcctagctttacagcaagagaaagaatttgttcgatttacaggcaaatatgatatttttgaaatgcagcaaacaaccaaagatttaccatttattt

SEQ ID NO: 10339 - DNA, 1715 bp, Zea Mays
caaagctccttctcctcctcctcctcctcctcctcctcctcctcctccttcctgccgtcgccgacgactgccccacctgtactctcccctgcgtcctcctcctcggctctgctacacgccttccttgcttcctccctccaggcaggccagctccttcctcctcacgctagctcggtgtcttccttttcccttttccagcgcgcgccggccggccggccggccaaattccaatcccatccaccatcttgttcttgtcttctccgacaattaaccatcaatcccaaaacgtcatattcatcttgtcgaggccataaagtcacaacaaacacgtcgtccatgcatccaccaccgcatccatccatgaagcccggcggcgaggaggaggaggatgtgcaggtgctggtggtgcggtcccaccaccactcggaccagagcagcacgaggagccaccaccaccagcaggtcgtcatcagggcgcggccctactaccggcggtggtcgccgtggctcgtctccggcgccaccgtggcctgcgtcgccatcttcctcgtcaccatgtacgtgaacgactgcccgacgcacaactccaactgcgccgccgcagggttcctcggccgcttcgccttccagccgctccgcgagaacccgctcctcggaccctcctccgccactacgtataatgcatgattgataggttagtgaagatgggggctctcgatgtggctaaggtcgtccatggccggcaaggatggcgtctgatcacctgcatgtggctccacgccggagttgttcacctgctcatcaacatgctgtgcctcctagtcgtgggcatacgcctggagcaagaatttgggttcgtgaggatcggtctggtgtacctcatctctggttttggcgggagcctcatgtctgctctcttcatacagtccagcagcgtctccgtgggggcctccggcgctctcttcggcctcatcggatccatgctctctgagctcatcaccaactggtcactctacgcaaacaaggtggcggcgctgctaactctgcttctggtgatcctctccaacctggcgctgggcctcctcccccgggtggacaacttcgcccacatcggcggcctcgtctccggcttcctcctcggcttcgtcgtcttcgtccgcccgcacttggactggctcacccagcagcagagaagcggcggcggcgggcaagggcaacagcaagctcctccgccggtggcagcggcgaggaaacgcaagcacaggacgtaccagtatgtgctgtggctggccgccgccgcgctgctcgtggccgggctcacggcggccaccgtgctgcttttccgcgggtacgacgccaaccagcactgcccgtggtgccactacctcagctgcgtgcccaccaggaggtggaggtgcgacgggtcgccgaccacgtgcacggccacgacgcaggagaacaacacgctcagcgtcgtctgcgagggcggcagcaaccgcacgtacgtcgtggcggcggcgtcgcaggacaggatcaaggacctctgcaatcagctctgcacctagcactgcatattcttcgtgtacatcgatccatttttactcaccgtcagagtgaggtcctagctttacagcaagagaaagaatttgttcgatttacaggcaaatatgatatttttgaaatgcagcaaacaaccaaagatttaccatttattt

SEQ ID NO: 10340 - DNA, 1908 bp, Zea Mays
ccttcgcgtacacagcgccgcttcctctccctttaaatcgagcgccgcttcctctccgccgctttctctccccttcactcgagcgccgcttcctctccccttccatcgagcgcagcgcctgcgccgccgccaccactccgcaccgccgccagttccccacttcctccccacacccgaatcggattgaagccagaaggcaaggtgaagagtgggcttgggtaacggttgcaaagagatatccccaacagttgcagtcactcgcatccagtcggctcagctatggaggaggactcatcagcgatggagccgaataggctgcgcgaggccgaggcggcggctggggagctgaagaggctgcgcgaggccgggcagtctcagtacatgtaccggtctatcgccgacgccagggttgtcggcggccgggtctgcctcttcgccgtcgtctccgagatcggcgctaccgtccacagccgtggcacggatttcactgttacgttgagggtaatagatgaatcatacaagtctggaatatctgtaactttttttgctgacagcactgcactattgccttgtgtgaagtcgtgtggagatgtgatcagtctccataacgtcgtgacttctataagatatcatgacagcgaacacgacaaagattttttaaatcagatgagaacgtggctccctcaaggtctgaaggatttcacttcaaataattccgaattgtatttaatgaatttgaagtccgattctacttttgatctagtatgcaaggtttttcatgtacatgtggagaacaacaattcaatattttatgtttgggatggaactgatacccctgcagctgagtttccagcaatgatgtatgacagccgcatcgccaaccgagttcgtcgtcggccgatggcaagcatcccctccagtgttactgatgtagaatacgaggatgcaggttacgcttcattaatgaagtctttaactcatcatgatgtactgcttctttcccattttctccagttatttattagttttatttctgtttttgatttggtctaacattatccaacccccctgataacacgcgaacgtatttactttcagttgtatcccagtgatctatatatctccctttccatggaaaaactgtatattttctgaactctgattataaaagcacatccatgtgaagctagtttgctttcaactggtaactgtcatcttcggttgactcttgaggatcctacagcgagaattcatgcgtatgtccacaagaatgatttggtcggattctttggtggtggttttttgacagcagaagtgatagtaaaaaagatgaacatggtactgggcatcccggaaccacaaggcagcgtggaagttgccccctcgaccaggaatccaccttggatatggtgttgcttgatgtcatactatatggacaaaaacgatccctgggtcagcagaaagtaccggatctatagcacagccatcagggattgagcagagggatgctgctggaatgtgcaggaacaaacttgtaaatgaatgggacagatgctgtgtagtattggcatcttgcttgtagaagaggccatatgcttttgcaggtgcaatcagtgaatcattccatactgaacactgagaatagcacctcgggttcattctgtatgtgcctacactctagattgtcttttgggtgctcatcacgaaacgtgagcatatcttttggaaacagagacctgcgtttgattcctgtgcttgttatgttgtgattgatcattggggggaggttgagcttttgagccagtataaaaatactgaccggaccatcaatattattgatcattgggagtatgagtttttggacggtttctatttctgtattggtagatataaattttttttatccga

SEQ ID NO: 10341 - DNA, 1183 bp, Zea Mays
gaccagaggaagggacggcggggaggtggcaaggcgcagagagcaggttcgcttggcggacgcaccgagggaggcgtgtgggagccatgcttcttccctcttcgtcttcgtcttccgcttccgcttccaaaggtaactcctttgggaaaaccgttaacgatcatctgaggtcaactttgagttttgataacaagcaacctccatttgcgagtcaaaactttgactacggtcaaacaatagcttgcatttcatacccgtacaatcgttctagatcaggagatgtttgggcagcctatgagtcacgcaccagcactgccactgtgcagttccgttcccaaattgctggtgggggttcatccacaagaattcccttgcctttggaattagcagagaatgaacccatatatgtgaatcccaaacaatatcacgggatacttcgcagaagacagttacgtgccaagctagaggctcagaacaagctagtcagagcccgaaagccttaccttcatgagtctaggcatcttcatgcaatgaagagggcacgaggttccggtggacgattcctcaacactaagcagctccagcagtctcacacagccctcaccaggtccaccaccacaagtggcacaagctcctcaggctcaactcatctgcggcttggtggtggcgcagccgcagctggagatcgatctgtgctggcacccaaaacaatggcctcacaagacagtagcaagaaggccgtttcttcagccctcgccttcactgcgactccaatgctgcgcagagatgacggcttcttgcagcacccaagccatcttttcagtttttctggtcattttgggcaggcaagcgcgcaagctggcgtccataatggaagtcagcatagggttccagttatgagatgaccggtttgcgaaccatagctggtgatccaggcgtctagggtcaacttcgctgtggtgtcttagtctctcaggcaattcatccttggcttaatttctggctttttattagaaggtaccaaaatgtgttccataccgttgtggccacagagcccataaaccagggggtttgatggttggcactcctacccaaactattgttgcagtggtgtttgttagaataaaccttgactattattctgtacaatttgcctttatcttgtactgccaattattgtgta

SEQ ID NO: 10342 - DNA, 3047 bp, Zea Mays
gcggcagcttcttgccctcttcctccattgacttgccgatgcagatcgaggggcgaggctgccgtcgtcgtcccgggctctctgtgcgcgtacgcggaagagtgaggaagctctagtccactcatacagcctttacggttcaggcaagcaaccacccatagcattcctatcactgtgcttggttgcgcatggattaccaaggggacaatcttagagatttctttcaaactaatgggcgtaaggtgcttcagagagcggaaaacaactatagcttgaaatattttacagaaaatgagatacgaaacataactgatgggtataagtctgttctgggaagaggggcatttggtgaggtctacaaaggaacgctagaagaccaatcctcagttgcagtaaagagatatatacatgggacccacaaagaggtgtttgccaaggaagtcatagtgcactctcaaataaaccacaagaatgttgtcagactcttgggctgctgcacagaagaaaatgctctaatgattgtcatggagtttatctccaatgggaacctcgacagcatacttcatggcaacagaggtaatggtcgggttcccttccctctgaagaaaaggatagaaattgccattgaggttgctgaagtattatggtgcatgcattcgatgtatagtcctgttcttcatggtgacatcaaacctgctaacatactgctagatgaaaattttcagccaaagatatcagattttggaattgcaagactgctttctgctaatggcccccagcaagctaccactgtcattggttccataggctaccttgatccagcatactgtgagagtggaattctaaccccaaagagcgatgtttacagctttggagtggttttgctggaaattatcacaaggaataaagcagtggatggcaccgttacccttgctcaaagttttaatgaggctcttacaaaaggggaggatgtgcagcacatgtttgatgaggaaatcagtgttgcagaaaacaagaagtttcttcgacgcattggacagttagcagctaaatgcttgcagagggacgtcaaaacgcgtcctgaaatggttgaagttgctaatagtctaaggatgatcaggaaagctatgcagagagaccaggatgaggatgtactgttagcagcataccaatttggagatctaaaaattttcaatgaaactgaaatgaaggaaatgacaaaaaactacagcatggcctttaggaaatcgatgtgtgaatgtctctacaatggagtcatcggcatgaatcgtccaattatagtaagactacttgagacaagttcagaaactggcagagagatatttctgaacactatgagcatattgagtcaaaagaaccacaaaaatgttgtgaatattgttggcttccacatagggaagtccagtttagagtgtgtatatgagtcttgctgtgatctatccaagacaatgcttggctctatatcactatctaacagaaacctttatgacactatctgttccatgaaaaaacttcatcttcaacaacgcctgtcaatagcagtccagtgtgcagagggtctggttcatatccattcattagcagctgaaagtcctgaatcatgtggcaccagcctcttaggaaacttcagatctgccaacatatttttggacgagaactttgtaccaaaaatcttcaatgtgaacttgtcaacatttcttggactttcaggagagaccgtgatgcaattgggatgttcggcaaggtttgtgatgaacatgaagggtactttgttcatgaggccctttccattgccatcgattgcttacaacttgatattcaaatgaggccagaaatggaacatgtacttttccgtctccggatcattgttgctagaagcaaacttgctgctggtagtaacaataaacctagccaacatattggtcgggcccttgttaacaacattgataaacttcacccaactctcatatcaaccatttccatggaggaactgaatgaagcaaccgggaacttcagtaatgatgttcttataggacagggaccatacgccgaatgtttcctgggagttcttaaagatgggcagaatcttgctgtaaaaaggctacgtacttctgaagaaattcaagtagaggttccgaccattttaagaatgtgttaccatgacaatgttgtgcaatttctaggatgttttcttgaagggggaactcgtgttcttgcttatgagtacgccccaaggggctccttgcatgatattcttcatggtaaaatgggcatcaagggagcccgaccagggccacctctatcgtggttgcagcgtgtgaagattgccgtaagtgctgcaaaaggcatcgagttcctccatgagaaggtgacattggtgtttcaatacatgatgcccatcgccgggttcataattgggccgagtactattctgtcagggaacatctagcacctgagttcgcattcagaagaaggtatagcacaaagagcgatgtctacagcttcgggcttgtactgttggagcttttaactggccgctcagtttttcatgttgcgacacaatgtggcccgaggagcgcagttagatgggctaaaccaatgcttagtcaagacaaggtggaacagtgcatagatccaaggcttggaggagggtacctactaaacgatgtcagaaagatggcttctgttgctgcactgtgtttacaagacgagccagagttccggcctgaaatgagcatcgtcgtcgaggctctgagcctgttactgaacagcaagtgaacaagtaaccgtccctgcattggtgaagcacgtggaatgtgatttccttgcatgtcattgcgagctcaagatcacgggtttcgtgaaggcgattggcccccaacagaaagttatgattactgcattcatctaggcttggaacttgtgctttctttgtctgtgcacatgtaatactcaaaattctaaataaagaatatagagagatcttctcattttatgtgccttatttgcatcataaaaagagcaca

SEQ ID NO: 10343 - DNA, 7649 bp, Zea Mays
cactgtgcgtttgagaaggtcttcaattgtgctgtctgggccacggaacgacaatgtcacagcttggattagccgcagctgcctcaaaggccttgccactactccctaatcgccagagaagttcagctgggactacattctcatcatcttcattatcgaggcccttaaacagaaggaaaagccgtactcgttcactccgtgatggcggagatggggtatcagatgccaaaaagcacagccagtctgttcgtcaaggtcttgctggcattatcgacctcccaagtgaggcaccttccgaagtggatatttcacatggatctgaggatcctagggggccaacagattcttatcaaatgaatgggattatcaatgaaacacataatggaagacatgcctcagtgtccaaggttgttgaattttgtgcggcactaggtggcaaaacaccaattcacagtatattagtggccaacaatggaatggcagcagcaaaatttatgaggagtgtccggacatgggctaatgatacttttggatctgagaaggcaattcaactcatagctatggcaactccggaagacatgaggataaatgcagaacacattagaattgctgaccaattcgtagaggtgcctggtggaacaaacaataataactacgccaatgttcaactcatagtggagatggcacaaaaactaggtgtttctgctgtttggcctggttggggtcatgcttctgagaatcctgaactgccagatgtattgaccgcaaaagggatcgtttttcttggcccacctgcatcatcaatgaatgctttgggagataaggtcggctcagctctcattgctcaagcagccggggtcccaactcttgcttggagtggatcacatgttgaagttccattagagtgctgcttagacgcgatacctgaggagatgtatagaaaagcttgcgttactaccacagaggaagcagttgcaagttgtcaagtggttggttatcctgccatgattaaggcatcctggggaggtggtggtaaaggaataagaaaggttcataatgatgatgaggttagagcgctgtttaagcaagtacaaggtgaagtccctggctccccaatatttgtcatgaggcttgcatcccagagtcggcatcttgaagttcagttgctttgtgatcaatatggtaatgtagcagcacttcacagtcgtgattgcagtgtgcaacggcgacaccagaagattattgaagaaggtccagttactgttgctcctcgtgagacagttaaagcacttgagcaggcagcaaggaggcttgctaaggctgtgggttatgttggtgctgctactgttgagtatctttacagcatggaaactggagactactattttctggaacttaatccccgactacaggttgagcatccagtcaccgagtggatagctgaagtaaatctgcctgcagctcaagttgctgttggaatgggcatacctctttggcagattccagaaatcagacgtttctatggaatggactatggaggagggtatgacatttggaggaaaacagcagctcttgctacaccatttaattttgatgaagtagattctcaatggccaaagggccattgtgtagcagttagaattactagtgaggacccagatgatggtttcaaacctactggtgggaaagtgaaggagataagttttaaaagcaagcctaatgtttgggcctacttctcagtaaagtctggtggaggcattcatgaatttgctgattctcagttcggacatgtttttgcatatgggctctctagatcagcagcaataacaaacatgactcttgcattaaaagagattcaaattcgtggagaaattcattcaaatgttgattacacagttgacctcttaaatgcttcagactttagagaaaacaagattcatactggttggctcgacaccagaatagctatgcgtgttcaagctgagaggcccccatggtatatttcagtggttgggggtgctttatataaaacagtaaccaccaatgcagccactgtttctgaatatgttagttatctcaccaagggccagattccaccaaagttaatttgaatatagaagggagcaaatacacaattgaaactgtaaggactggacatggtagctacaggttgagaatgaatgattcaacagttgaagcgaatgtacaatctttatgtgatggtggcctcttaatgcagttggatggaaacagccatgtaatttatgcagaagaagaagctggtggtacacggcttcagattgatggaaagacatgtttattgcagaatgaccatgatccatcaaagttattagctgagacaccctgcaaacttcttcgtttcttggttgctgatggtgctcatgttgatgcggatgtaccatacgcggaagttgaggttatgaagatgtgcatgcctctcttgtcacctgcttctggtgtcattcattgtatgatgtctgagggccaggcattgcaggctggtgatcttatagcaaggttggatcttgatgacccttctgctgtgaaaagagctgagccatttgatggaatatttccacaaatggagctccctgttgctgtctctagtcaagtacacaaaagatatgctgcaagtttgaatgctgctcgaatggtccttgcaggatatgagcacaatattaatgaagtcgttcaagatttggtatgctgcctggacaaccctgagcttcctttcctacagtgggatgaacttatgtctgttctagcaacgaggcttccaagaaatctcaagagtgagttagaggataaatacaaggaatacaagttgaatttttaccatggaaaaaacgaggactttccatccaagttgctaagagacatcattgaggaaaatctttcttatggttcagagaaggaaaaggctacaaatgagaggcttgttgagcctcttatgaacctactgaagtcatatgagggtgggagagagagccatgcacattttgttgtcaagtctcttttcgaggagtatcttacagtggaagaactttttagtgatggcattcagtctgacgtgattgaaacattgcggcatcagcacagtaaagacctgcagaaggttgtagacattgtgttgtctcaccagggtgtgaggaacaaagctaagcttgtaacggcacttatggaaaagctggtttatccaaatcctggtggttacagggatctgttagttcgcttttcttccctcaatcataaaagatattataagttggcccttaaagcaagtgaacttcttgaacaaaccaaactaagtgaactccgtgcaagcgttgcaagaagcctttcggatctggggatgcataagggagaaatgagtattaaggataacatggaagatttagtctctgccccattacctgttgaagatgctctgatttctttgtttgattacagtgatcgaactgttcagcagaaagtgattgagacatacatatcacgattgtaccagcctcatcttgtaaaggatagcatccaaatgaaattcaaggaatctggtgctattactttttgggaattttatgaagggcatgttgatactagaaatggacatggggctattattggtgggaagcgatggggtgccatggtcgttctcaaatcacttgaatctgcgtcaacagccattgtggctgcattaaaggattcggcacagttcaacagctctgagggcaacatgatgcacattgcattattgagtgctgaaaatgaaagtaatataagtggaataagcagtgatgatcaagctcaacataagatggaaaagcttagcaagatactgaaggatactagcgttgcaagtgatctccaagctgctggtttgaaggttataagttgcattgttcaaagagatgaagctcgcatgccaatgcgccacacattcctctggttggatgacaagagttgttatgaagaagagcagattctccggcatgtggagcctcccctctctacacttcttgaattggataagttgaaggtgaaaggatacaatgaaatgaagtatactccttcgcgtgaccgccaatggcatatctacacactaagaaatactgaaaaccccaaaatgttgcatagggtgtttttccgaactattgtcaggcaacccaatgcaggcaacaagtttacatcggctcagatcagcgacgctgaagtaggatgtcccgaagaatctctttcatttacatcaaatagcatcttaagatcattgatgactgctattgaagaattagagcttcatgcaattaggacaggtcattctcacatgtatttgtgcatactgaaagagcaaaagcttcttgacctcattccattttcagggagtacaattgttgatgttggccaagatgaagctaccgcttgttcacttttaaaatcaatggctttgaagatacatgagcttgttggtgcaaggatgcatcatctgtctgtatgccagtgggaggtgaaactcaagttggactgtgatggccctgcaagtggtacctggagagttgtaactacaaatgttactggtcacacctgcaccattgatatataccgagaagtggaggaaatagaatcgcagaagttagtgtaccattcagccacttcgtcagctggaccattgcatggtgttgcactgaataatccatatcaacctttgagtgtgattgatctaaagcgctgctctgctaggaacaacagaacaacatattgctatgattttccgctggcctttgaaactgcactgcagaagtcatggcagtccaatggctctactgtttctgaaggcaatgaaaatagtaaatcctacgtgaaggcaactgagctagtgtttgctgaaaaacatgggtcctggggcactcctataattccgatggaacgccctgctgggctcaacgacattggtatggtcgcttggatcatggagatgtcaacacctgaatttcccaatggcaggcagattattgttgtagcaaatgatatcactttcagagctggatcatttggcccaagggaagatgcattttttgaaactgtcactaacctggcttgcgaaaggaaacttcctcttatatacttggcagcaaactctggtgctaggattggcatagctgatgaagtaaaatcttgcttccgtgttggatggtctgacgaaggcagtcctgaacgagggtttcagtacatctatctgactgaagaagactatgctcgcattagctcttctgttatagcacataagctggagctagatagtggtgaaattaggtggattattgactctgttgtgggcaaggaggatgggcttggtgtcgagaacatacatggaagtgctgctattgccagtgcttattctagggcatatgaggagacatttacacttacatttgtgactgggcggactgtaggaataggagcttatcttgctcgacttggtatacggtgcatacagcgtcttgaccagcctattattttaacagggttttctgccctgaacaagctccttgggcgggaagtgtacagctcccacatgcagcttggtggtcctaagatcatggcgaccaatggtgttgtccacctcactgttccagatgaccttgaaggtgtttccaatatattgaggtggctcagctatgttcctgcaaacattggtggacctcttcctattaccaaacctctggaccctccagacagacctgttgcttacatccctgagaacacatgcgatccacgtgcagctatctgtggtgtagatgacagccaagggaaatggttgggtggtatgtttgacaaagacagctttgtggagacatttgaaggatgggcaaaaacagtggttactggcagagcaaagcttggaggaattcctgtgggcgtcatagctgtggagacacagaccatgatgcagatcatccctgctgatccaggtcagcttgattcccatgagcgatctgtccctcgtgctggacaagtgtggttcccagattctgcaaccaagaccgctcaggcattattagacttcaaccgtgaaggattgcctctgttcatcctggctaattggagaggcttctctggtggacaaagagatctctttgaaggaattcttcaggctgggtcaacaattgtcgagaaccttaggacatataatcagcctgcttttgtgtacattcctatggctggagagcttcgtggaggagcttgggttgtggtcgatagcaaaataaatccagaccgcattgagtgttatgctgaaaggactgccaaaggtaatgttctcgaacctcaagggttaattgaaatcaagttcaggtcagaggaactccaagactgtatgggtaggcttgacccagagttgataaatctgaaagcaaaactccaagatgtaaatcatggaaatggaagtctaccagacatagaagggattcggaagagtatagaagcacgtacgaaacagttgctgcctttatatacccagattgcaatacggtttgctgaattgcatgatacttccctaagaatggcagctaaaggtgtgattaagaaagttgtagactgggaagaatcacgctcgttcttctataaaaggctacggaggaggatcgcagaagatgttcttgcaaaagaaataaggcagatagtcggtgataaatttacgcaccaattagcaatggagctcatcaaggaatggtaccttgcttctcaggccacaacaggaagcactggatgggatgacgatgatgcttttgttgcctggaaggacagtcctgaaaactacaaggggcatatccaaaagcttagggctcaaaaagtgtctcattcgctctctgatcttgctgactccagttcagatctgcaagcattctcgcagggtctttctacgctattagataagatggatccctctcagagagcgaagtttgttcaggaagtcaagaaggtccttgattgatgataccaacacatccaacacaatgtgtgcatgtcacatctttttgttctagtacatacatagaaggatattgcttggtcttgattgatcatgtctgatttaagtcgactattatttcttggaattttcttttggacctggtgctatggttgatggatgtatattggatatgtgcgttctgccaggtgtaagcacaaaggtttagacagaccgagagcaagagcgagtgaacctgttctggttttgcagtggttcagtaaggcagaaagttgttaaaccgtagttctgagatgtattaccagtggcgccatgctgtacttttagggtgtataatgcggatacaaataaacaatttagcggttcattaaagtttgaactcaaataacatgttctttgtaagcatatgtaccgtacctctacgtgaaataaagttgttgaattagcattcgacatcagaatttgttaggactaggttttgtatggtttagggaggtgtaatagtgtcacacccggatttcggggcatcaagacccgggcgcgaacataatcatcaggtataatcatcaggtgtgctgggaccaagtctcacacatatgatgaatcatggcacatgatcgaatgtcacatctttactatataatcg

SEQ ID NO: 10344 - DNA, 7912 bp, Zea Mays
cgcacaccccccatccctccgcccccgccctcctcctggctcgccagtcgcacctccccgcccccgcccctcggtctctccgcctccgccccgccgcctctctccgcctccttctctgctccgccccgccgccgcaaggatccaacacccgcgcgtcgccttctccgctgtctttcttaccgagattttccaggagttttcttccctttttatggcactgtgcgtttgagaaggtcttcaattgtgctgtctgggccacggaacgacaatgtcacagcttggattagccgcagctgcctcaaaggccttgccactactccctaatcgccagagaagttcagctgggactacattctcatcatcttcattatcgaggcccttaaacagaaggaaaagccgtactcgttcactccgtgatggcggagatggggtatcagatgccaaaaagcacagccagtctgttcgtcaaggtcttgctggcattatcgacctcccaagtgaggcaccttccgaagtggatatttcacatggatctgaggatcctagggggccaacagattcttatcaaatgaatgggattatcaatgaaacacataatggaagacatgcctcagtgtccaaggttgttgaattttgtgcggcactaggtggcaaaacaccaattcacagtatattagtggccaacaatggaatggcagcagcaaaatttatgaggagtgtccggacatgggctaatgatacttttggatctgagaaggcaattcaactcatagctatggcaactccggaagacatgaggataaatgcagaacacattagaattgctgaccaattcgtagaggtgcctggtggaacaaacaataataactacgccaatgttcaactcatagtggagatggcacaaaaactaggtgtttctgctgtttggcctggttggggtcatgcttctgagaatcctgaactgccagatgtattgaccgcaaaagggatcgtttttcttggcccacctgcatcatcaatgaatgctttgggagataaggtcggctcagctctcattgctcaagcagccggggtcccaactcttgcttggagtggatcacatgttgaagttccattagagtgctgcttagacgcgatacctgaggagatgtatagaaaagcttgcgttactaccacagaggaagcagttgcaagttgtcaagtggttggttatcctgccatgattaaggcatcctggggaggtggtggtaaaggaataagaaaggttcataatgatgatgaggttagagcgctgtttaagcaagtacaaggtgaagtccctggctccccaatatttgtcatgaggcttgcatcccagagtcggcatcttgaagttcagttgctttgtgatcaatatggtaatgtagcagcacttcacagtcgtgattgcagtgtgcaacggcgacaccagaagattattgaagaaggtccagttactgttgctcctcgtgagacagttaaagcacttgagcaggcagcaaggaggcttgctaaggctgtgggttatgttggtgctgctactgttgagtatctttacagcatggaaactggagactactattttctggaacttaatccccgactacaggttgagcatccagtcaccgagtggatagctgaagtaaatctgcctgcagctcaagttgctgttggaatgggcatacctctttggcagattccagaaatcagacgtttctatggaatggactatggaggagggtatgacatttggaggaaaacagcagctcttgctacaccatttaattttgatgaagtagattctcaatggccaaagggccattgtgtagcagttagaattactagtgaggacccagatgatggtttcaaacctactggtgggaaagtgaaggagataagttttaaaagcaagcctaatgtttgggcctacttctcagtaaagtctggtggaggcattcatgaatttgctgattctcagttcggacatgtttttgcatatgggctctctagatcagcagcaataacaaacatgactcttgcattaaaagagattcaaattcgtggagaaattcattcaaatgttgattacacagttgacctcttaaatgcttcagactttagagaaaacaagattcatactggttggctcgacaccagaatagctatgcgtgttcaagctgagaggcccccatggtatatttcagtggttgggggtgctttatataaaacagtaaccaccaatgcagccactgtttctgaatatgttagttatctcaccaagggccagattccaccaaagattgaaactgtaaggactggacatggtagctacaggttgagaatgaatgattcaacagttgaagcgaatgtacaatctttatgtgatggtggcctcttaatgcagttggatggaaacagccatgtaatttatgcagaagaagaagctggtggtacacggcttcagattgatggaaagacatgtttattgcagaatgaccatgatccatcaaagttattagctgagacaccctgcaaacttcttcgtttcttggttgctgatggtgctcatgttgatgcggatgtaccatacgcggaagttgaggttatgaagatgtgcatgcctctcttgtcacctgcttctggtgtcattcattgtatgatgtctgagggccaggcattgcaggctggtgatcttatagcaaggttggatcttgatgacccttctgctgtgaaaagagctgagccatttgatggaatatttccacaaatggagctccctgttgctgtctctagtcaagtacacaaaagatatgctgcaagtttgaatgctgctcgaatggtccttgcaggatatgagcacaatattaatgaagtcgttcaagatttggtatgctgcctggacaaccctgagcttcctttcctacagtgggatgaacttatgtctgttctagcaacgaggcttccaagaaatctcaagagtgagttagaggataaatacaaggaatacaagttgaatttttaccatggaaaaaacgaggactttccatccaagttgctaagagacatcattgaggaaaatctttcttatggttcagagaaggaaaaggctacaaatgagaggcttgttgagcctcttatgaacctactgaagtcatatgagggtgggagagagagccatgcacattttgttgtcaagtctcttttcgaggagtatcttacagtggaagaactttttagtgatggcattcagtctgacgtgattgaaacattgcggcatcagcacagtaaagacctgcagaaggttgtagacattgtgttgtctcaccagggtgtgaggaacaaagctaagcttgtaacggcacttatggaaaagctggtttatccaaatcctggtggttacagggatctgttagttcgcttttcttccctcaatcataaaagatattataagttggcccttaaagcaagtgaacttcttgaacaaaccaaactaagtgaactccgtgcaagcgttgcaagaagcctttcggatctggggatgcataagggagaaatgagtattaaggataacatggaagatttagtctctgccccattacctgttgaagatgctctgatttctttgtttgattacagtgatcgaactgttcagcagaaagtgattgagacatacatatcacgattgtaccagcctcatcttgtaaaggatagcatccaaatgaaattcaaggaatctggtgctattactttttgggaattttatgaagggcatgttgatactagaaatggacatggggctattattggtgggaagcgatggggtgccatggtcgttctcaaatcacttgaatctgcgtcaacagccattgtggctgcattaaaggattcggcacagttcaacagctctgagggcaacatgatgcacattgcattattgagtgctgaaaatgaaagtaatataagtggaataagcagtgatgatcaagctcaacataagatggaaaagcttagcaagatactgaaggatactagcgttgcaagtgatctccaagctgctggtttgaaggttataagttgcattgttcaaagagatgaagctcgcatgccaatgcgccacacattcctctggttggatgacaagagttgttatgaagaagagcagattctccggcatgtggagcctcccctctctacacttcttgaattggataagttgaaggtgaaaggatacaatgaaatgaagtatactccttcgcgtgaccgccaatggcatatctacacactaagaaatactgaaaaccccaaaatgttgcatagggtgtttttccgaactattgtcaggcaacccaatgcaggcaacaagtttacatcggctcagatcagcgacgctgaagtaggatgtcccgaagaatctctttcatttacatcaaatagcatcttaagatcattgatgactgctattgaagaattagagcttcatgcaattaggacaggtcattctcacatgtatttgtgcatactgaaagagcaaaagcttcttgacctcattccattttcagggagtacaattgttgatgttggccaagatgaagctaccgcttgttcacttttaaaatcaatggctttgaagatacatgagcttgttggtgcaaggatgcatcatctgtctgtatgccagtgggaggtgaaactcaagttggactgtgatggccctgcaagtggtacctggagagttgtaactacaaatgttactggtcacacctgcaccattgatatataccgagaagtggaggaaatagaatcgcagaagttagtgtaccattcagccacttcgtcagctggaccattgcatggtgttgcactgaataatccatatcaacctttgagtgtgattgatctaaagcgctgctctgctaggaacaacagaacaacatattgctatgattttccgctggtgagttgaccccccttcccctgtcaataaccatctgtagttatttttaacctaagctcataatgatggaaaaaatgtaggcctttgaaactgcactgcagaagtcatggcagtccaatggctctactgtttctgaaggcaatgaaaatagtaaatcctacgtgaaggcaactgagctagtgtttgctgaaaaacatgggtcctggggcactcctataattccgatggaacgccctgctgggctcaacgacattggtatggtcgcttggatcatggagatgtcaacacctgaatttcccaatggcaggcagattattgttgtagcaaatgatatcactttcagagctggatcatttggcccaagggaagatgcattttttgaaactgtcactaacctggcttgcgaaaggaaacttcctcttatatacttggcagcaaactctggtgctaggattggcatagctgatgaagtaaaatcttgcttccgtgttggatggtctgacgaaggcagtcctgaacgagggtttcagtacatctatctgactgaagaagactatgctcgcattagctcttctgttatagcacataagctggagctagatagtggtgaaattaggtggattattgactctgttgtgggcaaggaggatgggcttggtgtcgagaacatacatggaagtgctgctattgccagtgcttattctagggcatatgaggagacatttacacttacatttgtgactgggcggactgtaggaataggagcttatcttgctcgacttggtatacggtgcatacagcgtcttgaccagcctattattttaacagggttttctgccctgaacaagctccttgggcgggaagtgtacagctcccacatgcagcttggtggtcctaagatcatggcgaccaatggtgttgtccacctcactgttccagatgaccttgaaggtgtttccaatatattgaggtggctcagctatgttcctgcaaacattggtggacctcttcctattaccaaacctctggaccctccagacagacctgttgcttacatccctgagaacacatgcgatccacgtgcagctatctgtggtgtagatgacagccaagggaaatggttgggtggtatgtttgacaaagacagctttgtggagacatttgaaggatgggcaaaaacagtggttactggcagagcaaagcttggaggaattcctgtgggcgtcatagctgtggagacacagaccatgatgcagatcatccctgctgatccaggtcagcttgattcccatgagcgatctgtccctcgtgctggacaagtgtggttcccagattctgcaaccaagaccgctcaggcattattagacttcaaccgtgaaggattgcctctgttcatcctggctaattggagaggcttctctggtggacaaagagatctctttgaaggaattcttcaggctgggtcaacaattgtcgagaaccttaggacatataatcagcctgcttttgtgtacattcctatggctggagagcttcgtggaggagcttgggttgtggtcgatagcaaaataaatccagaccgcattgagtgttatgctgaaaggactgccaaaggtaatgttctcgaacctcaagggttaattgaaatcaagttcaggtcagaggaactccaagactgtatgggtaggcttgacccagagttgataaatctgaaagcaaaactccaagatgtaaatcatggaaatggaagtctaccagacatagaagggattcggaagagtatagaagcacgtacgaaacagttgctgcctttatatacccagattgcaatacggtttgctgaattgcatgatacttccctaagaatggcagctaaaggtgtgattaagaaagttgtagactgggaagaatcacgctcgttcttctataaaaggctacggaggaggatcgcagaagatgttcttgcaaaagaaataaggcagatagtcggtgataaatttacgcaccaattagcaatggagctcatcaaggaatggtaccttgcttctcaggccacaacaggaagcactggatgggatgacgatgatgcttttgttgcctggaaggacagtcctgaaaactacaaggggcatatccaaaagcttagggctcaaaaagtgtctcattcgctctctgatcttgctgactccagttcagatctgcaagcattctcgcagggtctttctacgctattagataagatggatccctctcagagagcgaagtttgttcaggaagtcaagaaggtccttgattgatgataccaacacatccaacacaatgtgtgcatgtcacatctttttgttctagtacatacatagaaggatattgcttggtcttgattgatcatgtctgatttaagtcgactattatttcttggaattttcttttggacctggtgctatggttgatggatgtatattggatatgtgcgttctgccaggtgtaagcacaaaggtttagacagaccgagagcaagagcgagtgaacctgttctggttttgcagtggttcagtaaggcagaaagttgttaaaccgtagttctgagatgtattaccagtggcgccatgctgtacttttagggtgtataatgcggatacaaataaacaatttagcggttcattaaagtttgaactcaaataacatgttctttgtaagcatatgtaccgtacctctacgtgaaataaagttgttgaattagcattcgacatcagaatttgttaggactaggttttgtatggtttagggaggtgtaatagtgtcacacccggatttcggggcatcaagacccgggcgcgaacataatcatcaggtataatcatcaggtgtgctgggaccaagtctcacacatatgatgaatcatggcacatgatcgaatgtcacatctttactatataatcg

SEQ ID NO: 10345 - DNA, 1858 bp, Zea Mays
gatccgactccgatcgccgtctacgtacgcgccacggcccacgcacgtggccacagctcagcgcgcgtcctcgcacagccgcccgcactctcaagtgaagcctccagggtgacgaatcccatgggcgccgcggcgaggaagcccgccgccgctggggtgttgccaatctggctctgcctcgtctgcgcgtcgagagcgcagccgtacatcggcgtcaactacggcgaggtggcggacaacctgccgtcggcggacgagacggcgaggctgctcaggtcgacgtccatctccaaggtgcggctgtacggcgtggacgcggggctgatccgcgcgctggcggggtccggcatctccgtggtggtgggcgtggcgaacggcgacatcccgtcgctggccgcggacccggcggccgcgtcccggtggctggccgccaacgtgctgcccttcgtcccggcgaccaccatctccgccgtggccgtcggcaacgaggtgctggagtccggggacgccaccctgggcgccgcgctgctcccggccatgcagaacctccgcgccgccgccgcggcggcggggggcggcgccgcggggatcaggttctccaccgtgaacaccatgggcgtgatggcgcagtcggacccgccgtcgacgggcgcgttccacccggacgtggctccgcagctgcagcagatcctggggttcctcagcaggaccggcgcgccgttcatgatcaacccgtacccgtggttcgcgtaccagtcggacccgcggccggacacgctggccttctgcctgttccagcccaacgcggggcgcgtggacggcgggtccaagatcaggtacaccaacatgttcgacgcgcagctggacgccgtgaagtcggcgctggtgcgcgccgggtacggggacgtggacgtcgtggtggcggagacggggtggccgaccaggggcgacgccggggagcccggcgccacggcggagaacgccagggcgtacgtgtccaacctggtggcgcacctgcggtccggcgccggcacgccgctgatgcctgggaaggcggtggagacgtacctgttcgcgctgtacgacgaggacctcaagcccgggcccacgtcggagcgctcgttcgggctgtaccacacggacctcagcatggcctacgacgccgggctggcctcctccgcggcggcggggggtcggggcgggggcgggggcggcgcggcgcagcccaggggcggcgggtggtgcgtggcgcgggccggcgcctcggacgcggagctgcaggcggacctggactacgcgtgctcgcaggtgggcgtcgactgcagcgccatccagcccggcggcgcctgcttcgagcccaacacggtgcgcgcgcacgccgcgtacgccgtgaaccagctgtaccaggcggccgggcggcacccgtggaactgcgacttccgggcgtccgccacgctcacctccgacgacccaagctacggggcatgcgtgtacaccgggggaggccaataatgcacggcgcactggaagaaatttcccgttccttttcagctgcaggctacggggcatgcagtgcagatcctcttgtttgtttcgtcgtaccggaagaaatttcccgttccttttcagctgccctgactgcctgcctgccttgggacaggctgggatgtgtcatgtgtgagtgtgacttcgtgtaaaagaactattggacgctgtcagtgtcgccgtgagctctgtggacggtagtagtacatgtgtctaatgtacaagtagagtgagattgtatctatatatgtattttttccctaaaaataaaacttcattcggctctcatcggaatgcgagattatattgcgag

SEQ ID NO: 10346 - DNA, 1577 bp, Zea Mays
tttagatatttcattacatagcattgaatctgtggaaatttgtaccatagggaagcaacagaggcatttgctaactacctgtcacatatttgccacctgcattttgttaaggcccattaggcccaggccctactggctatttcgcctacagtccttagggacctttatcaattatctatcccaaggttgaccttgatccttatgggtcaccagctgcattccttgattcagcggttcaatgtgtagcagatgggggcatcttgatgtgctcagctacagacatggcagtgcttgctggtggaaatgcagaagtttgtttttctaagtatggttcttatccattaagaggtaaacactgccatgaaatggcgctgaggattcttcttgcctgcattgagtcacatgcaatccgtcacaagcgctacatagttcctataatatcagtacacatggatttctacattagggtttttctcggctagcacagtaaaaagctcaccactcaaattggcacatgtttaccaatgcactgggtgcaattcattttacctgcaaaatattggaagaattcattcaaaggataaggaaaacatagctgtaccaaattttcgccttactctgcctgaagtatgttctgaatgtggccatcaatttgttatggggggacctctttggagttatccaatacatgacaaggtatgggctgcttcaatattatcagatattcatgctatgagagaagcatatccagcttatccaaaaatttcggctatactatcttcagtctcagaggaattgctggaggcacctttatttgtgagtcttcacaatctgtgtgcaatactgaagtgcactactccaaccatggttatgttacaatgtgctatcagaaatgctgggtatcaagtatcaggaagtcatgtggacccgctagctcttaaaacagatgccccgatgtcagtgatctgggacatcatgcgatgctgggtcaagcttcacccagttaaacatcgacctggaaatcatcctggcaatgtgatactttcccaagagcctaaatttcaggcaaaattttccagagtactgggggcctcggtcacccggaagcgcgcaagattcatgccaaatcctgagaagtattggggtcctgggacgaaggctggcaggaatccgagaacatttcagatggataaccgtaactgacgcgatctccgcgccagagcccagaagacggataatttagtttattgctttgtcaattgatatagtttgtgcgattgcaatatttgaatgatgtttgtgagtttgttccttaagttcacccttcctaaaattttaggttgagtccaccggtgaccggcagcatggctccaacactagacaggacatacgttaggtatttttggtcgaagatcgttatggacagtcttcattatcatcaaagatacatctatgattttttgaagagaaaaacgacttctacaaattcaacatgtgggaggtaacaaataggagcctctctaaagatcgttagacatacaaccaatattttggttgaaaaccgctatgactatgaa

SEQ ID NO: 10347 - DNA, 2072 bp, Zea Mays
caccaaactcagacccacacactgaaattcccctaaaatcactacggaccacttcaccggcggctcgccgtactccgccgccgtaaaccgatgaccctttcattaggcttgttgcggtcaggcctcctcaaccggcgcatcaaccaaccggcgaatcaagtccttcgcctccacctcgcattctcctccgcctcgccgtccccgtccgacccctccgccgccgccgccggcccccagaccaccatcagggaagggaaagtggaaatatttttggacgagtccaactcagtcttctacaacaagacccaggttaacaatagagatatttccattgctgtattgagatcatttattttgaaaagacatgaagaatatgctgcccgatcaagaaaagcaggaccaggagacactacattgagtgcgcaagctaagtataaagagccgaaagttcttgaggcattagctgcatcagggctaagagccattaggtatgctgttgaggtagatggaattggtgaagttactgctgttgacaataatgaagccgctgtagaagcctgcaagaaaaatatacagcacaatggcagtcttgcatcttcgaaggtggtaccacatcacgctgatgcacgtgtctacatgctcacacacccaaaagaatttgatgtggttgaccttgatccttatgggtcaccagctgcattccttgattcagcggttcaatgtgtagcagatgggggcatcttgatgtgctcagctacagacatggcagtgcttgctggtggaaatgcagaagtttgtttttctaagtatggttcttatccattaagaggtaaacactgccatgaaatggcgctgaggattcttcttgcctgcattgagtcacatgcaatccgtcacaagcgctacatagttcctataatatcagtacacatggatttctacattagggtttttgtgcgaatcttcacctcggctagcacagtaaaaagctcaccactcaaattggcacatgtttaccaatgcactgggtgcaattcattttacctgcaaaatattggaagaattcattcaaaggataaggaaaacatagctgtaccaaattttcgccttactctgcctgaagtatgttctgaatgtggccatcaatttgttatggggggacctctttggagttatccaatacatgacaaggtatgggctgcttcaatattatcagatattcatgctatgagagaagcatatccagcttatccaaaaatttcggctatactatcttcagtctcagaggaattgctggaggcacctttatttgtgagtcttcacaatctgtgtgcaatactgaagtgcactactccaaccatggttatgttacaatgtgctatcagaaatgctgggtatcaagtatcaggaagtcatgtggacccgctagctcttaaaacagatgccccgatgtcagtgatctgggacatcatgcgatgctgggtcaagcttcacccagttaaacatcgacctggaaatcatcctggcaatgtgatactttcccaagagcctaaatttcaggcaaaattttccagagtactgggggcctcggtcacccggaagcgcgcaagattcatgccaaatcctgagaagtattggggtcctgggacgaaggctggcaggaatccgagaacatttcagatggataaccgtaactgacgcgatctccgcgccagagcccagaagacggataatttagtttattgctttgtcaattgatatagtttgtgcgattgcaatatttgaatgatgtttgtgagtttgttccttaagttcacccttcctaaaattttaggttgagtccaccggtgaccggcagcatggctccaacactagacaggacatacgttaggtatttttggtcgaagatcgttatggacagtcttcattatcatcaaagatacatctatgattttttgaagagaaaaacgacttctacaaattcaacatgtgggaggtaacaaataggagcctctctaaagatcgttagacatacaaccaatattttggttgaaaaccgctatgactatgaa

SEQ ID NO: 10348 - DNA, 3985 bp, Zea Mays
caccaaactcagacccacacactgaaattcccctaaaatcactacggaccacttcaccggcggctcgccgtactccgccgccgtaaaccgatgaccctttcattaggcttgttgcggtcaggcctcctcaaccggcgcatcaaccaaccggcgaatcaagtccttcgcctccacctcgcattctcctccgcctcgccgtccccgtccgacccctccgccgccgccgccggcccccagaccaccatcagggaagggaaagtggaaatatttttggacgagtccaactcagtcttctacaacaagacccaggttaacaatagagatatttccattgctgtattgagatcatttattttgaaaagacatgaagaatatgctgcccgatcaagaaaagcaggaccaggagacactacattgagtgcgcaagctaagtataaagagccgaaagttcttgaggcattagctgcatcagggctaagagccattaggtatgctgttgaggtagatggaattggtgaagttactgctgttgacaataatgaagccgctgtagaagcctgcaagaaaaatatacagcacaatggcagtcttgcatcttcgaaggtggtaccacatcacgctgatgcacgtgtctacatgctcacacacccaaaagaatttgatgtgtggatgggcttccacaccttgttgtccttcgaggtgcattgcgagaggaaaaacagcttgcacttgtggatccaggagacaggcttgtggctgtcatcatacttcagaacgtgaggtttgtattgccagggtgtagtgaggtggcgtgttgtgctcctgcttgtccttgccgacagacaagctataactctcgtcaatcgtcatgtttgtgcaactgcagcggttgctggtcctgagcaggtgaccttgatcggcttcagcatggatacctcatccttgatggaagtggtttccgcaaggatcttccaacagcattcttaaaatcgatagctgagatgatgccccccctctgattgggtttgtggtgatggccgatgcagtggtggcagaagtaaggatggatgcatgattgcatcggtaggcactgtgatattactagatgcagaagagcgtcgggctcctaataaactaacattctgctaattatccttttgattatctaatgcttgaagcagcaaactcaaaacaaaacttagggcagacctagtgccaaaggctcccacatgagtggaatcaggggaagggataaactgaggcgagccttccccgcaaatgtggaggggctgcttgaatctgcgacttggtgactcaatgagacaactctcactgaggctaactccagcaacctccatatcccacctcctatctcactctctatttcaaactccactctgtaaacagtgcaaaacaatgttttgcacgaccatatgcacgctttgctgtcctcaccactgcaccaagcctgcctttcttaaactcaaaacaaaattaaggtacttaaatttctctgccacttgtggacgcttgattgttccttttgcacaagtactccttggtcttgccaatggaagtctccacaacatttcaagatttaagaggtagaaatgttgatagtttttcttggtgtattaataattgaattatcaaaatgctgtactattttaactgaaactttaacagtttaacacatattcctaataaaagataacaaagttctcttacctttccgaagttcgtagaaccagtttaagttttatcatttatgtttatgtgatattgagtagtcaatgccccacatacagaaatgttcataattgttcttgtgatcctgtctaccctttttcctaaccagttttgacaaggttattctagattaccttctataggatattagccatgaatttagtttctgtcaacacagcatgtgtgcatctttaggtggtcattaatcaataacacatatcacataggacaacaatgtgttatgggactcctagttcacataaaccctggtgtggattagaaacattgaatgcagtaatgtgaacctcataatactataagaccttgtgggtttagaaggagcaggttggtttggaagtttattcgctagcttagaatttaatatatacatttctaccccttaagtcctctcacattgcagttttgcactggtctgtcttgctagcaaacataattattcaaactagcacaagaaaagccatgtagtgtctattgaatcccctgtaccaaaaataactagaaggagccagcctgcctaatgctcttggttgcgacagggagggaggtttaatattaggaattgtatcatagaatgatagaagtgctttggtgacaaatttacatttgttcagttcatatgaccaatttagatatttcattacatagcattgaatctgtggaaatttgtaccatagggaagcaacagaggcatttgctaactacctgtcacatatttgccacctgcattttgttaaggcccattaggcccaggccctactggctatttcgcctacagtccttagggacctttatcaattatctatcccaaggttgaccttgatccttatgggtcaccagctgcattccttgattcagcggttcaatgtgtagcagatgggggcatcttgatgtgctcagctacagacatggcagtgcttgctggtggaaatgcagaagtttgtttttctaagtatggttcttatccattaagaggtaaacactgccatgaaatggcgctgaggattcttcttgcctgcattgagtcacatgcaatccgtcacaagcgctacatagttcctataatatcagtacacatggatttctacattagggtttttgtgcgaatcttcacctcggctagcacagtaaaaagctcaccactcaaattggcacatgtttaccaatgcactgggtgcaattcattttacctgcaaaatattggaagaattcattcaaaggataaggaaaacatagctgtaccaaattttcgccttactctgcctgaagtatgttctgaatgtggccatcaatttgttatggggggacctctttggagttatccaatacatgacaaggtatgggctgcttcaatattatcagatattcatgctatgagagaagcatatccagcttatccaaaaatttcggctatactatcttcagtctcagaggaattgctggaggcacctttatttgtgagtcttcacaatctgtgtgcaatactgaagtgcactactccaaccatggttatgttacaatgtgctatcagaaatgctgggtatcaagtatcaggaagtcatgtggacccgctagctcttaaaacagatgccccgatgtcagtgatctgggacatcatgcgatgctgggtcaagcttcacccagttaaacatcgacctggaaatcatcctggcaatgtgatactttcccaagagcctaaatttcaggcaaaattttccagagtactgggggcctcggtcacccggaagcgcgcaagattcatgccaaatcctgagaagtattggggtcctgggacgaaggctggcaggaatccgagaacatttcagatggataaccgtaactgacgcgatctccgcgccagagcccagaagacggataatttagtttattgctttgtcaattgatatagtttgtgcgattgcaatatttgaatgatgtttgtgagtttgttccttaagttcacccttcctaaaattttaggttgagtccaccggtgaccggcagcatggctccaacactagacaggacatacgttaggtatttttggtcgaagatcgttatggacagtcttcattatcatcaaagatacatctatgattttttgaagagaaaaacgacttctacaaattcaacatgtgggaggtaacaaataggagcctctctaaagatcgttagacatacaaccaatattttggttgaaaaccgctatgactatgaa

SEQ ID NO: 10349 - DNA, 2541 bp, Zea Mays
  misc_feature (2541)..(2541): n is a, c, g, or t
tccaaaccctaactctaggtccatcccatcgcagagaaaaccttcggtgcccggctgatggggaggaggaaggagcgacgcctagcggccatggccgcggcgggccgcagggtcaagctcgacctcttcctcgattcctcccccggggaggcatcacataataatggaataggaggtgaaaaccgtgaccaacagactgtggttcccacttctccatcttcttcaggtgggtttcatcaattttcttccaagggatatgtaaagaagacatgcctatggattatggaacataaatatggtggaaatttggatttgtgtacaagcatgtataccttcgcatatctggttccgagatacatgtaggattaccggcctgcaaggaacattgagtaaattcttcagactgagctaccactgtcaaaatttagtgaatgcctatgggtaacctcactcagttggcagcatctaagcgtggggatttcaggatgtgattgttccctcctcggttcataaaaaggagaatcctctagcattgcttgggcaatatagtgatgatgaagtggaagatgaggaagcagcagatcaacccactggtgaagctaaggggagtccaggagatgctagtgctcagttaactagtcagcgtgcggatatagctggtgataacagtgaggcaaaaattgaaccatcggcttctgtcggtgatcaacaagaagcagcacctcaagctggtgacgttaagaactacacccaaagtgttactgaagaaaacactatagctcctgagccaactgtacaagaagagagtgtgaaagcaactgaatctcttcccgattcatctggcatgcagattgttggtgatgtcggtggaaattggaaagcagtaatgcatgaacagagtaatcagtgttattactggaacacagttactggagaaacttcttgggatataccaaatggattagcttcaggagttgcaactgcatttgttccttctgatgtggactattcaaatgaagctcaaacccatgtccttccccacagcacactggaagcatatccaagtgatatgtctgttgggaacggcacaacttatcctaatttgggaatggcatgtggaagtgcacatgttactcaagatgcttatgcttatgctgctcctatcgccagtaatgagcctttggacattgatcccttgtatcttgcaaaatatggtgatggtttgctgcaaagattggacctgctggaaaggctctgtggctcgaacaaaggtcttgaattgataagaagagaaattgagatacggatgtcggacttaaatgcactttcatcttatggatcttctttgctcccattgtggttgcatgctgaggtgcacctgaagcaactagactcttctatttccaagctggaaatgaactatcatgcagattcagaacctaggaattcaaagacagaggttgctgaacacagggcacctgatgatgctgacttgataacaccctccaatggcgaggctttgaagtatgaagtttgtgctgggattactatcgatgcaaatatgaagattggtaagccagcttcaacgtctcagaattcacaaggtagggataatgcagctgttcctccaaaaattgaatctgacaatgatgaagatatggatgtggaaatggaagttgatgaagataatgtcgaagagcaggcacagtgcagttctgtacctgaaaaggagcatcctccttcagaacagttgagttcatctaatttgccatcatttgaagatcctacacctcctgaggataattctgttcctccacctccgccagaagaggaatggattccacctccaccacctgaacacgaacacgaaccagctcctccagcttccccagaagagccggctgcatcatatgttcaggtggatacaattcctcagccatatatagctcaagaaaatgttggctatacaatttcaggaatggagtattatagtactgaaggtacaaatgccaattactatatgcaatcactgtggctgcaagcgctgtagcagctgaacattctggatactacgcttcatcagtctctgccatttatagcagtgcagcagatatcaaaacaagctcagcttctcttgtttctgcaattagcaattcggatctaaaaaatcatgataatgttatatccaatgatgcaagtattgtgcctttcacccaagctgtagtagcaacatcagctgcaggaacgacatctgttcctgaaagttctacacagccttctagcagtactacaaaccagatcaaagttattcgcaacaagaagcgggttgttggtattacatcgtctctgaggtctaataagaaggtttcaagtttggtagataaggttgctctctacaacgaatctctgtattctgttattattgcatattaggtgcctgaaatttacatttttagcatgttcctgtatattcatggaattaacaaatcctagtttcttactctcgatttgagacgttctctcaactctcaaccatctaan

SEQ ID NO: 10350 - DNA, 2630 bp, Zea Mays
cgtacgcgccacgtccttgggccccggcgcagttgtaccctccatctctgtcctctttacttgccccatccatcccacgccgatcgccaggcgccagcagcaggctagctctgctccgccgctcactgctcgctagctactggaccgcgcttccctctctccatcgcgccggcgcgcacggctagctctagctcccggagccgccctttcatggtccccgccgtggtcgggacgagatgcctccgctcgcattcctccgccgctacctccccgcgaggcttctcgcgcgagcgtgcgatggtggagtccgggggagcccgggcgtggcgcgggacgaggaggccggaggcagcggcggactgagcggccggtcggcgggggcgccgtccggggagtgctacgcgtgcacgcagcccggggtgccggcgttccactccacggcctgcgaccaggtgcactcgccggactgggacgccgacgcggggtcctcgctggtgccggtccaggcgcagcagcaggcccagccggcggcggcggcggcgcagcacgcggcgcggtggctgttcgggcccgtgctggacccgcgcagcaagcgcgtgcagcgctggaaccgctggatcctgctcggccgcgccgccgcgctggcgctggacccgctcttcttctacgcgctctccatcggccgcgccggccggccctgcctctacttggacgccggcctcgccgccgcggtcaccgcgctccggacctgcgccgacgtcgcgcacctcgcgcacgtgctcctgcagttccgcctcgcctacgtctcccgcgagtccctcgtcgtcgggtgcggcaagctcgtctgggacgcccgcgccatcgccgcgcactacgcccgctccgtcaagggcctctgcttcgacctcttcgtcatcctccccatcccgcaggtcatcttctggttggttataccaaagttaattagggaagaacgtgttaggcttatcatgacgatactgctactcatgttcatatttcaatttctccccaaggtctaccatagtatacacatcatgaggaaaatgcagaaggtgacgggttacatctttggatcgatatggtggggatttggtttaaatctatttgcctatttcattgcttctcatattgcaggtgggtgctggtatgttcttgcaatccagcgcattgcttcctgcctccaggaagaatgcaagaaaaacaatagttgtgatctaatatcactagcttgttcgaaggagatatgctttcaccctccttggtcttcgaatgttaatgggttcgcatgtgatacgaacatgacctcctttagtcaacgaaatgtgtctacttgtttaagtggtaaagggtcgtttgcttatggaatctatttgggggctcttcctgttatatcgagcaattcgcttgctgtcaaaattctctatcctatattttggggactcatgacactcaggtatttctgcacgcggtcctggcaaggaagcggaagatgcagctgcggttccgagacatggaatggtggatgagacggaggcagctgccgtctcggctgaggcagagggtgcgcaaatatgagcgcgaacgctgggccgccgtcacgggagacgaggagatggagatgatcaaggatctgcctgaaggactgaggcgggacatcaagcgctacctctgcctcgagctggttaagcaggttccgctgttccatggcatggacgatctgatcctggataacatctgcgaccggctgcggccactggtgttctccagcggggagaaggtgatccgagagggcgaccccgtgcagcgcatggtgttcatcctgcagggcaagctccggagcacgcagccgctgaccaagggcgtggtggcaacgtgcatgctaggggcgggcaacttcctaggcgacgagctgctgtcgtggtgcctgcgccgccccttcgtggaccggctccccgcgtcgtcggccacgttcgagtgcgtggaggcggcgcaggcgttctgcctcgacgcgccggacctgcggttcatcaccgagcacttccgctacaagttcgccaacgagaagctcaggcgcacggcgcggtactactcgtccaactggcggacgtgggccgccgtcaacatccagctcgcgtggcgcaggtatagggcccgggcatcgacggacctggcggcgatggccgcgccgccgttggcgggcggacccgacgacggggaccggcggctcagacactacgcggccatgttcatgtcgctccggccgcatgaccacctagagtgatcaggaggggggacgggaccatcctagctgtgccggccgggtcatggtgtctgtacagtgtacactagtggtatgttgttgtcatcttctgcgtgagtgaactggtggttcgggatttgtcatttaaagaaggtcaataatggagaaatagtttcttagcccgattcaattgtcttcctttcaccaagaataaaaattacttctgccggactgcctctccgcgttggtctggattgcttttaccaagaataaaaattgcagccccggctgcagcggctgatggcaggacagattcagacgcgcagagaatacgtacaagtcgccgaag

SEQ ID NO: 10351 - DNA, 608 bp, Zea Mays
gtttctttgtgttttaggttgtatacaatagaatgaccaggcagagctgtggatttggaattatgacaatgtctttagctgaaaaagtcagggttgtggtcgagcaatttaatgattatacatttcatggaggaccactgagggtgaactatgggccaccgccacccatggctctgttgaggaggtcaacaatgccatatcaaacctgatggcatcataggtacgctagatgattatgcgatatgaagggcatgaaccaaactgaaccacaagatggatgatctgacccagtgccaggatgagagatgctcaccgagtggtcgtcgtttgacaacactagcttagtgttattcgaggcaactctttcacatggatttttaaaatctgtagtgtttaaagaaccagaaatggatttgcttgtttctaattcattttgcttgttggatgtcgatatgcacatgcattttcagtcagcttatgatcaagggtacaaataagatcatgccaactctactccatgtactgctggtgtcacaggtccttaatgctttgttcaacctttgcaaaattaataaaagaagacatgaacaagcaaccgaaaatagaat

SEQ ID NO: 10352 - DNA, 886 bp, Zea Mays
caacttctttaaataatatgaattcctattgtttgatgaaggaggaataaatacagagcgaagataggtacgctagatgattatgcgatatgaagggcatgaaccaaactgaaccacaagatggatgatctgacccagtgccaggatgagagatgctcaccgagtggtcgtcgtttgacaacactagcttagtgttattcgaggcaactctttcacatggatttttaaaatctgtagtgtttaaagaaccagaaatggatttgcttgtttctaattcattttgcttgttggatgtcgatatgcacatgcattttcagtcagcttatgatcaagggtacaaataagatcatgccaactctactccatgtactgctggtgtcacagactcacctctgcggcagtatgccctgcctttgctgtgtacttaaatctgctggaggatgatgcatgggcatgcacgacattagattctattgctgtttgtttgactcacgataatgatcacagaaaagtggaaaaaacactgttgaaaaaagaggccattcagaatttagtgaagttcttccaagattgcccagaacagttttttggccatatattggacgctttcttgaagataataacgaaatcttctaggctaaatacaacaatggctaccaatggtttaacaacattgctcattgcaagacttgaccattcaaatttggtggtcgcaaaagtgtggagacttgaattcatataatgtgaggcttaacattagtgcaaacagttgtattttagtttagatttagagcacacttatgtatgcgttgtttgacaatgcttatttatgatatattgaatggtacttatttatattatattaattataatgttgttcaatata

SEQ ID NO: 10353 - DNA, 1073 bp, Zea Mays
cccgcccaaaccctagcgcacagtagccgtcattcacctcctgctcgcccgcatccgacttgcccgccgaccacctcatccctcctaccgtgtagccctagccccaaccccttggtggcctagctccgtcggtcggcggccaaccgtagcagtcgctcgtcagcaacatcacccagccctagcctcacactgctctcaccagcagtcgccaacaacagcagccagtggcagtgagcatccgcgcacagcacagctcccgccttgattccccgccctccgctcgcggcctcgcgctccagtcactaacaggtagcatcagcaagcagtggcatcgaaggcgtggagaccggccagccgccaacgccctctgtagatcgctcggcctctccaaacgaccagggccagaaacatttcatggaggaccactgagggtgaactatgggccaccgccacccatggctctgttgaggaggtcaacaatgccatatcaaacctgatggcatctcagcttatgatcaagggtacaaataagatcatgccaactctactccatgtactgctggtgtcacagactcacctctgcggcagtatgccctgcctttgctgtgtacttaaatctgctggaggatgatgcatgggcatgcacgacattagattctattgctgtttgtttgactcacgataatgatcacagaaaagtggaaaaaacactgttgaaaaaagaggccattcagaatttagtgaagttcttccaagattgcccagaacagttttttggccatatattggacgctttcttgaagataataacgaaatcttctaggctaaatacaacaatggctaccaatggtttaacaacattgctcattgcaagacttgaccattcaaatttggtggtcgcaaaagtgtggagacttgaattcatataatgtgaggcttaacattagtgcaaacagttgtattttagtttagatttagagcacacttatgtatgcgttgtttgacaatgcttatttatgatatattgaatggtacttatttatattatattaattataatgttgttcaatata

SEQ ID NO: 10354 - DNA, 1194 bp, Zea Mays
acagtagccgtcattcacctcctgctcgcccgcatccgacttgcccgccgaccacctcatccctcctaccgtgtagccctagccccaaccccttggtggcctagctccgtcggtcggcggccaaccgtagcagtcgctcgtcagcaacatcacccagccctagcctcacactgctctcaccagcagtcgccaacaacagcagccagtggcagtgagcatccgcgcacagcacagctcccgccttgattccccgccctccgctcgcggcctcgcgctccagtcactaacaggtagcatcagcaagcagtggcatcgaaggcgtggagaccggccagccgccaacgccctctgtagatcgctcggcctctccaaacgaccagggccagaagtagtgctaacatttcatggaggaccactgagggtgaactatgggccaccgccacccatggctctgttgaggaggtcaacaatgccatatcaaacctgatggcatcataggtacgctagatgattatgcgatatgaagggcatgaaccaaactgaaccacaagatggatgatctgacccagtgccaggatgagagatgctcaccgagtggtcgtcgtttgacaacactagcttagtgttattcgaggcaactctttcacatggatttttaaaatctgtagtgtttaaagaaccagaaatggatttgcttgtttctaattcattttgcttgttggatgtcgatatgcacatgcattttcagtcagcttatgatcaagggtacaaataagatcatgccaactctactccatgtactgctggtgtcacagaaaagtggaaaaaacactgttgaaaaaagaggccattcagaatttagtgaagttcttccaagattgcccagaacagttttttggccatatattggacgctttcttgaagataataacgaaatcttctaggctaaatacaacaatggctaccaatggtttaacaacattgctcattgcaagacttgaccattcaaatttggtggtcgcaaaagtgtggagacttgaattcatataatgtgaggcttaacattagtgcaaacagttgtattttagtttagatttagagcacacttatgtatgcgttgtttgacaatgcttatttatgatatattgaatggtacttatttatattatattaattataatgttgttcaatata

SEQ ID NO: 10355 - DNA, 1596 bp, Zea Mays
caaaattttccgaattccaaacacatggccaaacacatggtgatgacaaggaacgccgaacgcgaccttgaccggagcagacgtttggagtctcagaccaatcgtcatatccgaccccataattttatttcgacatatcaagtctaaagcaagcgcactactcctcggatagccacggcagcagcagcagccatggcttgctccgcgcaccttgtgtcccagagcctctactcgtcccaccgcgccagcccgggcgggcctaggaatctccgttcccagggccgaccgccggcgcgggcgtctccctctgcgaggcctggctcaagggtcagtggctgccggggtgtcagcctgagagtcgccgcgtcgttcgagcagggaaggaggcaagtggaggtctcttatgacccacaagcgaggtttaaccagatagcagaccaaattgacaaggatgctgggatgacacggcttaacctattctcaccttgcaaaattaatgtgttcttgaggataacgggcaagagaccagatgggttccatgacctggcttctctatttcatgtcataagtttgggtgatactatcaaattctcattgtcaccaagtaaaagtagagatcgcctgtcaaccaatgttccaggtgtcccagttgatgaaagcaatttgatcatcaaggcactcaacctttaccgacagaaaactgggactaataacttcttctggatacatcttgataagaaggtcccaactggtgctggtcttggtggtggaagcagtaatgctgcaactgcactatgggccgctaaccagtttgctggctgcatagcttcagagaaggatcttcaagagtggtctggtgagattggatcagatatcccctttttcttttcacgaggagcagcatattgtacaggtagaggagagattgtccaagatatcccaaatcccttgccggaaaatttaccaatggttcttataaagccacctgaagcatgctcaactgctgaagtttacaagcgattcaggttggaacaaacaagtcaagctgatcccatgaccctgctcgaggaaataactcagaatgggatatcacaagatgtttgtgttaatgacctagagcctccagcttttgaggtgttgccctcacttaagaggttgaagaaacgaattattgcagctggccgggatgattatagtgctgtttttatgtcaggaagtggaagcacaattgttggtattggttcaccggatcctcctgcattcgtgtatgacgatgaagactacaaggatgtttttgtgtcagaggcttgcttgctcactcgcgacgagaacgagtggtacagggaaccaatctcggccaatgccacgtctggcaaagaaggaaagaacactacggtataggcggggattgttcacaagacaatctggttctggaatggaccattttcagtatagcaactattgatttgagcaacagtcagactaatggttccaggagaaatttatcccgtagatgtataaggatcaaatgaacaagggaaaatgactttctccgtgaatttttaacaatacaagcacacgtagttttgaaacaat

SEQ ID NO: 10356 - DNA, 1513 bp, Zea Mays
cgcgacgtggcgtctggcgtggtcgagcctctagagaagcgagccgtgcccgtctctcccaatccactccgtactcggcgctcctcccccgtcgccgccggaaatcaggaagcccaagtgctctcttgggtgcgctcgtcgccggtggcagtgagccagtgatgcatcttcatctccggcttccttattaggatcagcccgtcgatcgatcatggcgtcgtcgagctcggctgctactactagtggtgacagtcagggtctcaaggctcgagatgcctgcatcgtcggcgtcgcccgcacgcccatcggcgcacttctcgggtcgctgtcgtccctccccgccaccaagctcggctccatcgccatccagggtgctctcaagagggcgaaggtcgacccggcgctcgtgcaggaggttttcatgggcaacgtcctcagcgccaaccttggccaggctccggcaaggcaggcagcccttggcgccggcttgcccaactccgtgccatgtaccaccgtcaacaaagtttgttcctcgggaatgaaggctgtcatgtttgcggctcaaagtattcagctggggatcaacgatgttgtggtcgccggtggcatggaaagcatgtcgaatgccccaaaatatgtggctgaagcaagacgaggatcacggttcggacatgatgtccttgttgatgggatgctcaaggatggcctgtgggatgtctataacgatttcccgatgggaatgtgtgctgaattgtgttcagaccagcactcaatctcaagggaggagcaggattcgtatgctatcctcagcaatgaacgtggcatagcagctcaggacagcggtgcattttcttgggagattgttcctgttgaaatttcttctggtagagggaaaccaccagttgttgttgacaaggatgagagtcttgcaaagtttgatccagtaaagctgaagaaacttgggccaacttttaagacgaatggttctgtaacggctggcaattcttctagtataagtgatggcgctgctgcaattgtccttgtcagtggagagaaagccaagaatcttggccttgaagttattgcaaggattacagggtatgctgatgctgcacaggcacctgagctgtttacgacagctccagcccttgccattccaaaggctatatcaaatgcagctcttcaaacttcacagatagattattatgaagtaaatgaggctttctctgttgttgctatagctaatcagaggcttcttggtatcccttccggaaagctaaacttaagtggtggtgctgtttccctgggccatcctatcggttgcagtggtgcacggataattgtcactttgcttgggattcttagacagaaaaatggaaaatttggtgttgctggagtttgcaatggcggcggcggcgcttcagccctcgttttggagctcatcgcaattatcctgtcaactggagacaggacaggacactatcatccactgaagcattgccgtgtcggtcat

SEQ ID NO: 10357 - DNA, 1974 bp, Zea Mays
caaaatacaggcggaaaagcaagaagcgtgaccacttccttatcgtctcctcctttcctcccctcaactccaatcgaatcgctcgaaccattcccaggtttgtgcgtcgatctaggcttgcgcgaggatccaattgcatcccgctcccctttgagcttgtgatcttgggagccggagttcttcgcgagcctcctcccacccccacccccaccccaccccccgatttcttttggtttatttgtgcgagttttctcaagagcagaaaaggctgtttgcaattccggtgcactcaggcctcaagatccaactctgaggcctttcccgcgctatccgcatcgatctacgcaagaggatgggcaacgcgggtagcaacggtggaggcgctgccgctggtcaccgccgtcggagctccggccacggccaccaccaccaggcgccgccgcctcaccagccgcaggagactgcggccaaccgctacgtgttcgcggccgccacgccgtacccgccccagtaccctaaccccaacccgccgcagtactacccgcagtacgggaactactacccaccaccaccaccatccgtgccggtgccccttccggcgccgtacgaccaccaccacaggccacccaccgccgcccccggcgagttcccgcccccgcccctcacccacccccaccactaccctggctgggctgggcggtatccctcctacggacaacatctgcctatgcccactccctacgttgagcaccagaaggccgtcactatccgcaacgacgtcaaccttaagaaggagacgcttaggatcgagcctgatgaagagtgccctggccacttcctcgttgccttcacctttgacgccacggtcgctggcagcatgactgtttacttgtttgcaaaggaagagctcaactgcaatctaacagcagtgaaagaagacctaatgaagcccgttactgttagcttcaaagagggtcttggtcaaaaattcaggcaaccttcaggaacaggaattgacttttcagtgtttgaagaatcagatttattaaagcagggggacatggatgtatatccacttgcagttaaagctgaaacaacattgcttgttgatcacccaccagaaggggatgaccaaaagatgaaaactcctaactcacagatcacccaggccgtgtttgaaaagaaagaaaatggggattatcatgtaagagttgtttgccagatcctttgggtcaatggaactaggtatgaactgcaagaaatatatggcatagggaactccgtggaaggtgatgctgatgcaaatgatccagggaaagaatgtgttatttgcctctcagaaccaagggatactactgtcctcccatgtaggcatatgtgagtgcgccaaggtcctgaggtaccaaaccactcggtgccccatctgcaggcagcctgttgagcgtctcctcgagatcaaagtgaacaacaaatctgaagatcagcaacagatgccccaatcgccaccgctcccagcactggatccgcagcaggaagaggtgtagccatgatcaaagttctggcatggctttgccgacctctgctgtatctgcctatctggaggtgggagaccaagatgccaagaagagtgtgtaccatatatacaccatgcatgcgtgtgccatggctaccttaagaagcgtagcgaggaggattcctcatttctggttgacttcctccaggaaaccaggggaagagaaggttgtctcataaatttgtacaaaaaatgactatttcaccttgattacatgccttctctgttatgccctgaaaagtcgatgattattttccttgtgccagtcataaaacattccaagtgcaatagctcgtctggtggtgagagattttgtgtgactaaggcccgagggactaatctttagtccttggcttttagatggtgtttggtttagacatagttaagggatgacaatgaga

SEQ ID NO: 10358 - DNA, 1075 bp, Zea Mays
tcatgattgacttgctaatccgacgacgacgacgagcgagcgcattaacaacgggaatagattccctgcctccggatatgattatcgccgtgtccccagcggtcgacaacaagcgagcatagattattagtaatcgcgattaggaggagctaaaaactaaacaacttcccacaggcgcggcagacgcagagggcagagcacactcgccgtcgccgtcgccgtcgccatgcctgcccctatcagcgtctattcctcctcgtcctcctgctctttaactaccctggtacgacgggtcgggatgcggagcggataacgcgcgtcggccgtgcaggcaggcaggcagccaaggaggcgaagcggccgccgtgccgaggaaacagacgcccagccacccagattccaagggcggcgccggcggcatgggcatgaacatggtgaccacggtgatggccttctcggtcagcgccttcttcgtgctcttcgtcttcaccaggctgctctgcgcgcgcctccacctgtccagggccgccgccgccgcccagggctacaacgtggagcgcgggacccacggcctggagccgtccgtggtgacgaccttccccaccgtcaagctcggcgacggcggccagcaaccgccgccggtgcaggaggaatcgcagtgcaccgtgtgcctggaggagtacgaggccaaggacgtggtgcgcgtgctgcccgcctgcggccacgccttccacgcgacctgcatcgacgcctggctgaggcagcaccccacctgccccgtctgccgcgcctccctgcgcgccaggaacggctgccgcgccacgccggtcgactacagcctcctcgtcgccggcgccgacgccgcagccaccgtccagcatgttcccgcgtcctcgtccggcgcgtcaccgcaggcagtcggacgccagcgacagaccgacgacactgggcgggcggatggcttgctggagatcgtctccgaagagcccgcctcctcgcgagatccgagccctgctgttgctgctgctggttggtaaccattctcttctgcgcccgctgacgcggagaggcagag

SEQ ID NO: 10359 - DNA, 1056 bp, Zea Mays
ttgcaggttaaggtccagccgaagaaggttattcaaccgaagaaaagtacacaacctgctaaacaggagtccagtgatgacagcagctctgagagctcctcagacgatgaaccttccaaaaaaccagttgccggttcaaaaaagcctcctgccagtagtagcagcagtgatgatagcagtgacagtgatgatagcagctctgatgaggaaccagcaaagaagcccacggtcctttcaaagaagcccactgtcctttcaaagaagcccactgtcctttcaaaaaaacctgtcacagcagtcagtaatggttcaaaacaggttaaacctgatagcagcagctctgacagtagctcagatgaggatgaagatattcctgctaaagctcaagtagtagccaagaaaaaggaagaatctggtagcagttctgattctgatagtgaatttgagtctgacgatgaggatagcaatgcgaaaacagtacaacctgccaaggctgctgctattaaaaagaaggaagattctagtgagagctcagaaactgactcacagtcagattcagaagattcagaacctgaaaaacctactgtccctgcgaaaaggcctctagcaacaaataaaaagaatgaacaacgagaaatctgatgacagctctgatgagagttctgatgaaagtgatgaggaacctccacaaaagaaaactaagaattctgcaccttctggtgctgcaaaggctgccactaatgtttcaaagaaaaaaagcagcagtgatgaagatgatgaaagttcagaagaaagctctgatgatgaggatacagaacaagttgaaactaaggaaacttctgtagtcactacccagaagccggcacataatgaacctaaaactcctgccaaaagccaaagtcaggctactggttcaaagactatttttgttgggaatttagcctacagtatagagcgtgaacaagttaaggaattttttgaggaggctggtgaagttgttgatgttcgtttggctacttttgatgatgggagtttcaagggttttggacatgttcc

SEQ ID NO: 10360 - DNA, 1356 bp, Zea Mays
ttgcaggttaaggtccagccgaagaaggttattcaaccgaagaaaagtacacaacctgctaaacaggagtccagtgatgacagcagctctgagagctcctcagacgatgaaccttccaaaaaaccagttgccggttcaaaaaagcctcctgccagtagtagcagcagtgatgatagcagtgacagtgatgatagcagctctgatgaggaaccagcaaagaagcccacggtcctttcaaagaagcccactgtcctttcaaagaagcccactgtcctttcaaaaaaacctgtcacagcagtcagtaatggttcaaaacaggttaaacctgatagcagcagctctgacagtagctcagatgaggatgaaaaacctgctgctagcctaaagaagcctgttgttgcctctgtgcaaaagaagacccaagaatctgatagctctgacagtgattctgatgaggatgaatcagaagatgatattcctgctaaagctcaagtagtagccaagaaaaaggaagagtccagtagcagttctgattctgatagtgattctgagtccgaggatgagaaacctgctgctaacctaaagaagcctccggttccctctgtgcaaaagaagacccaagaatctgacagctctgacagtgattctgatgaggatgaatcagatgatattcctgctaaagctcaagtagtagccaagaaaaaggaagaatctggtagcagttctgattctgatagtgaatttgagtctgacgatgagcaatgcgaaaacagtacaacctgccaaggctgctgctattaaaaagaaggaagattctagtgagagctcagaaactgactcacagtcagattcagaagattcagaacctgaaaaacctactgtccctgcgaaaaggcctctagcaacaaataaaaagaatgaacaatccagcgagaaatctgatgacagctctgatgagagttctgatgaaagtgatgaggaacctccacaaaagaaaactaagaattctgcaccttctggtgctgcaaaggctgccactaatgtttcaaagaaaaaaagcagcagtgatgaagatgatgaaagttcagaagaaagctctgatgatgaggatacagaacaagttgaaactaaggaaacttctgtagtcactacccagaagccggcacataatgaacctaaaactcctgccaaaagccaaagtcaggctactggttcaaagactatttttgttgggaatttagcctacagtatagagcgtgaacaagttaaggaattttttgaggaggctggtgaagttgttgatgttcgtttggctacttttgatgatgggagtttcaagggttttggacatgttcc

SEQ ID NO: 10361 - DNA, 1999 bp, Zea Mays
cgcggagggctcgcgtcggggtccatctgaacatccgccagaccgccgccaccatgccgcaacctaccgccgattcgagcaccatggtcgccggcgagcatcagcaacaacagcaacctgccaccgcgcggatctcctcctcctcaaccagctccggaaggctcgtcactccgttctggaaagagaagtatgagagggacgcgaggaggtactgggacatcttctacaggcgccacgaggacaagttcttcaaggatcgacactacctggataaagaatgggggaaatactttaagggacgagatggagaaaagaaggtggttctagagttcaatgtataggttggttgtggagctgggaacacaatctatccattgctttctacatacccagatatttttgtccacgcctgcgatttttctccacgagctgtcaatttggtcaagaaacacaaggacttcaaagctgaccggataaatgcatttgtttgtgatattgcatcagaacaactaaccgagaatgtggaaccttcttctgctgacattgtaacgatgatctttatgctctctgcagttgcaccagataaaatgcctatagttctggagaatgttagaagtgtcttaaaacatggtggccgtgttctttttcgggactatgccttcggtgaccttgcacaggaaagactgatgtcaaagggccaacaaataagtgagaacttctatgtcagaggtgatggtacgcgtgcatattacttttcaaatgaatatctggtagatttattttcaaaatgtggacttactcttgaggagatatgtgtgcacaacaagcaagttgaaaaccgttcactggagctggtgatgaacaggaattggatccaagctaccttcaccctaaattcagctagtcctcaaggtccaaatggtcaacacgatctccttgcttacgaaggagaggatgataaggtagttactgacacatctaagaagaaaagcagcggtgaagaaatcgatctttctgaagatttttgcaacatgtttgggacatcacacagccttgatgaggtacaaatcattggggtgaaagcaaaaggccacgacttcaaaataagaatgctcaggaaggaataccagcacacctgcagatcaactggcttaatgctctgggaatctgctcaattcatgtgctgtcttttagcagagaacccttcgatcgttgcaagcaaaagggtcctggagttgggctgtggctcagctggcatctgctcgatggttgctgcaagtttcactccctttgttttagctacagatggggatgaagaatcactggacctccttagacaaaatatctcctcgaacatggagcctaatttgctgagcagaatcatggttaggaagttattctggggcaacgaagatgatatgaaggcagtccgagagcttcatggtaacggcgtgggttttgattgcataataggcaccgacgtgacatacaatcctgatgctatactccctctcttcaagactgctaggggagtgatttctgagaaagctaacgaggactcggtacctgctctcattctttgctacatccagcgacgagttgatgaggactccatcctttctaatgcaacgtcccagggtttcaggcttgtggacaaatggataaatggagttcacgagagtaacggtaccatcagttcttggttctctggtaatgatgtctgcagtgctttccggcatacagtactttcagtactgtacttcgagctgtgaatgctgctatgcatgtgcaaggttactgtataacctgaaggatttttgtagcagctgtatcaagcaacggcaaaccaactttgaatctttaggccttgtttaatgatttcaattttacgtgaatcggactgtactggaatggattgagatagattttgacttctatggatttaaattgacttagtgccatccaatccatatggattaacggtgaaacgaataagccc

SEQ ID NO: 10362 - DNA, 3603 bp, Zea Mays
gcgcttttgtggacgacgccgtcgtcgccaggcagcttgcatgtggctctgcgctgcgcccttgtcttcctcttcctccccactccgcatctccagaaaattccgttattttactcccagtatttagcctcgacgattgctcgggactctctttacaggtcctatttcgcggtttcctcatcctcctaatcctaacctccttccctgttttattcttcctcgtcgagcctgattcccctgccgccaccgcggccagcgccgccctcgccgccggtcgccaccgccgccgccaccgtccactcctcgccctcacctaatctcactcggagggagaaaaaaaaaacctcgccctcgccgccgggttgagttgaatctgtggtcgctgggttgaattgaatcgatttagatccgtttatccctagttcgggtgcccgtgttctggaaggtggaagctttggttgggttttctcttccagagcattaatgtttctgagggcctaagatgctctatttgaagcagcccacgaggagctgagtctttgtgttttttttatcgttctctctcgtcgtctgttgatctgatcggatggaggctatgacgggtggcaaattccttcaaaagtttcgactctacgaaaccagatcgaaattttatcttattggaagagacaagagcaggattcactggagggtgctaaaaattgatcggttggagtccactgagctgggtgtcgatgaggatccaactatttacacggaaagtgaatgtcaagaactgctttggcggatccatgaggggaacatgttgactggtggactgaaatttgtcacaaaatgttacggaatagttggttttgtaaagtttcttggtccttattacatggttataataaccagtagaaggaaaatcggcacaatatgcggccatgaaatttattccgtcggcaagagtgaaatgattgcaatttcaagtgttacagtctggcccaacgtggcttattctagggacgagaacagatataagcgccttctttgctcagttgacctttcgaaggatttcttcttcagctactcttacaacatcatgcgcagccttcagaagaacataacccagaagaatactgggcaggctgtttatgaaccaatgtgtgtatggaatgaatttctgacacgagcaattcggaatcatctcaagaatacatgttggactgttgccttagtccatggattttttaaacagtcgaagctctccgtatctgggaaggatttttggttgacccttatagctaggcgctcacgacactttgcgggaaccagattcttgaaacgtggcgttaatgaaaagggcagggtagcgaatgatgttgagactgagcagattgtttttgaagacacatctgatggaatcccaactcagatggcttctgctgtacagcatagaggatcgatacctcttgtctggtttcaggaaacttcaagacttaatattagaccagatattatattgaaacctgatgtggactacaaggcgactcgccttcattttgagaaccttgcacttagatatgggaatccagtaatcatcttgaacttaataaagacccgtgagaagaagccccgtgaatctctgctccgtgcagaatttgcaaaggctatccattacattaacaagagcctgcctgatgacaagcgtctaaaatttttacacatggatctgagtaagctttctcgagaaaggcaccaatgtgcttgcactgttgaccaaggtggcatcagatgtgttggatctaactgaattcctccactgtgaaataagtacatcaacaaaacctgatgacacctcaagtggagaaagaactgctgccaaaccacatgatgacagaagtagcagtgatcaaactgaatgtgcagctaagttggcacctcttttattacagaagggtgtcctcaggacaaattgcatagactgcttagatcgcacaaatgttgcacaatttgcatatggtttagctgctttagggcgtcaacttcatgcattggggcttactgaagcacagaaaattgaattgcacgatcctctggctgatgatctgatggacttctatgaatggatgggtgatacattagctattcagtatggtggttctgctgctcacaacaagatcttctgcgagcaaaggggtcaatggaaggcagcaacccaatctcaggagttccttcggaccattcaacgctactataataacgcctacactgatcacgacaagcaggatgctataaacatgttcttaggtcatttccaacctcagcaagggaaacctgcactgtggaagctggactcagatcagcattacaacattgggaggcaagggactttaaaagaagagattggaagatcgttcataaagaggtcactatcagatggtaacatactgttggagaacaacttgcctgtaactagctgtaacaatgaaacaaacaacacagaattgcttccaatgcaacagctggatgatattagagaacctaccgactctgcgccagagatctccatatgtgaacctaacccgtgctccagtgtgaactacggcagagtgcctggaagacactctatttcagaagagcggcagagttatttgaaaagattaggttaccctgaattgcattcttcaaatttcctcgaccttgatttgttgtcgtcttctgggaattcctgtgacgaggaagtttttgagaggtcatcactgatcaattcacctatggatgtggtcagcgttgaatcatctacgtcgtacagtgaacaaggacacactgatgagggaagggatgacatggatctttcccgttcaagcagccaggtctcagacgttcgggactattctgaccggtttgcgcactgggtcgcggatggaggcatgctttggtaaaaggccatggacttttgtcttgcttgacaactcggtagaatctgtgaccgcaggaaatggatgcgagcagatgacatggctagatgcagagatggtgggcgtggaaaaagtctcgcatcggtatggttgtgaccactggaaggcttgaacgctgatattcatcggatggggatggagatttcggtggttgggttgagtacaagattcaatttgctgtggtgaaaaattttaccatagtttgtttagacaataaataggcaaaatatatatgattcttttattttagcttacagtgcgtcccccttctccatagaaaattctgaaaagcaaaaaaaaaaaggaaaatctagaaaaaggaggaaaaaaaacttagataaagaacacttttgctgtaaatagttagtatgttacggaagtataaatattgtgaaattttgctgacgacacgacttcgctcaaacgtgtaatatactgttggacagtgttaacaaaatatatcccgtatcagtacgaaaactgtgtaaatttactgtaacgcacagtatgcattatttatttatttgtttctcagattatggaagagataaaattgcaaaaatatcttaacctctgacttctcacggtgcggccagcctcggtcaagctccccggcggcgggacgaggccggtgtccgct

SEQ ID NO: 10363 - DNA, 5033 bp, Zea Mays
ctttgggatcgaagcgaaaattaagataatttttcactcatattttgagaattacgaaggaaatttaagctcgtaacaggagaaagaggaggaggaaagtgggaatagaatagaggagaggagagggagaggactggactggtactcgcagtcgcactagtgctaggcgcatccggcatccccatcccttgcctccgaatcggatcgccgcccccgctgccgctgccgctgccgccgagcggaagcagccatcaccccaaaccctagccagccatccaactatggagccgcccgccgccgccgccgccgactcctcgcccgatccgacgccgcaggaccagtttcctgccccgtccccttctccctccgcctccccggccaagcgctccgcctggaagcacccctcccccaacggccccgccgtcatggatgccaaccactggcccgcgctctccgacgccgccaagggcatcaagctcccagactcctcgtcttcctcgcctgcgcccgtcgccgccccatcggccgttgccaattcctccagttcgcaaaagcacggcgcccatcacgtccgccacaagtccgccaggcgtggcggcggcggggagcactctccacgagaccatcctgaccggaccacagccacgggttgggaccacgccggcggcggtgggggtaggggtgcccagaggaaccataataacggaggcggcaggagaggcaacgccgccgctgcctctgccgccggaccttctcaccatggtgccggtggcagcggcggaggtggaggctttggtgccaggcgaagaggggcctacgagccgcccttctatcgtggccctccaccaccagtgggcatgggccactacatgcgaggtgccccaccaccaccacctcctccgccgcccatgaccgtcgctccaccgttcatgggcccgccaccgccgccagtctcacccatgcgccccttcgctggaccaatggtgttccatgacatgtcatctcctgtatcccccatatacttttatgggccaccaccaccagaggctcttaggggactggctattgcgcctcctatggttggtccacctgcttatccttacttccaagcgcagcctgagccacagcctgagcctcagcctgatgctgagcctgacgtagaagaggaacgtgtcaagctgctcaagcagatagagttctacttcagcaaggagaacctgtgctcagatgtttacttgaggcagcagatggatgatcaaggctgggttgatatatctcttatagctggcttcaaaaaggtccaagggctaaagaaggacctgcaatatataaaagagacggtgcagtcctcatctattctggaaatgaaggataacaagatcaggaagcatgatgactgggtgaaatgggtgatccctcgtgagagcaatcctgatgtcccgtcaagctcagcatctgtaccaaggcctgatgtcaataatctgacggcacatcttggaggcatggatctgcaggattctgctagctctgctggcgctgtggagccgaagcataatgatgtggtccagaacggatcgccttctggtaatgaagaggctgcagtagctgaggacagctctgatcagcagtagttacaacaaggcagtggtttggattcacaccatgactgcaggggttttgtcggtgcgcgaatgacagggcacaagtggtaacttttttttggcaacttttggaggggaggcgagaggcgtattagactgacaagcgaacgtgtttactggcgttcaggtaagattttggtttaccttgttatattcaggggtagcgatgaagatttggggcagttggtggaatggagatgaagcagaatagtgggaaaacgaaggtggtgatatctggaggcgcctaggaccgaggacaaagattatgtgtgataagttagtagcccccctgtggttgtttactggggggggttgcgtttgcacacgggcgcttggatgctatcatgctgttgttacgatgaactagttggttttcgtctgcgttaggatgggggatgttgtaggacctccgattttttttatggaggagctgaacttggagagccagggagttttttttttttttggacttgttgttttgtggcatgatggtgttaaattgaagtaagaagatgctcattctgctgtatggtattgatgtgttgtggggttgaaggtgggtaaaaaatgggagggggattgctgtatggtcaggtcttgaatggctagcatactaggtaggagcagcgaccgcattgcattctctttgtcacctgtccaacaagcttctgttttggacggcatcctacaatagggcaccaacagcagacttggtacgtagtagtaaagccagtaactgttttgtgcatccatgtcggtgcgttgccatcatagacgtacctttgcctctgctgtttgtacgtcaaaggaatcagtcagggcgttcgttgctttgattgctggctggatcggattatatatcgtctcggcagctagggcggccagcaccagccatgactccttcgcttctcctctccctcctgctggtggcggcgaggtgctgccatggctggtcgtcgttccagaagccggcggtgactgcggtgatcgctttcggagactccattgtggacccggggaacaacaacgggctgcatacggtgatcaaggccaaccatccgccctacggcaaggacttgttcaaccacgaggccaccggacgctactccaacggcctcattccaaccgacctaattgcccaggagttgggtgtgaagctgctgcttcctgcctacttgggcgtggatctgagcccggaggacctgctcaccggcgtcagcttcgcgtccggcgccaccgggttcgacccgctgactcccctcgtagtgagcgtcatctcgctggagcagcagctcgcctacttcgacgagtaccgcggcaagctggtggatatcgccggcgaggatgagacggcgaggatcatcgacggcgcgctgttcgtagtgtgcgcgggcaccgacgacgtggccaacacctacttcacgacgccgttccgcagcgcggagtacgacatcccgagctacgtggagctgctggtgggcggcgccgaggagttcctccgcaacgtcagctccaggggcgccaggaagatcggcttcgtggggatgccgcccgtggggtgcgtgccgtcgcagcggacgctgggcggtggcctcgccagggcgtgcgagcccaagcggaacgaggcggcgcagctgtacaacgccaggatccaggagatggtcgccgacgccgaccgagacttggcgacgaccacggtggtgttcctggacatctaccgcgtcctggacgacctgatggagcgcggggacaagtacggcttctctgagaccaccaggggatgctgcggcaccggcaccatcgaggtcacgggactctgcgactcccgcttcgtctccgtctgcgacaacgtctcgcagcacgtgttcttcgacagctaccaccccaccgagagagcctacaggatcatcgtcaaggacatctttgacaactacggacaagtgctcatcggatgatatatatatctaccttgcttgagcgatcgagcatgcatgttcatcttcttcatctttatgtacgttcggctagctggcccaaagcctcaaggaggcccatttatcttcttcttactcctcctcgccccaagaataattaattgtaagcatgatctgcggaatcagacggggatggtctggtggaagtctacatatgggccgctggcacgatacaaacccaccaattgatttggtttggtttggcccatatggccacttcctatccatccatccatccattccttcttcttcctcctcctcctcctcctttattctctctccagggaaggcaagctcggccagacctccctcttcaataagaacaagttgaagaaagatgtccacgtacctggtgtcctgctgcctccggccaccgtcagcgggggcggagatgcccaaggcggcttccgccgcctcctcctcttcattggccccgccgcccgacaccaagagagtcggccgaagagactttgtgctcaggagcagtgagattgccacgctcgccgccatcttccacttcagtggcagcaaaccaagctaccttggcgttcagaagagtcctccgtcccttgctctctgccctgcaaccaataactgtgtttccacatcagaggaaataagcgactcaaatcactatgctcccccatggaactacaatcccaaggatgggcggagcggtaaacccataaccaaagaggaggccatgaaagaactaattgaagtctttgtagatgatgtggagttctggttccctcctggcaacaagaccatggttcagtatcggtcggcgtctcgatcaggatttatcgatttcaatgccaacaagaagagagtaaaggagctgagattggctttggaaaagaagggctgggcttcagaaagcaacttctgaattgaagtgagaagggtggaagaggtgcaggtgcatgctactcagacgagccagcacaactgggaactgggattgggtactgcccacgcaaaggcaaaaaagtctctttgtgatggtccctcgttctcattcaggtcagcgattacctagtttgtgtactaggcagcgtaagctagctgctggtgggtggtggtggccatcatgaggattcaggatgcatgatgatcttccatgggtggtgccgggggcgcactaagggaaaaaaaaaaggatattacatggacagcaaccaccctggctagctaataccaagaaatcattcatatactcctagtctcctaccaagaaaaaagatatatttattatgcatcttcttgccatccgtgcatcctactacatgcatcggatctgtccttgcgataatgagatatgcatattcgttcgatatgattgatagatagtcgacccagagatgatttaggtctc

SEQ ID NO: 10364 - DNA, 2384 bp, Zea Mays
gttctaggtgacgtttgcttcgtgtggacgactctcgttctcttcgtctctacgggtttgcagctgacgctctccatcctcgttcttctcgctccgttcctctttccctcctcccctccgtcttggttcttcacacctggttcttctgtctcccgttgtctctatcgtctgctccggtgaacccgcatcgttcctattccttgtgctgcttccgtcgtcggctccagtaaatcactttgttcgccagctcgagatcgtggacggcttgctaaaatcagattattgttgacaccatcaccatttgaacgttgttgcttctcgagtcgccttatcatcctctcaatcttccgtctctctttgtattttgaataccaacatcaagaagatggtaagtacattccatacatgcatagaaaagaaacttaaaatgaaaaggaaagtataacagaccaaagaactttatctttctatctctaaattgtaatgtccgctggacaacaagttgattctgaagctcttgttgcctcttcagttcttccagtttcttctcttgagcaaccctaatctcatccggaaggtcctgaaaattaaacatggagcagtaactaaacaacatggctagatgaaaagggggctatactccattgatgtaatcagaaaataaaatggaagcatatgtgctattcttttatacatgtaggttgctcacataaagtggccttgattttaaataacacaaccatggtaagcttatacccccctcccgctgtagaattgaattacacaaccagttgccacttatgcataggggtggtaatgggctctagattttacattataaaatttaaggatcgaatcgcgttaggaccatgctctattcctttttttaactaaaatttattaagggccctaactgaaaaataaaattttggatcgtggtccattaccacccttatgcctacttgactctttccaatataagatgaagattctgtcggaaagcaattatatttagttgatgcatagaaagagacatgaacatatccattctacactgttctaaaacaaggtcaattaggcttcctcacttcccctctgacaagaacaaattccctttcaccatttttcgaccaatcagtttgagcagcatagttaaaatttcagtatgttagtatttcaatcaatacttgatacttaatgcagtgcagtaatccagctacaccatgaactttatcccactacatgatgaaatttatctttgcagttaccataaacatgagagcattctcagtgacaaatagagcattttctattctctctatattaacaaaccatggaagacaatcctcagtaccatcttccctacttacctaccccgaacaacatcttatcacaagatgacgtacttggccttacaaccacgcaccagcgacatcattttccaaattatccacttctagcagccaaacaaacatggcccgacgattgctagcatatcccggtgtgccacagaatacagaggcggatgaacactacacagatcaacttaacaagaaggagctatcctcaccatcgaaaatgtaagtattcgagtattataaaaaaagtaggataaacaacagatacattttaattttaccactaaaacttatgtccaggatgaagcacacccaagttgacaaagtcctagattctataattccagaaaaatgaagcttgttacatcctcatgacatgcatgaaggtataatactatatatactcctttgtgatacaaaacatattaccccccccccacattatctttcactcgccttagtacccattaaacagcaacaaataattaggcaaacattgttagcacaactaatcctatcttcctctttatgtaaaggaatttgcttttgcgtatctgtggagggcttcgtcacttttgaatgaaaaaacatctatgtacatataaatcacttggtgaagcctttctcaggcatgtgtgttgatgcaacctctgggaaacaaatgctatcagctgctgacatatgctacttcaatactgcttgatatgtattgcactctcagttccgtctactgttggtccaaactgcatctgtgtatatacagacgagttgtattaaactttctaaatctgtgtatactaatgcaacctcttgaaaacagttgttagcccttgacacgtatgctattttaatgctacttaatatgtattgcaatttggttttcctgtacagaactgctacaattcacgttccaatattaatcggaagctactgcagcctagcaaaatttccttaagtctgctttgtgtccatgtatttatgtgcttcataacgaatatccttcatataacatttccacgctacaat

SEQ ID NO: 10365 - DNA, 3199 bp, Zea Mays
gttctcttcgtctctacgggtttgcagctgacgctctccatcctcgttcttctcgctccgttcctctttccctcctcccctccgtcttggttcttcacacctggttcttctgtctcccgttgtctctatcgtctgctccggtgaacccgcatcgttcctattccttgtgctgcttccgtcgtcggctccagtaaatcactttgttcgccagctcgagatcgtggacggcttgctaaaatcaggtttgttttcattgggtttccatttctggaagtgattaaggcgaagtaaatcttctttcctcgaaacgtatacactttggtgcatctgtggaaatctgatttgttgggtttctgatctatttggctctttgcattttttaaatcccctcctacaaatcctgctacctccccgtctttttttgtttgtttggaaaatttgtttcgtatcttccctcctcgtttttttgcttcagttcgaaatcgatttggtgggtttctgatggcaaccctcgccaccgcctcatgggtacgtgccgagccgccttatctgttcgctcaccactttacattggttcttgcgcctgcgatttcggtgtcgtaggatcatgcttgtgcggatgtgatggtcgctgtggcttcgcgtcggtgggcggtgggatttgggctgggattctcgcgccttgtctctagggtttgggtttggtgcttcctcagtgcggaattggggattataattcctttaggtttgattttatctcgggtaactgcgggataatagcctagtagggaaatcgtggggattcttaaggattattaagtttctgatttatctctgccttatttagctcgtctgttgtggtggcttttccttcttgctgatgctgattatgcttccggttatgagccacaaaacaatattgatcggcaacctgtagttttgcctcagttcatcgcttgctgtctctgttaaatgaccaagaataaagtttagtacttcacacattaggcatccagtaaaacggtatcataattccaaaggtcagtaacgcaaacaaacaccttctaaatcttttccgtttgctgcagcagccatgagattctccttgatctgtttgcgacatttattcctctcttgaacaatatcttgactattccctccagtgaacagcgagacatatttctcattcttagggaagaactacaaatgagttgagatatagaagctttagctcaggattcaagcaggtacagataaaaaatggttgattagaacctccaatctaatgcaaagagaatgatacatcacagaaaacaaagttgtaatgatacttatatgtcatatcatcatgggcagggcagtaatgtaggaagcttactctaacatattcaagatcttctcgcaattttgacagattattgttgacaccatcaccatttgaacgttgttgcttctcgagtcgccttatcatcctctcaatcttccgtctctctttgtattttgaataccaacatcaagaagatggtaagtacattccatacatgcatagaaaagaaacttaaaatgaaaaggaaagtataacagaccaaagaactttatctttctatctctaaattgtaatgtccgctggacaacaagttgattctgaagctcttgttgcctcttcagttcttccagtttcttctcttgagcaaccctaatctcatccggaaggtcctgaaaattaaacatggagcagtaactaaacaacatggctagatgaaaagggggctatactccattgatgtaatcagaaaataaaatggaagcatatgtgctattcttttatacatgtaggttgctcacataaagtggccttgattttaaataacacaaccatggtaagcttatacccccctcccgctgtagaattgaattacacaaccagttgccacttatgcataggggtggtaatgggctctagattttacattataaaatttaaggatcgaatcgcgttaggaccatgctctattcctttttttaactaaaatttattaagggccctaactgaaaaataaaattttggatcgtggtccattaccacccttatgcctacttgactctttccaatataagatgaagattctgtcggaaagcaattatatttagttgatgcatagaaagagacatgaacatatccattctacactgttctaaaacaaggtcaattaggcttcctcacttcccctctgacaagaacaaattccctttcaccatttttcgaccaatcagtttgagcagcatagttaaaatttcagtatgttagtatttcaatcaatacttgatacttaatgcagtgcagtaatccagctacaccatgaactttatcccactacatgatgaaatttatctttgcagttaccataaacatgagagcattctcagtgacaaatagagcattttctattctctctatattaacaaaccatggaagacaatcctcagtaccatcttccctacttacctaccccgaacaacatcttatcacaagatgacgtacttggccttacaaccacgcaccagcgacatcattttccaaattatccacttctagcagccaaacaaacatggcccgacgattgctagcatatcccggtgtgccacagaatacagaggcggatgaacactacacagatcaacttaacaagaaggagctatcctcaccatcgaaaatgatgaagcacacccaagttgacaaagtcctagattctataattccagaaaaatgaagcttgttacatcctcatgacatgcatgaaggcatgtgtgttgatgcaacctctgggaaacaaatgctatcagctgctgacatatgctacttcaatactgcttgatatgtattgcactctcagttccgtctactgttggtccaaactgcatctgtgtatatacagacgagttgtattaaactttctaaatctgtgtatactaatgcaacctcttgaaaacagttgttagcccttgacacgtatgctattttaatgctacttaatatgtattgcaatttggttttcctgtacagaactgctacaattcacgttccaatattaatcggaagctactgcagcctagcaaaatttccttaagtctgctttgtgtccatgtatttatgtgcttcataacgaatatccttcatataacatttccacgctacaat

SEQ ID NO: 10366 - DNA, 1189 bp, Zea Mays
cagcccgctccactcctcccctgccgaagcaccacacaggcacacagcagaagcgaaaactgcaggaaggccaatcgggcctggcaggcatgcttgcccgctgccgcaggtgaggcgacccgcagccgtccgagacgcaccccggcgcaagcgcgcatccgccatggatccggtgtccgaggagctcgagcgccgcagccgctatctcaactcgctcatccgccgtactaagctcagcgccacccctgctccccctcctcagccggagccggagccggagcacgaggtagcgccacagaatccggagccggagccggagaccgcggttgggaagcgcgaggaggccaaggcggatccagtggtcgttgaggaggagaagcgggaggccaaagtggcgggggacgggaaggggaaagagatcaaggggaaggacgacgggggtcccaaggaggacaacagcaggaaggtgtcagtgcgggtgcgcgcggccgacatgcccctaccgctgcagcgccgcgcggtccggctcgcctacgaagccatcgtcgccatgccgcgcctcgacagcaagcgcctcgccctcgcgctcaagaaggtaatgtggcttggctagtctccagtctccacagtggcataaaacaaatcttattgtgaaggggtatacaatcagacatcagtttggttaaagtgataaccactaatatgcaatcagcaagcaggaatttgatacggcatatggtccagcttggcattgcattgttggaacaagctttggttcctatgtcactcactctctgggcggtttcttgtacttctccgtcgacaaggcctatattctcctcttcagaaccgctgtcgagccattagcccatccgcgatgaggggccatgaaacagtctactagctagcgcattctgtattcgacatttaactgtagaagggtaaggagagtagaacgatcatcgcccccaccccccaatgcaaatatgtagaactaatctgctgtagctaagtttgttccatgtactgtgcactaatcggccatgtggaccttaacattagctttcagagttgtagcttgactcagctcagttcttccgcgcgaggggaattttctttcgcatcttgtaatgccttgtagccttgttcgcaatcgcaatggaatcagtagatgcatcctgttaaatat

SEQ ID NO: 10367 - DNA, 1712 bp, Zea Mays
attccagtccaccctcccttccccgcacgaaacccccaccagtattcatccatgtcagccgccgtccgctcccgcgccgcagcggccgccctctcggccgcgcgccgcatccacgctggccacgccgcggggcagaagcagcagggcagcaacagcactggcgcctttcgccgaccttggaccctcttcaggcgccagcagcaggaggagcggagccacgttccccgcgccgccgctcctgtcctggatgctgtcgccgatcacagggccggcggttcggacggtgcggagcccccagagatctggcgacagcccggagaagcccctgtcgctcccgagggtgtgggcgccgtcgggaggatcgacgtggttagggttgcagcccccggtggggaagactttgatggaaaggacgggggcggggaaagcgggggttggggtggctctaacctgggacgacggtttcccacgcccaaggagatttgccgtgggctggacaagtttgtcatcggccagcagcgagccaagaaggtgttgtcagtagcagtttataatcactataaaaggatctattgtgaatcactcatcaacaggtctgctgcggattgcagtcagagtgattcttgcacgagtgacaccgacatggtagagcttgagaaaagcaatattcttgtcatgggaccaacgggctcggggaaaacattgctggcaaaaacactggcaagatttgtgaacgtgcccttcgttatagctgatgcgacaagcctcactcaggctggatatgttggtgaggatgttgaatctattttgtataagctcctagcggctgctgatttcgacgtagctgctgcccagcagggaatcgtctatattgatgaagttgataaaataacaaagaaggctgaaagcatcaatcttagcagagatgtttcaggtgaaggtgtgcaacaagcattgttgaaaatgcttgaaggaacgataggttgttagtgttcctgagaaaggggccagaaggcacccaaggggtgacaatatccagattgataccaaaaacattctcttcatctgcggtggtgcttttgtggacttggagaaaactatttctgaaaggagacatgattcttcaattggtttccgagcgcaggttcgttcaaatatgcgatctggtggtgtcataaatgctgagattacatcatcgctactgaaatcagttgaaagtggcgatctcattgcgtatggactaatcccagagtttgttggtagatttccaattcttgttggtctatcctccctcagcgaagatcagcttgttgaggttctcacagagccaaagaatgcccttggcaggcagtataccaagttgttcgaaatgaatgacgtcaaattgcattttacggaggaggctttacggcttattgccaaaagagcaatatcgaagaatactggggctcgtggtttaaggtccatattagaaagtatattgacagaagctatgtatgagattccagagacacgaactggaaaagataaaatagatgctgtggttgttgacgaggagtctgttggatctgtaaatcagcatggaattggagctaagattctttgcggagaaaaagctttggatgtctatctggccaatcacaacaataaagaatcaacggatgctacatgtttggctgcatacgttggtgtgtccatggtggaggtgatta

SEQ ID NO: 10368 - DNA, 1187 bp, Zea Mays
cgcatctacgaatagtgagaaaagctctgctggtttttcgtggctgctcatgaaaagttcaggttcataaaagcaaatgaggataacaccgttctcaatgccttgtcattcagcacttccaaaattagactgcttcggagcttgacaattgagcaaaaaaactcggttcaggttcttgattttgctgccttctcaagacctgaatacgaccttcctatattttgtgccaatgccttctcatcccctgcacggagtattgttgtcttggacctcaaccctttgtatgataccactgaacacaaggattacagggaaaaatactacagggctttgatgccccttgtacacaagtacagtgagctccatgtctttaatagatgaaatgcagcttctgccctggggtggcaagattacaagtgagtcgctgagattcttctctcccattgttatctggacggtattcgagccaagcgaagccaaccaccaagctctatactcggccttcgtggattactatatggtctggcttgagttcatggacggagcagttcgcgaaagtagcaaagaaaaaatcgaccgcaatagagaagcgcaacataaatatctcacatggagagcagagaaggatcctgggtacccgctgctaaagaagttgatcggtgagagtggtgccaaggacctggtgagggagttcctcttcgaaggagttggctcgctcggaaccaagtcgtttctggagtatttcgccgagtacgcgcaagaggacgggacggtgaacaagaagcggagcatggcggggaagtcctttggaacccgaccttgggacgcccacggactgttcgtcggcgacgctgtggatggatagcggccaagcgggggctgttttgcttctacataagcagtttcatctcaatccccgttgtttattcacggaggacttgcgtagtggtttcagttgttgtttcaagtggttttgcttcggcaaaagtactggacggttttgctggctcaggtttcagatcatcttcaacctttccccatggcattccatgcgaggccggctacaatttctgttgtctctttacttcttttatagcattgttcatcatctttttcgttgtccggtgacttggctttggttgctgccgctgctcggtcggtggttttaaacttttgattcgagtcct

SEQ ID NO: 10369 - DNA, 2863 bp, Zea Mays
ccttcaccctcctcgacgtcgcatctccctttccttttctcccactgcactgctgctccgctgccgctaccctttccctctcccttctcgtcctcggtcctccccaacccatggccacggccaccaccacccactgccccttctcccaccacgctatttatcgcggctgcacgactcctgcccatcaggcgccatagagacgcgtgggaccgaagccgccgatcaagcgctgctcggggcggagcagcggccggcggtggtgagtgctggcagacaggccggcaggtcaggcagagtgaccagctggtgagtcgaagcttgagcggggagctggactttggcgggttccggcgggctccggagcggagatggtgctggatctcaatgtagcgtcgccggcggactcgggcacgtcgagctcgtccgtcctcaactccgcggacggcggcttccggttcggcctgctcgggagccccgtcgacgacgacgactgctccggtgagatggcgcctggcgcgtccacggggttcatgacgcggcagctcttcccgtccccgaccccgccggccgagccggagccggagccggtggcggcgccggtgccggtgtggcagccgcagcgcgccgaggatctcggcatggcccagaggccggtggcgccagcgaagaagaccaggcgcgggcctaggtcgcggagctcgcagtacaggggcgtcaccttctacaggaggacgggccgctgggaatcgcacatctgggattgcgggaagcaagtctacctaggtggttttgacactgcgcacgcagccgcgagggcatacgatcgagctgcgatcaagttccgcggcctcgacgctgacatcaacttcagtctgagcgactacgaggatgatttgaagcagatgaggaattggaccaaggaggagttcgtgcacatactccggcgccagagcacggggttcgcgaggggaagctccaagtaccgtggcgtgacgctgcacaagtgcggccgctgggaagctaggatggggcaacttcttggcaagaagtaagctggcacaggcagtagaaaaactgacctgcatacatagtagcaccttttatactctgttagcttcagttcaattatttctatgcatgggtatgagcaaaaggcgctgggacgaagttggcttgatttcacattttgacacgagggtggtcaatgattaattcgacataatttaagctcatgttaggcaagcctgagggtgattttaaggaatacgtacaacaagctggtgctcgctggggtacatctatcttgggctctttgacagcgaagttgaggcggcaaggtgccactgtagctgccttccacgtctcattttctaaggacatgctggtttcattcatcagctttgttaacttcgctgctgattttttttaatgcttgttgcaatttggtagggcttatgacagggctgcccttcgcttcaatgggagggaagctgttactaactttgagcctagctcctacaatgcaggagataataacctgcgtgacaccgaaaccgaggcaattgatgatggtgatgccattgatttggatttgcggatttcacagcctaatgtgcaagaccccaaaagggacaataccttagctggcctccagccaacatgtgattcccctgaatcttcaaatacgatggcttctcaggtaaaaccacccgttcaattttccagtatatagctttttacttatggtgcctaaagaggtatctagaaaaaaaattaaaatcttaagatggaagcaactgtcggttgaattgtctttgtagaatcttggacctctgatactagttcctactagtaactcatagcctacaaagattcataggactatttgattggcatatggttgggggagatcgatattaattcgtggtccaggtcctacaactattattgatctcacagtgtttgctcctttcacctgctgctgctgtagccaatgagctcatcatccccttggcccgggtatcaccaaaacccagcagtgtcatttcaccatcagcgcttgtactcgtcagcttgtcatggcttctttccgaaccaccaggtccaggaaaggccggtggagcgaaggcctgagctgggcgcccagccattcccctcatgggcatggcaagcgcagggctcccctcacgtgccgttgcaccactctgcagcatcatcaggattctctaccgccgccggggccaacggcggcatgcccctgccgtctcacccgccggcgcagttcccgactactacaaacccgttcttcttcccctagaccgcttttgacatgacagcttgctgttccggctcagctctcggcgtctgggatggcagctggtcttgcgtgtggcgtctagcagctctggtgatggaagaaagtgattgtgttttgtgtgtgtgtgtgtgagagagagagagagccataataagaagcgacatggctggtctccctctggtatgtgcctgttaggatatgggatatctccatgcatggattgtttccgagacagtagtagtattttgttgtagtcgaccatgcgtgtacatcagtataactggatctttgaagagctgagattttatgactcaacaagcattgacataatggcatgcactccaggaccactgaagcaaaaggccaatttgacatcattgctgcgtttcagatggtagcagtagaagcaacaaatatcggtttcagattgtacaggaaaactgtgcctcgtacgttcgtcgtctgccagcggttgtccgttgcgattgacacgcaacaccggtttgggggagcaacgcaggtggaagtggccccagacgcactttt

SEQ ID NO: 10370 - DNA, 2109 bp, Zea Mays
cttccgtgtaatgccttccaaagaatttgtttcctccaattttctgacgccgtaatcctgccaaccaaagagcactgcagtgccgatttctataggaacaaaattcctattctttccctacaaacttcctacattcagggtcctcctcgtgtgcccatcccatattcaagattacgtccgctgactcctcaggcctcccactgcgtgtggggccgagccagcttgctccatcaagccgagagcagtctcccactcttctttctcacctcgcatcgcactgcctcaatctctcgtctctattgcttctctgccggagctcctacaacctcgcctcgcgcagcactccgctcaccctccctgactccctccctgccgctgggatggccggcaaacgagttacgggccgcgatgggcaagacgagggcggcgccaaggccgggctcccggcgatggacatctccctcgcgttcccgcaggccacgcctgcctccattttcccgccgtccgcttcggattattaccagtctgatgatttgctgaccagtgaagagcgctctatcaggatgaagtactgggaaaaggcagagtttccatttaatgccattcctaaacttgcaagccttggtgttgctggtggtacaataaagggttatgggtgcccaggactttccattactgccagtgctgttactatgtcagaaattgcacgggtagatgcaagctgttccacatttatactggtgcactcctctcttgcgatggtgacaatagctctttgtggatccgaggctcagaagcagaagtacttgccatcccttgctcaacttactactgttggctgttgggctttgacagagccaaactatggaagtgatgcgagctccttgagaactatagcgaccaaggcacctggtgggtggcacatagatggtcaaaaacgctggatcggtaacagtactttcgccgatgtgctcgtcgtgttagccaggaatgcagacacacaacagctaaatgggttcattgtgcggaaaggagctcctggcctgaaagctacaaagatcgagaacaaaattggcctcaggatggttcagaacggtgacatagttttgaacaaggtgttcgtccctgacgaagaccggttgccaggcatcaactcgtttcaggacatcagcaaggtgctcgccatttcacgcattatggtggcatggcaaccggttggcatatcaatgggggtcttcgacatgtgccaccggtatctgaaagaaaggaagcagttcggagtccctctggcggcgtttcagctgaaccaagagaagctcgcccggatgctcggtaacgtccagtcgatggtcctcgtcggctggcgtctctgcaagctctacgagtcggggaaaatgacgccgggccacgctagcctagggaaggcttggaactccaggacggcccgcgaggtggtctcccttggccgagagctgctgggtgggaacgggattttggccgacttccttgtagccaaggcgttctgcgacctggagcccatctactcgtacgagggcacgtacgacatcaacagcctggtgaccggcagggaggtcaccgggatcgcgagcttcaggcccgccgcgccagcgaaagcccggctgtgacgtgataacctgtgtccccgtgttgcagggaactggaggcgaataaatcatgatcaggtcgtcgtcgtcgtcgccatcgaacaaactgagcacgttcctggaacccgcccggtcaacgttggctgctcacatggtgtaccgtagccgagtgcggatgggaacggattcctagatatatgtagtactatacgaagatatctgttgcgggtggattactgtaaaccgggtctaatctctgttgcggtgtttgccgtctttggtcagaaggtaaggggggaacgccaggcagatctggtgggtttggttgttgttgttgtcgtgttgggtgggtagcatgcgagtgtggaggcctcgaccaatgaataaaacatggtgccgtttgggcggtagtacgtacacaggcaggcgggtcgagaagagtccgtcgtctggaagttatggtaagtaacatctcggcggctaa

SEQ ID NO: 10371 - DNA, 2332 bp, Zea Mays
ctctctctctctctctctttctccctgcttctctctctccagctcgctgtcgatggtgatgactgatgaccatatccgtgcacggcgccagatacgcatacacgcacatatatatacccggccgccagggtttgggggctcagaagaaccgaccgcgcgtcaattaacccagcagaaggtccgtcgtctcgtcgccgacgactcggcttctgctcatcaccaccagccactagctgtcgtcgccgacatcgacgcacgcggaggagatcgatcggcccggccgccggccgcaggagaagatgagcttctttggccgcggcagcagaaaccagagaaccttcaggccgaagaagagcgcgccgtccgggaacaaggggatgcagctgaaaaggcacatcgacgccaccctcggcagcggtaacctgcgagaggcggtgcgtctgcccatcggggaggacctcaacgagtggctcgctgtcaacaccgtcgacttcttcaaccaagtgaacattctctacggcaccctgatggagttctgcacgccagcgacatgcccgaccatgtcagccggaccaagctacgagtacagatgggctgacggagccaagatcaagaggccaatcgaggtgtctgcgcccaagtacgtggagtacctgatggactgggtggaggcccagctcgacgaagagaccatattcccccaaaagctcggtcggtaacttggacttgtctgtctagtcgccaagcatatgatcgtttgggactttgtgcatggtctgatcatatgtttgtatgtttgtgtttggttcgacactattgtgatggtgatggtgatgccgccgacaggggctccgttccctcccaacttccgcgacgtcgtcaagacgatcttcaagcgcctcttcagggtgtacgcgcacatataccactcgcacttccaggtgatcgtcaggctcaaggaagaggcgcatctcaacacctgcttcaagcacttcacgctcttcacactggtattctcgatccagcgtgcacgcatccagctcagttttcatagacacagctagcctgggggggttctatattacaaacaggtgatctttcacctgccgatgtcgctctcatcctagctaaaagatcttcagcgctccagcttgccagcaaaccaagccctgcatggctgccgccggcaccactggaacagtatgttggagtaggaaccctcccactcccatctcccatacgaaagaagaggcgggttgcctttggtgcaatgattcagacgcctttgccctgttgtttcagctggttgctttagcagttgggaatgggatacatcattcagcacgcaaagacttgcttggggccatacaatcgtttgtttttaaagtgtgtgtgtatcgatctgtcccatgccttccttataacgaccatgttctgtcaaacactagctaggatgaactgagtgtttaatagttgtaacaccacgtccactcctggatcgacagtattagaccatccccgagtcttttatttatactttatcctacttatacgataagactttctggacagtcacccatctcaatactctattaaacatttgaccaggatatcacacagtagcgcacaatcagcctcaccctgattagcagatattgccatgctgcaattatggagtagttgaaaacgtagttactgccaattaatctagttttttttcctgtggtgcaggaattccggctgatcgacagggcagagctggctcccctcaacgagttgatcgagcccataatacttggttattgactggagaggctttgtttaggccgactgtgccgagagaattttcccccctctccttttaattttgatcatttcgggtggaatatctccatctgcattttggaagcgtaggctagtggtttcgctactctgtcccggatgtatgtgttcccttccctagcagtagcagccagcggttggtctcaactttttcagtcaaatggagtgctgtttgatccgactcagctgggtgctttgtttctgttctgttctgttcttttttttttgtctaagatgggcgcctccgttctgtttattattttttagtttaaccttttcagctggagtttgaacttttctctacttctaaaaagcacgagtttggtgaccatctttctcctcttcctcactgttgaggacgtatatagtttttttattagttgttgccagagaaattgtgaaatattaaggtcgatgataatatttgtattgctcgctataatataatcgttatgcattaatattttatcgaatatttatgtgactttgc

SEQ ID NO: 10372 - DNA, 2588 bp, Zea Mays
cggccttttcggctttcggtttcgggctcaaaagggctttccaggagaggagccgcaccgcacgtccgcacgccgctcttcttcccctgcttgctctgggttcctccattcctctccagtctccatcacaggagcacgcgacgcgcgccacaggaaggaaggggaaaaacatggcggcggcgaacggggacgcgtgccgcagcgtcggcggggtgccgcgcccgacgaaccccatggtgacgccgctgctcaccgacctgtaccagttcaccatggcctacgcctactggaaggccgtttacacttacctccaggctccagccctcgatttgtggtttgttaggccactgaggagggggtgataatctggtagacatgaccccgcctcgataaggcgtgactgggtagtgttctggaactattttgctacctgttttttttttgaaccgtgtgtgaggctgggctggctgtgacgattgagcacatttgaggctctgcttcgtagttttgtttcagtacgttataagattaggtttgcaatggggaaaccgtttttcgttaggccaagtgttttatctaggtcgtacttggtgtagcaagtgtgtaaaatcagcgtcacagttcttctaccggtcttcaagttacgctctactctctttcacctgtactaactgcgaactgaaatggtgttagctttgatctctacttccggaaaaatccatttggcggggagttcaccatcttcggtggcctcgaggaatgtataaggttcattgctaacttcaagttcacggaggaggaaatcaaatttcttcgatctgtcatgcctgcatgtgaggatgacttctttgagtacctccgttcgattgactgctcagacgtggaggtttatgccataccagagggttatgctgtgttccctaaagttccactgatgagaattgaaggacctgttgctgttgtccagcttcttgaaactccatttctaagtcttgtcaactatgcttctctggttaccacgaatgcggcacggcaccgacttgtagctgggaagtcaaagaatttacttgaatttggacttcgacgggctcaagggcctgatggaggaatcagtgcatcaagatattgttatatgggaggatttgatgcaacaagcaatgttgcagcaggaagattgtttgggataccaatacgtgggactcattcacatgcatttgtgagctccttcatgggtcttgatgaaattactgacaaaacacttactagttctgatggttcaaacacatgtgaagattttatctctctggtgcagaactggctgatcaggattcaggattctagttcattgcatggcacctttggagaaacgagccaaagtgagttggctgcattcacgtcatatgcactggcatttccaaattccttcctggccttggttgacacatatgatgtcatgagaagcggagtgccaaacttctgtgctgttgctttggccctcaatgatatggggtataaggcagtcggaattaggttggactctggtgatttagcatacctatccgttgaggcccgcaagttcttccatgcagttgaaaaagaatttgtagttgttggctttgggaaaacaagtatcacagcaagcaatgatcttaatgaagaaactatagatgctctgaacaagcagggccatgaggtagatgcatttggtattggcacctacctagttacatgctatgcacaagctgcacttggttgtgtattcaaattagttgagattaacaaacagcctcgtattaaactttctgaagatgtcatgaaggtatcgataccatgtaagaaaaaatgctacagattgtatggcaaagaagggtatccgttggttgatataatgaccggagaagatgagccaggtccaaagattggtgaaaggctcctatgtcgtcaccctttcaatgaatcaaagagagcgtacgttgttccacagcatgttgaggaattattgaagtgctactggcctggaaattcatcgaattcacgggaggagcttccatccatccatgagattaggactcggtgtattcaccatctggaccgaatgaggccagaccatatgaggcggctgaacccgacgccttacaaggtaagcgtgagtgctaagctgtatgacttcatccatttcttgtggctcaacgaagcgcctgtcggagaactgcaatgatgaaatgaagtggcggtagggtcggatcccaaacctaactctaataagctgctccgcttatgggtgccgtcggagcaaataacaaactgttgccgccggtgcaatttctgcagtagttttaccatcgcctgcgctctagtaaaatgtgagtatgtgctggtgcatctgtcaaaacagaccatagctgaagtgttacgtactgggaacaagaggatacccataccgagttagatctatatgactgaactaattgcaatgaggagcaatcactaaatttgagacaaatttacttgtcttgtcatttatcctaccattctcctctactgaattttatgctttttactgaagccaagttagattgttaaaaaga

SEQ ID NO: 10373 - DNA, 4220 bp, Zea Mays
atggacgaaggcctctcggcaagtgaaggcaagatcctagtagaggcgtcttcgacggtcaccacaaggatgtaccaggatggaagaagagccgagtctgctcgctgcccacgctgggagttagggccggaggcctggccgatcggcgggggcggagggagggtaatgagggctccgcaggagcgtagcatgagggatctctacgatcgcacgcggcacaaagatatggcagctccagaggaatcagtggaagggtgcggtggaggatgcgcggagggatgggagcaacgggcactggcctctaagatggaggacaagactgtggtaaggaaaagattgatatcaagcaacaacactcgtgtcaaggcagagtctggcacctgtaatgtctgttatgctccctgctcctcttgtttacacccacgtagtcgatttgaggattcaaatgttgaatgtgcatcctctcagacatgctccacaaggtcggaagtaaagaacaatttacttgttcatagggagaaagggctctgtagtaaaggagataacgatgatgagtttagtgcaacctcagatcatgctttgtactctgtaactggtagaaacaaacttgttgcaacatcatccattgccgatgatttgtcagaggttgacatgccatcaaaacgcaggaggctgttgaatcaagacacaagactatctagagcagaataccttgatgacaacaactcatgtgttactggtatatcagcagaaggcaaacttcttgtggataagaaaaaactgtcaatttctgcatccagtcgagatttgaccgctaaagccaacagcatggctaaccacaacaaactaagaaatcaatgtgttgatgaatcaaagaaaggatctgatggttgtgaaatgcatcctagctcatctggtagattttcccctgtagattctcttgttatgacaaaaaagttgctgcgaacccagtcttctgtcagtgcattgagcagattatctcctaacaggcaggttcatgaatttgggaaagcagtggataatttatctcatcaaccttgtgagaaggcttctcttttgaagaataatgaagaaccacgagctgggcaattgaacccttgtatagctggtgaaaacaaccatggcacgctggcaggttacagtaatagacatgcggacaaaaatgatttctcattgaatgatctagacaatggcaccttgtgctcaaaagatgaaatccaagaacatggggacatcacatctaatgataatgataagaagaatgtgtgtgtcaaacaagattcggatcaagattgttcaatggatatatccaatgacagaaagttgaatacacaacatgatgtgatgacagactgtggcaattcagaaggtttgatagatgttaatgtttgtgatatatgtggagatgtcggtagggagtatcttctagctacatgcaccagatgccttgagggagcagagcatacgccttttatccaagcagctatccttcaatagcaccaacaacggaccaaaagtcaagcagttggctgataaaatgtctagcaagttaagacctgcagaacattccccaagagatcctagagataaggaaccaataaaaaagattgtacaatcaggatctttcaaacgcgagggttcagattccgtagatgttggatcatcaaaacaaaagcaaacatttcatttgtctcgagatgaaaaaccaggagtactgaagccaataaaggaaaagaatttaacagaaagaagggcttcttttagtttgaaaaaaccaaacattccttcatctccaaggtctgacagctgtatgaagtcaggggaaagaaaaaatgatcagcatatttctggaacaaacatacttaaaagtagcaaaagacctggatatgctgaaaagaatctgaggtacgatttgtccagaactgacaatggcaatcaagatgttaccgtgcatccaaaaccaatggaagtttctggtaaagatgcttacggagtaaagacatctaatccactatttcgatcccaatgtgccaaaaagtatagatcaaatgatgttgaagatgatgatttacccatttcagtgaataatgttaacattgcgccaaatgagcatgctgaggtggttcccacaatgtctactgccatgactcgtgaatcaaatttacaagatgttccaagagaaagcacctctgatgatttagctccgaaagtggtttgttgccaacaaaagcttttggaaaacacaggagatgattcctgtaaaactttagaggtggttcaagattcaggcgatatattgtctgcgactccacgtggtcttcagatggcacacaatctatacccctatgacaacaaattggataaaccagatttgaagaaggaagcttttgctgatcaatcttcagctcttgggaatcctttaaaagattttgttattccagagcaatcttacatctggcagggtagctttgaggtatcaggacatggaaactcccctgaaatgttcaatgggtttcaagcttacttgtctacttgtgcctcgtccaaagttcgtgaagtaggtgaacaattacctgacaaaattcagctagcagaagtcccacggcattcctcatggccgctgcaatttaatgaagtaaatccaactgaagataatattgctctttttttctttgctaaagatgttgaaagttacgaaagggcatatgggaaactcttggataacatgcttcttggtgatttgtccctcaaagcaaatattgataacatggaacttcttatttttccatctgataagttgcctgagaggattcaacgttggaatggtttacttttcttttggggcattttttatgcccggaaagcaagtagtccactagagcttcctacaaataattgtccattagaacaaaccaatggacctgttatccagcatgatatgggttcatctaaggcacttcagcctttgggtatagatttgaatgagtgccctaatgatgatatatctgatccagctctttcacttggatcagagagtgagaaatttggtgcatctgtagattataatgttttatcagagtccaaacacgaggatagaaatctgaatgcaagtgaagtacatcatgaagaaactgctggcacaagacaaattatatgggggcaaccttctgtagctcccactgtaactaatcttcccactatctcaacaggagttcatgacatcgttccggattattcggctgctgcaaaagatagcacaggaacagcaggtggaaacaaaatggagaaagcagatcagaatgaagctctcttttgtttttcacagcaaccaggtgcaattggatcgatctcacatgagataaaacttaagaaacatggtcttctgccttcacattgtcattttagtggatcaaagatatgtgatgatcaaaccaaatcgactccaagttcagatatgggttctttggattctcacctcaccaacaaaaggcagaagacttatgggaaacactctacttgcatttttggagatgaaatgccacctattaaatgcttgtcgaagatacatcccttaccggctggacaggataatccagtcgatgttttacattgtcacaggtgtccttcagatcctgtctctcttaaaaaaacagtacctgatcatatcatcaacgtgctttcatctgacgatgaagattccccagaacctagtactagcttaaataaggcatcactgaaggcagatgagggctcctccgctttattgttactttccctatccatggtggcaacgaagcataatctttctggttcagatattgtagatgatgaaccactgtctctatctcttggattccccagtgttgtcgacgggagtgaagatcaggagatgaagcaatttctgccggagaagccaggcataaacacttaatgccccctttagatttgcgagtgtacagttttgtgctatgtttagctgtaaggagtttagacagggtagaagtatatggtataaccgttaaattatgaataattttcctttcttttctctcactgttatatgcatctgctgctgttgttagtgatactggtctgatgatgttattgcctgctgtatttatgtgatatatggtgttagtttctttaagacattattggtatgacataaaaggatagatcaaaacgtgaatgtttataaa

SEQ ID NO: 10374 - DNA, 5111 bp, Zea Mays
atggacgaaggcctctcggcaagtgaaggcaagatcctagtagaggcgtcttcgacggtcaccacaaggatgtaccaggatggaagaagagccgagtctgctcgctgcccacgctgggagttagggccggaggcctggccgatcggcgggggcggagggagggtaatgagggctccgcaggagcgtagcatgagggatctctacgatcgcacgcggcacaaagatatggcagctccagaggaatcagtggaagggtgcggtggaggatgcgcggagggatgggagcaacgggcactggcctctaagatggaggacaagactgtggtaaggaaaagattgatatcaagcaacaacactcgtgtcaaggcagagtctggcacctgtaatgtctgttatgctccctgctcctcttgtttacacccacgtagtcgatttgaggattcaaatgttgaatgtgcatcctctcagacatgctccacaaggtcggaagtaaagaacaatttacttgttcatagggagaaagggctctgtagtaaaggagataacgatgatgagtttagtgcaacctcagatcatgctttgtactctgtaactggtagaaacaaacttgttgcaacatcatccattgccgatgatttgtcagaggttgacatgccatcaaaacgcaggaggctgttgaatcaagacacaagactatctagagcagaataccttgatgacaacaactcatgtgttactggtatatcagcagaaggcaaacttcttgtggataagaaaaaactgtcaatttctgcatccagtcgagatttgaccgctaaagccaacagcatggctaaccacaacaaactaagaaatcaatgtgttgatgaatcaaagaaaggatctgatggttgtgaaatgcatcctagctcatctggtagattttcccctgtagattctcttgttatgacaaaaaagttgctgcgaacccagtcttctgtcagtgcattgagcagattatctcctaacaggcaggttcatgaatttgggaaagcagtggataatttatctcatcaaccttgtgagaaggcttctcttttgaagaataatgaagaaccacgagctgggcaattgaacccttgtatagctggtgaaaacaaccatggcacgctggcaggttacagtaatagacatgcggacaaaaatgatttctcattgaatgatctagacaatggcaccttgtgctcaaaagatgaaatccaagaacatggggacatcacatctaatgataatgataagaagaatgtgtgtgtcaaacaagattcggatcaagattgttcaatggatatatccaatgacagaaagttgaatacacaacatgatgtgatgacagactgtggcaattcagaaggtttgatagatgttaatgtttgtgatatatgtggagatgtcggtagggagtatcttctagctacatgcaccagatgccttgagggagcagagcatacttactgcatgcgagtgaagatggaaaaagttccagttggtgaatggttttgtgaagaatgccagcttaaggaagatcagaacaatacaagaagtaactatggtaacacagcggttaatgtgacagaaggaaagaatcaaaggacagaaagtcaaagcaagcttaaagcattgcaaattgttgtgcctgatttggatgctccgcaagtcacacacagcgcactgacagctgatcagtgtgatggtagtaaaagtttgcatttaacttcagctgatacacaaacacggctaaaggataccacaacagctgctgaaagattggatatgaagaacaaaaaaacattaagtgttgcaagatgtaacaaactgcaagttcttacatctgatttggacacacgaccacacagttatggaaaaccaacatctggagtctataacaagaagagtcgaagttcagattttttgttgaaccacaaaaagttgcaagtttctactgacatggagtcgccactgtcaagtgaaggcctacaaagtccacccatatcatccaagagacatgtagagagcatgtcgtcccctaagcctaggctcttcaagacgggtagccttggaaagcatgatgtcatctctcgtgataactcatttaaaaaatctaacaagggaggtttaacttcagttgataatgttccggtgagaactacccaggcggctaaaagttctgagaccttgtcacgatcatattccatggggaacatggtgaatgctaaagctcccattccttcagcaagaggccttttatccaagcagctatccttcaatagcaccaacaacggaccaaaagtcaagcagttggctgataaaatgtctagcaagttaagacctgcagaacattccccaagagatcctagagataaggaaccaataaaaaagattgtacaatcaggatctttcaaacgcgagggttcagattccgtagatgttggatcatcaaaacaaaagcaaacatttcatttgtctcgagatgaaaaaccaggagtactgaagccaataaaggaaaagaatttaacagaaagaagggcttcttttagtttgaaaaaaccaaacattccttcatctccaaggtctgacagctgtatgaagtcaggggaaagaaaaaatgatcagcatatttctggaacaaacatacttaaaagtagcaaaagacctggatatgctgaaaagaatctgaggtacgatttgtccagaactgacaatggcaatcaagatgttaccgtgcatccaaaaccaatggaagtttctgtgaataatgttaacattgcgccaaatgagcatgctgaggtggttcccacaatgtctactgccatgactcgtgaatcaaatttacaagatgttccaagagaaagcacctctgatgatttagctccgaaagtggtttgttgccaacaaaagcttttggaaaacacaggagatgattcctgtaaaactttagaggtggttcaagattcaggcgatatattgtctgcgactccacgtggtcttcagatggcacacaatctatacccctatgacaacaaattggataaaccagatttgaagaaggaagcttttgctgatcaatcttcagctcttgggaatcctttaaaagattttgttattccagagcaatcttacatctggcagggtagctttgaggtatcaggacatggaaactcccctgaaatgttcaatgggtttcaagcttacttgtctacttgtgcctcgtccaaagttcgtgaagtaggtgaacaattacctgacaaaattcagctagcagaagtcccacggcattcctcatggccgctgcaatttaatgaagtaaatccaactgaagataatattgctctttttttctttgctaaagatgttgaaagttacgaaagggcatatgggaaactcttggataacatgcttcttggtgatttgtccctcaaagcaaatattgataacatggaacttcttatttttccatctgataagttgcctgagaggattcaacgttggaatggtttacttttcttttggggcattttttatgcccggaaagcaagtagtccactagagcttcctacaaataattgtccattagaacaaaccaatggacctgttatccagcatgatatgggttcatctaaggcacttcagcctttgggtatagatttgaatgagtgccctaatgatgatatatctgatccagctctttcacttggatcagagagtgagaaatttggtgcatctgtagattataatgttttatcagagtccaaacacgaggatagaaatctgaatgcaagtgaagtacatcatgaagaaactgctggcacaagacaaattatatgggggcaaccttctgtagctcccactgtaactaatcttcccactatctcaacaggagttcatgacatcgttccggattattcggctgctgcaaaagatagcacaggaacagcaggtggaaacaaaatggagaaagcagatcagaatgaagctctcttttgtttttcacagcaaccaggtgcaattggatcgatctcacatgagataaaacttaagaaacatggtcttctgccttcacattgtcattttagtggatcaaagatatgtgatgatcaaaccaaatcgactccaagttcagatatgggttctttggattctcacctcaccaacaaaaggcagaagacttatgggaaacactctacttgcatttttggagatgaaatgccacctattaaatgcttgtcgaagatacatcccttaccggctggacaggataatccagtcgatgttttacattgtcacaggtgtccttcagatcctgtctctcttaaaaaaacagtacctgatcatatcatcaacgtgctttcatctgacgatgaagattccccagaacctagtactagcttaaataaggcatcactgaaggcagatgagggctcctccgctttattgttactttccctatccatggtggcaacgaagcataatctttctggttcagatattgtagatgatgaaccactgtctctatctcttggattccccagtgttgtcgacgggagtgaagatcaggagatgaagcaatttctgccggagaagccaggcataaacacttaatgccccctttagatttgcgagtgtacagttttgtgctatgtttagctgtaaggagtttagacagggtagaagtatatggtataaccgttaaattatgaataattttcctttcttttctctcactgttatatgcatctgctgctgttgttagtgatactggtctgatgatgttattgcctgctgtatttatgtgatatatggtgttagtttctttaagacattattggtatgacataaaaggatagatcaaaacgtgaatgtttataaattcaatttgccatggcttaacttaccccaggttattaggtgcatcccaaatttgcacgtgtcgtctgtcgtgatgagtgtagttatgttcaagttgcctttgccaattattataatatgacggcttttattatttagtttattctgcattttgttttgccagtatcaattaactttccatcagggttgaagattattttcatgaggaa

SEQ ID NO: 10375 - DNA, 1032 bp, Zea Mays
cgggggggctgacgtctcctgttctttttaggaagtggattactatctccaatcccatgcagataggcttcattgcaagatctccgattagttaagaaggcaaaatggcaattggacagggcaacgcgaagaagggggtctcttgccagttgccaccagcttgagcttctcaaactgcaggagcagcacaaggatcatcgggaggaagagagtcgccgtctcgccgactccgggctcccggaccccgcactcgccatcacgcaccctgcgcaagcagcgaagcgtccgcttccacttccacatggacgacgccgtcaacctccttgagtcgctgccgctggatgtactgataaaaatcttgtgtaaggtgaactacagtgatctgaggcaccttctcctagtgtcaaaacaagtcaaggaagcaacaatttatgctagggagctgcatttcaagttttcgacgccgtcggcgaagcccgtttttagagacgaggaagccggcggtggcgacgacacttgcccttgcgcgcccaagcaacaccgggctgcaaagtcacgcttgcggggccagaacctagagagaatcgccgtcaacctgtcggcgtcgtacgagagcatgctccccgaggtctagatgtaaatatacgacatccacatgttttcagtttgtgatctattcgtgcttgtatctagtagtttcaggttacaagtttagtgccttttgtagcccacgtcatagagaggctcctagatagtgggaatagtatactcggatgcgtgattactagtcttaagtaattatagatatatggtcgtacgtagttcttcaatgttgtgattgaagaacacacgcgatgtcttctctaatcttatgcgtacttatatcttgtattttatttatcgtcaaagagatgtcaattctcttatgcgtacgcatgctgcaaaaagtttatatggactttgtattgtggacaagaaggtaaaactcttagccacatcgatgaattttgacccaggttaggagcaaaattg

SEQ ID NO: 10376 - DNA, 1412 bp, Zea Mays
gagctttctctcgctcctgagtgcagtctctctctctgcgccctgcgctctgcgccgccgccatggaggacgacgatgactgccctcctctcgccgttgagctccctccgcgggtgccgtcccctccagagcaatctccctcagacgcctcgccagttggcatcaccgtcatcaccggctacctcggggctggcaagtcgacgctagtcaactacattctgaatgagcaacatgggaagagaattgccgtgatactaaatgagtttggagaggaaattggggtcgagagggcgatgatcaatgaggggcaaggtggtgcacttatcgaggaatgggtggagctggccaatggatgtgtctgttgctctgtaaaacacagtctggttcaagcacttgagcagcttgtgcagagaaaggatagaatggatcatatattacttgagacaacagggttggccgatcctgctccacttgtttctgttctttggctagacgatcaattggagtcgtcaattgtgctggattctattattacgggttcagattgacgagcacaaaaactcttcctcattccctgaagcatttcatcaaattgcatttgcggatgttgtgatattgaacaaaattgacctagtggaagacagtcttgaggatctggaaaaacatattcgtgatgtgaatgctctggttacagtggtgcggtccgtccgttgccaggttgacttgaatgaagtatttaaccggcaagcatatggtgccaagaattcatctcatctgcaagaactgctggactatagtaaatcagtgccacctagtcgccgtcatgataacagtatttccaccttgtgcatctatgaacaggattctgttaacttggctaaggtggagtcttggcttgaagatcttctttgggaaaagaaatctattatggacatatatcgctgtaaagggattttatatatccatgattcagaccaagttcatacattacaggcagtgagggaggtctatgaagttgtgccggctcgaaaatggtctgagacagagtctcgcatgaacaagatagttgtcataggccgcaatctggatatcaatgtacttcaagattcttttagtggttgcaagagctgataatgagtatctgtttgccttgcacaatgttagttggccatttttctgtgaggtacctctgtgcaagtgaatactgaattggaggagaatcttaggtagggaatatagataacaggcgctccatatataaacttcgttattaggtgctgtatggactatggttcacatatttgtaacttgaacggtaaccgataatgttaaaacatgtttgtttaagtccaaccgtaatcagataccacactactagaaactgatatcatcctaaatcattattgttgcaa

SEQ ID NO: 10377 - DNA, 976 bp, Zea Mays
aacaaatttgtttcatacacgagtgcccatctaatctgtctcttcctgctgtcgcagtcgcaggacgcacctgcacgcgtccaccaagcccccgactccccgaggccccgacctgcgcacccacgggatccctacctatccggccgtcacccctccccctgcccctcccgagttggattgttcgcggaattggcggaggggcagccggatatgtcgtcgtcggttgggggcggcagcgcgggcggcggcggagtggacatggtcagcctgctggagaaggccaaggatttggaccagctaaagaaggaacaggacgaaatcgttgccgatatcaacaagattcacaagaagctcctcgcatccccagagatggttgataaaccagttgacaccattttgctcaagcttcgtggtttatatgcacgtgcaaaggagctctctgagaatgaaatcagtgcctcaaatgctttgattggattattagatggtttgttgcaatctggagcttcaactgcacaaaagaaaaagatagttgctttctacatttcagaagttggtgagcagaaaaagaagaggatcaagtctgatacagattctgcacgattttctgctgcatctatgaggaatcaacttgaccaagctgcaagccttaaaggagagcaggttgctgctagggtaaaatcagatgacgaaaaagatgagtggtttgtcgtgaaggtcatacatttcgataaggaaacaaaagagtatgaagtacttgatgaagaaccaggtgatgacgaagagagcactcaaaagaagtacaagttgcctatgtcttacattattccatttccgaagaaaggggatccttcgagtgccccggattttgggcagggtcgacaagttttagctgtttatcctggcacaacagcattatacagagctaccgtagcttctcatcgtaagcgtgcttctgaggagaatctgcttcagc

SEQ ID NO: 10378 - DNA, 1271 bp, Zea Mays
gggaatgccaagagcaatgtgaagaaaagcatcaggggtgcagcagtatcgttgtccgaactaggtgagtatgagaaggcatcaacattccttgagaagctaattaaggtaatccctgataaagcagaagcataccgtttgcttggtgaagtaaagtttgaactcaaggattatgaagggagttcatcatcatacagaagtgctttatctactaacaattgaaacagtcatcagataatattgattttgaagttctccgtggactgacaaattcattacttgctgctaagaagccagatgaggcagttgatataattctgttatgccgtcgaaagttgaatgaaaagagtcaaacaggactagcagatttggaggctacaaatgacaatggtcgccaaaagcctcaagatattgacccgatccaagttgacctgcttttagggaaggcttattccgattggggtcatatcagtgatgctatttctgtctacgataagctaataactgatcatcctgaagacttccgtggttatttagcaaagggaatcatattaaaggaaaatggtaaagcaggtgatgcagaaagaatgtttattcaggcaaaattcttcgccccggaggcagcgaaggcactagttgatcgctatgcgcaaagatagtcgataagagattgaatggtgttgttttaaaccaatgagatcattcggattccagaaaaacgatcaacatgtttggaacgtcttgtatgatagcaacattatgggatctgggacattttgaattgtattgttttagaacaggcctgacgcagtatcgaaaaaagccttcccactgagacaagagattctgggttcgacagtctctgaaaaaatgcagggcaagccctgcccttggttattccttctttctgaaaaaaatgcagggtaagccttgcccttggttattccttctctctgaaaaaatgctgggtaagccttgccctgggttattccttgctcagacctcgctcacgcggaagccgccagcagcccttttattgctttagaacagcagaaatgaaacatgtatgctttgcctgggaacaatgctcagttaaacattttgatatacgtgtttagtccattatataaaaaattatttcgatgtgttggaacaaattgtgttgtcacggcacgagcctcagtgttctccatatccataatcacgtgaaatatgatcgtggttgaggtaatatatgtcatcttgccatgaatagttagggtcatatccct

SEQ ID NO: 10379 - DNA, 1939 bp, Zea Mays
gtgtactactggattctcacaccgcagcatccgttcacgtgtcttcaccccgagtgctgtctctctccttcctctctgctacggctgggtgaggcggggggctactgccgccgcctaacgccaggttccgaggccttcgtcggtctatttgccggcgatgaacatccaccagggatggttgcaacaatttgggcatagcgttggtatcagtggttcgaagatggttctccatatgacccacaatgtattcagttttcgatgctttgctgccaatgggcgtggcttcagtgcggattctaccaataagagaaaaattaaaagcaagaagaggcgaaaggatgttgcactggaatcaagtgaggtaatatctggaaatccaaggaacagggaccaatgggtgccagaattaagaactgaaagtgaaaacaaatctggtaaaaaagtcatggataagaaatttttggaaaaagtggaagcggttcgaaggtctgctcttgagaaaaagaaagctgaagagaacaaagattatcaagctattgattatgatgctccaattgagtcagataaaagtactattggctttggtactagggttggaattggtgttgcagttgttatatttggactagtcttcgcttttggggatttcctgccttatggaagtgttagccctagcaaagaaagtgcagtagttaaacaaaagctttctcaagaggaagaagaaaaatttaagaatgcactgcaaggctttcaagcaacgctgagtaagtcgcctaatgatcctactgctcttgagggtgcagcagtatcgttgtccgaactaggtgagtatgagaaggcatcaacattccttgagaagctaattaaggtaatccctgataaagcagaagcataccgtttgcttggtgaagtaaagtttgaactcaaggattatgaagggagttcatcatcatacagaagtgctttatctgcagttgatataattctgttatgccgtcgaaagttgaatgaaaagagtcaaacaggactagcagatttggaggctacaaatgacaatggtcgccaaaagcctcaagatattgacccgatccaagttgacctgcttttagggaaggcttattccgattggggtcatatcagtgatgctatttctgtctacgataagctaataactgatcatcctgaagacttccgtggttatttagcaaagggaatcatattaaaggaaaatggtaaagcaggtgatgcagaaagaatgtttattcaggcaaaattcttcgccccggaggcagcgaaggcactagttgatcgctatgcgcaaagatagtcgataagagattgaatggtgttgttttaaaccaatgagatcattcggattccagaaaaacgatcaacatgtttggaacgtcttgtatgatagcaacattatgggatctgggacattttgaattgtattgttttagaacaggcctgacgcagtatcgaaaaaagccttcccactgagacaagagattctgggttcgacagtctctgaaaaaatgcagggcaagccctgcccttggttattccttctttctgaaaaaaatgcagggtaagccttgcccttggttattccttctctctgaaaaaatgctgggtaagccttgccctgggttattccttgctcagacctcgctcacgcggaagccgccagcagcccttttattgctttagaacagcagaaatgaaacatgtatgctttgcctgggaacaatgctcagttaaacattttgatatacgtgtttagtccattatataaaaaattatttcgatgtgttggaacaaattgtgttgtcacggcacgagcctcagtgttctccatatccataatcacgtgaaatatgatcgtggttgaggtaatatatgtcatcttgccatgaatagttagggtcatatccct

SEQ ID NO: 10380 - DNA, 2727 bp, Zea Mays
cgttcgttcattgtgtactactggattctcacaccgcagcatccgttcacgtgtcttcaccccgagtgctgtctctctccttcctctctgctacggctgggtgaggcggggggctactgccgccgcctaacgccaggttccgaggccttcgtcggtctatttgccggcgatgaacatccaccagggatggttgcaacaatttgggcatagcgttggtatcagtggttcgaagatggttctccatatgacccacaatgtattcagttttcgatgctttgctgccaatgggcgtggcttcagtgcggattctaccaataagagaaaaattaaaagcaagaagaggcgaaaggatgttgcactggaatcaagtgaggtaatatctggaaatccaaggaacagggaccaatgggtgccagaattaagaactgaaagtgaaaacaaatctggtaaaaaagtcatggataagaaatttttggaaaaagtggaagcggttcgaaggtctgctcttgagaaaaagaaagctgaagagaacaaagattatcaagctattgattatgatgctccaattgagtcagataaaagtactattggctttggtactagggttggaattggtgttgcagttgttatatttggactagtcttcgcttttggggatttcctgccttatggaagtgttagccctagcaaagaaagtgcagtagttaaacaaaagctttctcaagaggaagaagaaaaatttaagaatgcactgcaaggctttcaagcaacgctgagtaagtcgcctaatgatcctactgctcttgagggtgcagcagtatcgttgtccgaactaggtgagtatgagaaggcatcaacattccttgagaagctaattaaggtaatccctgataaagcagaagcataccgtttgcttggtgaagtaaagtttgaactcaaggattatgaagggagttcatcatcatacagaagtgctttatcttcatcagataatattgattttgaagttctccgtggactgacaaattcattacttgctgctaagaagccagatgagtaccatctgccttgtctgtaggcggatcatctgatcatcagttatgtgggaagctagaccgaaaccactgaaaacagtttgctattcccgaccattctgactgtcaagtgagatattgatagaaattgcattggctgtgacatatttgagaaaacagggagagataacagcaaatatcagtagctgtagagcaccagagaccttccagcaatgaccttgcacctacagcagcactgacctccaatcctccattcgccttcaccattcaccaaacatgaacagaagcaggatgaagggctgcaagggtaagtcatggtacatgacagccatgtgagtcagtttcatatgacagagatgattccatttgttagagtggcgaccagaatgatcactcgggcaggtcgaatcagagtacgcctgaagctagcgagaactagagtgagggaacaaaatgcggcaagagacagttccatgaaggtatcacagaacacgaaggaggtgagcatagtggagctaggtaggggccaagacaaattgactcaagatatgaatagagtgagaaatctcaggacgggtgatcccaaggtagaaaatgctcccaacaagccgacgttagtgagtgggatcaacaagtgctgcatggttagaggacttgttcctaggctctcgggcagagggcttgtctgctggctctgctagaggcagttgatataattctgttatgccgtcgaaagttgaatgaaaagagtcaaacaggactagcagatttggaggctacaaatgacaatggtcgccaaaagcctcaagatattgacccgatccaagttgacctgcttttagggaaggcttattccgattggggtcatatcagtgatgctatttctgtctacgataagctaataactgatcatcctgaagacttccgtggttatttagcaaagggaatcatattaaaggaaaatggtaaagcaggtgatgcagaaagaatgtttattcaggcaaaattcttcgccccggaggcagcgaaggcactagttgatcgctatgcgcaaagatagtcgataagagattgaatggtgttgttttaaaccaatgagatcattcggattccagaaaaacgatcaacatgtttggaacgtcttgtatgatagcaacattatgggatctgggacattttgaattgtattgttttagaacaggcctgacgcagtatcgaaaaaagccttcccactgagacaagagattctgggttcgacagtctctgaaaaaatgcagggcaagccctgcccttggttattccttctttctgaaaaaaatgcagggtaagccttgcccttggttattccttctctctgaaaaaatgctgggtaagccttgccctgggttattccttgctcagacctcgctcacgcggaagccgccagcagcccttttattgctttagaacagcagaaatgaaacatgtatgctttgcctgggaacaatgctcagttaaacattttgatatacgtgtttagtccattatataaaaaattatttcgatgtgttggaacaaattgtgttgtcacggcacgagcctcagtgttctccatatccataatcacgtgaaatatgatcgtggttgaggtaatatatgtcatcttgccatgaatagttagggtcatatccct

SEQ ID NO: 10381 - DNA, 1213 bp, Zea Mays
caattcgctcgatctccaatctggcaaatcccctcatctctcacacaacctccgaatcaaacgctgaatcgcgccaaatttactcttgatctatctccaaacccgccgctatctctcatcctgctattgcaatttcatccaaaacttgctccctcggaagccatcaccatggccgcggaggcgggcagtcggcgcggggcggcggcgcggaggaaggcgaaggaggcggcggtgggcgccgccgcgagggttctcttctacccgacactgctgtacaacgtggtgcggagcaaggtccaggccgagttccggtggtgggacgaggtcgatccgttcgttttgctcggagcggttccattccgcagcgatgtaacacgcttacagaagcttgggatatgtggtgtgataaccttaaatgaaccatttgagactttggtaccatcatctatgtataaggcaagtgacattcacgtgggatcgatcaccttgttattcctacaagagattatatgtttgctccttcacttgtggatattaatcaagctactgatttcattcatagaaatgcgtcttgtgggaaaataacatatattcactgcaaagctggaaggggccggagtacaacagtcgtcttgtgctatctggtcaaatacaagaatatgacacctgctgcagctttcgagcatgtacggtctaaaagggctcgagtgctgttgacacattcgcaatggaaggctgttcaagaattcagcaagaagaacacggaccgtcctgctctcacgagcggtcccgcaacagcatctccagcacgggacgcggcaccggtaacagtagcggatctgaacggcaataatgctccagagtttcttgcggaggatgccagcttgtctagacgcaacaccacaccgtcgaggccaacgattaagatgctgtcatgcttgtttccttctcgcgtctgatgaatggtcgctggacgtcgggtgtccgaggcgcatgcgtggtagcccccggtcgatctgtccgcgaagcggtgtgcagtgcaggacggcggcagcatacctttccgaaaagaaaacggcatcagcattggcgttagtcatatacttgtccatattcacccgatttgcctgtatatatatataccttcgtcatgtggaaattcgttgttgagaattgagatgcatctcttacccgcacttgaatgaatggcctg

SEQ ID NO: 10382 - DNA, 1991 bp, Zea Mays
gtttcttcgcccaacagatattttccagtgccgctctgaacagtgtgatgtggccgcgcgagccgcgaggagccagctagccatggtcgtcccagtcccgccgccgcctctcctcgcttcccacgtggccgtccgggccgcggcctccgccatatcccacggccgccgggtcctccttaacggcgaccacccgccgcaggtcgcggccctcgggcgcggcgactgggtcaagctcatctgcggcgccagctttgaggatgcagctgatgtcaggaatctctcccttgtctacactcttgctggagtggattgcattgattgtgcagcagatgcatctgtggtgggagcagtgaatgaaggtattgaagtagcagcatcaattgtaccaacagttcaaaggccttggctgatgattagtgttaatgatgattgcagagatcttcatttccgtaaagctgagtttgatcctgatgattgcccactggattgctcaaagccatgtgagaaagtttgcccagctgatgcaatatcactaaagcattccatggttgatggagagcgcacactatctgatcccttacgtggtaaatatgagggtggtgtaattactgagcggtgctatggatgtggtcggtgcttgccagtttgcccgtatgacagaataaaagctgcaagctttgcttgaaaccatttcaggagctgtgtcctatgttcgagaccctactatgactgctgaattattgaaaagagatgatgttgatgcaatagagatacataccactggaaaaggaactgatatgttcaataccctctgggacaacttgagtgggtccatcaataatgtgaagctggttgcagtaggttccacaattggtttgttgctgtatccacatatttgtattgctggaaatgtagccagtgactttttattgaaaaaaaaacttccattccatcattattaacgtgaaagttcactcttttcaggttagtcttcctgatataggtgaatcaactgttgacctcatgaacacaatatacacaataatggagccccattttaaagggtataatctttggcagttagatggccgacctatgagtggtgacattggccgaggtgcaacaagggagacagtttcttttgccgctcatgtggcttcaatgtcagaaagacctcctgttggctggtggcaccaactcatacactgttgattacttaaagaaagctggtcttttccaatcatcaaattggaattcagggaccgcaacctctgaaatggccagttctcaccaagctttaataggagggattgcttatggtggctatgctcgcaagatcgttggacgggttttgcgcaaaataccagaacagtttggccgtgtgcacatcgaggatcatcctgatcatctactggaggctctacaagaagccatgtcattagtaggacctgtgaagggttatatacccagtcattccaagcctttcatgaaacaagtagatagacaataggaagtaggaaaagcgcaggatatacccttcaacccagttttgggcgaagataaggcgcatcgtactttagctgtgacagtgaggagttcaatgtggtcattgggccaggaatctagtggttgctgtcggtcgctcgttctagatggattatgggctatggaacctggagtgccgtggtgctgcaaacatctcatgtttcattctgaaatctttttagatgtataatacgtagtagttgaattttctgtaaaaaaacatgttgcttggtgtttgcctttccaattggctgataagcctggccatatcgttatgcagacacggtcatctgcagcagacgacctttgaggctttgacaaatttgagcagcagccgtcggtttcggacgacgtgttctgtagcgtcgcgtaatgcgtctttccattacgcctatctaactgttattattatattactccctcctaaaataaaatttgttttacat

SEQ ID NO: 10383 - DNA, 3864 bp, Zea Mays
tcccctcgcgatttccacctcctcccccacccccacctccgtaacccacttccaggtgggccccccacatcgccgccggtgacacgcacctccctccctgcctcccccgctaccgaccaccacgtccacgcccccggtcatgacgacctcgccgccgcccgccgagcaggaacagcaggaggaagaggaggtgctggtgccgcatggcccgcaccaggagctgcccaatggagcgcagccaatggaagttgtgcctgctgagccagctgctaccgtggagaaccaacagatagaggatccaccaatctcgagatttacttggaccattgagaatttatcaagagttagcacaaagaagctctactctgaaatttttgttgttggaggctacaagtggcgaattttgattttccctcgggggaataatgttgaattcttatctatgtatttggatgtagctgattctggagtcttgccctatggatggactagatacgcacaattcagcctctctgtggttaatcagattcacaacaagttcacaataagaaaagaaacacaacatcagttctctgctcgagaaagtgattggggtttcacttcatttatgccgctgggtgaactctacaacccaagtaggggttatcttgtaaatgatacttgtatagtggaagctgaagttgctgtgtgtaaagttgttgagtattggagttatgactctaaaaaggaaactggctatgttggtcttaaaaatcagggtgctacctgctatatgaattctcttcttcagacactctaccacattccgtatttcagaaagatacagctaactacagatatctcttgccaggctgtttatcacatgcccaccaccgagaacgatatgccctcaggaagcatcccactagctctacagtcactcttttataagttgcagtataatgacagcagtgtctctacaaaggagctcacaaaatcgtttgggtgggatatgcatgattcatttatgcaacatgatgtacaagaattgaacagagttctttccgagaagttggaagataagatgaagggaactgttgtggagggaacgatacaacaattgtttgaagggcaccacatgaactacattgagtatctccagcttgatgtcaaaggttgtcaggatgtctatgcttcatttgataagtacgtagaagtggagcgtctggaaggtgacaacaagtatcatgccgacaaacatggcctgcaggatgcaaaaaaaggagttctttttatcgacttccctcctgttttgcaacttcagctaaaacgttttgagtatgatttcatgcgtgacacgatggtgaagataaacgatcgttatgaatttccactccaattggatcttgatagagataatggaaaatatttatctcctgatgctgacaggaatgtgcgtaatctttatacccttcacagcttgttagatgttgatgatattttagctattaaagctataagatgtgtagttgttgatctgatagacagccatgctcataacgattactcttacagtgttcttgtccatagtggtggtgttcatggtggacattactatgctttcatacgacctacactttctgatcaatggttcaagtttgatgatgagcgtgtgacaaaagaagatgcaaagagggcactagaagagcaatatggtggtgaggaggagctacctcagacaaatcctggcttaaacaacaccccattcaagtttactaaatattcaaatgcatacatgcttgtgtacattcgtgaaagtgacaaggacaaaattatatgtaatgtggatgagaaagatatagcggagcatcttcggattagattagaaaatgaccgtgaagagaaggaacgtcggaagaaggaaaaagcggaggcacacctctatactataatcaaggttgcaagggatgatgacttaaaagctcagatagggaaagacatatattttgatcttgttgatcatgataaagtcccaagcttccgtatccagaaacagatgacctttgctcaattcaaggttgggcagctaaaggaactggtgaacaaggcccacaacgcagaactgaaactgttcttggaagttgaacttggactggaccttaaacctcttcctcttcccgacaagactagagaagatatatttcttttcttcaaactctatgaacctgaaaaggaacagctgcggtatgttggtaggctttttgtaaaggcttcaggaagaccacaggacattctgctgaagttaaggatgttggcaggtttttcacaggatgatgatattgaactttatgaggaaattaagttcgagcccaatgtgatgtgtgaatacattgacaacaggcttctgtttcgatcttgccagcttgaagacggggatataatttgttttcaaaagccttcaaaaccagatagtgcagaccgatatcgatttcctgacgtcccatcctttttgacgtatatacgtaaccggcaggtggtgcacttccgttcattggagaagcccaaggacgacgaattttgccttgagatgtcaaagattttcacatatgatcaagtcgtggaaaaagtagctgaaaaacttggcgtggatgacccatcgaaaattcgtcttacatcacataattgttattcgcaacagcctaagcctcaaccaataaagtacagaggcgttgaacgtctactggatatgctgattcattataaccagacttctgatattctgtactatgaagtattggacataccacttccagaattacaagcgctgaagacattaaaagttacctaccatcatgccacaaaagatgaggtgtcagttcacagtataagattaccaaaaaacagcactgttggcgatgtgctgaatgatatcaaaacgaaggttgagttgtctcataccaatgctgagctaagattacttgaggtcttttatcacaagatatacaaggtatttgcaccaaatgaaaagattgaaaacatcaatgatcagtactggacactgcgtgcagaggaggttccagaggaggagaaaaatcttggccccttcgatcgtttgattcatgtatatcattttacaaaagacactcaaaaccaaacgcaagttcagaactttggagaacctttttttatggttattcgtgaggatgagaccctatcttctatcaaagaacgtatacagaaaaagcttaaggttccagatgaggatttctcaaagtggaagtttgcatacatttcactcggtcgtcctgactattttgaagattcagatactgtagccctaaaattccagagaaacatgtatggagcttgggagcagtatcttggactggaacatccggacacggctcctaggaaggcacacacggctaatcagaaccggcattcattcgagagacctgtaaaaatttataactaggcatgttagaaattgagcgatgagctgccgctcaataccaagccaggctgaagttgctggcttgaaatagagagcatgttgctcaggtttttcgatggagctgtggaactagttcagaggagactgatcgggcgacttgtcatctttcctgtttgttttgctgccccggatatataaagttgtacagagatgaccccaccagacaattgtctttagtagataagataactttttacagtcgagtggccgatgttttagtcgatcactctgttctgcagttggtggtggtgctaggtggccttgagctgttgagggtacttgtctttcgactctttctgtatattattgacgcggcggatgtttgtaattccaatgatacatttcttacttgctggtttccggtgctttcc

SEQ ID NO: 10384 - DNA, 3939 bp, Zea Mays
tcccctcgcgatttccacctcctcccccacccccacctccgtaacccacttccaggtgggccccccacatcgccgccggtgacacgcacctccctccctgcctcccccgctaccgaccaccacgtccacgcccccggtcatgacgacctcgccgccgcccgccgagcaggaacagcaggaggaagaggaggtgctggtgccgcatggcccgcaccaggagctgcccaatggagcgcagccaatggaagttgtgcctgctgagccagctgctaccgtggagaaccaacagatagaggatccaccaatctcgagatttacttggaccattgagaatttatcaagagttagcacaaagaagctctactctgaaatttttgttgttggaggctacaagtggcgaattttgattttccctcgggggaataatgttgaattcttatctatgtatttggatgtagctgattctggagtcttgccctatggatggactagatacgcacaattcagcctctctgtggttaatcagattcacaacaagttcacaataagaaaagaaacacaacatcagttctctgctcgagaaagtgattggggtttcacttcatttatgccgctgggtgaactctacaacccaagtaggggttatcttgtaaatgatacttgtatagtggaagctgaagttgctgtgtgtaaagttgttgagtattggagttatgactctaaaaaggaaactggctatgttggtcttaaaaatcagggtgctacctgctatatgaattctcttcttcagacactctaccacattccgtatttcagaaaggctgtttatcacatgcccaccaccgagaacgatatgccctcaggaagcatcccactagctctacagtcactcttttataagttgcagtataatgacagcagtgtctctacaaaggagctcacaaaatcgtttgggtgggatatgcatgattcatttatgcaacatgatgtacaagaattgaacagagttctttccgagaagttggaagataagatgaagggaactgttgtggagggaacgatacaacaattgtttgaagggcaccacatgaactacattgagtatctccagcttgatgtcaaaggttgtcaggatgtctatgcttcatttgataagtacgtagaagtggagcgtctggaaggtgacaacaagtatcatgccgacaaacatggcctgcaggtcctagagccctctgaggcgtctatggaccacaatgggaggcaacatgctcatcgctactggatgtcttcaattccttgtaggtgtgttaaggatgcaaaaaaaggagttctttttatcgacttccctcctgttttgcaacttcagctaaaacgttttgagtatgatttcatgcgtgacacgatggtgaagataaacgatcgttatgaatttccactccaattggatcttgatagagataatggaaaatatttatctcctgatgctgacaggaatgtgcgtaatctttatacccttcacagtggtggtgttcatggtggacattactatgctttcatacgacctacactttctgatcaatggttcaagtttgatgatgagcgtgtgacaaaagaagatgcaaagagggcactagaagagcaatatggtggtgaggaggagctacctcagacaaatcctggcttaaacaacaccccattcaagtttactaaatattcaaatgcatacatgcttgtgtacattcgtgaaagtgacaaggacaaaattatatgtaatgtggatgagaaagatatagcggagcatcttcggattagattagaaaatgaccgtgaagagaaggaacgtcggaagaaggaaaaagcggaggcacacctctatactataatcaaggttgcaagggatgatgacttaaaagctcagatagggaaagacatatattttgatcttgttgatcatgataaagtcccaagcttccgtatccagaaacagatgacctttgctcaattcaaggaggaggtagcaaaagagtttggtattcctacacagtttcaacgattttggctgtgggccaagcgacaaaaccatacctaccgacctaacaggccattgtgtcctcaagacgaagcacatactgttgggcagctaaaggaactggtgaacaaggcccacaacgcagaactgaaactgttcttggaagttgaacttggactggaccttaaacctcttcctcttcccgacaagactagagaagatatatttcttttcttcaaactctatgaacctgaaaaggaacagctgcggtatgttggtaggctttttgtaaaggcttcaggaagaccacaggacattctgctgaagttaaggatgttggcaggtttttcacaggatgatgatattgaactttatgaggaaattaagttcgagcccaatgtgatgtgtgaatacattgacaacaggcttctgtttcgatcttgccagcttgaagacggggatataatttgttttcaaaagccttcaaaaccagatagtgcagaccgatatcgatttcctgacgtcccatcctttttgacgtatatacgtaaccggcaggtggtgcacttccgttcattggagaagcccaaggacgacgaattttgccttgagatgtcaaagattttcacatatgatcaagtcgtggaaaaagtagctgaaaaacttggcgtggatgacccatcgaaaattcgtcttacatcacataattgttattcgcaacagcctaagcctcaaccaataaagtacagaggcgttgaacgtctactggatatgctgattcattataaccagacttctgatattctgtactatgaagtattggacataccacttccagaattacaagcgctgaagacattaaaagttacctaccatcatgccacaaaagatgaggtgtcagttcacagtataagattaccaaaaaacagcactgttggcgatgtgctgaatgatatcaaaacgaaggttgagttgtctcataccaatgctgagctaagattacttgaggtcttttatcacaagatatacaaggtatttgcaccaaatgaaaagattgaaaacatcaatgatcagtactggacactgcgtgcagaggaggttccagaggaggagaaaaatcttggccccttcgatcgtttgattcatgtatatcattttacaaaagacactcaaaaccaaacgcaagttcagaactttggagaacctttttttatggttattcgtgaggatgagaccctatcttctatcaaagaacgtatacagaaaaagcttaaggttccagatgaggatttctcaaagtggaagtttgcatacatttcactcggtcgtcctgactattttgaagattcagatactgtagccctaaaattccagagaaacatgtatggagcttgggagcagtatcttggactggaacatccggacacggctcctaggaaggcacacacggctaatcagaaccggcattcattcgagagacctgtaaaaatttataactaggcatgttagaaattgagcgatgagctgccgctcaataccaagccaggctgaagttgctggcttgaaatagagagcatgttgctcaggtttttcgatggagctgtggaactagttcagaggagactgatcgggcgacttgtcatctttcctgtttgttttgctgccccggatatataaagttgtacagagatgaccccaccagacaattgtctttagtagataagataactttttacagtcgagtggccgatgttttagtcgatcactctgttctgcagttggtggtggtgctaggtggccttgagctgttgagggtacttgtctttcgactctttctgtatattattgacgcggcggatgtttgtaattccaatgatacatttcttacttgctggtttccggtgctttcc

SEQ ID NO: 10385 - DNA, 3976 bp, Zea Mays
tcccctcgcgatttccacctcctcccccacccccacctccgtaacccacttccaggtgggccccccacatcgccgccggtgacacgcacctccctccctgcctcccccgctaccgaccaccacgtccacgcccccggtcatgacgacctcgccgccgcccgccgagcaggaacagcaggaggaagaggaggtgctggtgccgcatggcccgcaccaggagctgcccaatggagcgcagccaatggaagttgtgcctgctgagccagctgctaccgtggagaaccaacagatagaggatccaccaatctcgagatttacttggaccattgagaatttatcaagagttagcacaaagaagctctactctgaaatttttgttgttggaggctacaagtggcgaattttgattttccctcgggggaataatgttgaattcttatctatgtatttggatgtagctgattctggagtcttgccctatggatggactagatacgcacaattcagcctctctgtggttaatcagattcacaacaagttcacaataagaaaagaaacacaacatcagttctctgctcgagaaagtgattggggtttcacttcatttatgccgctgggtgaactctacaacccaagtaggggttatcttgtaaatgatacttgtatagtggaagctgaagttgctgtgtgtaaagttgttgagtattggagttatgactctaaaaaggaaactggctatgttggtcttaaaaatcagggtgctacctgctatatgaattctcttcttcagacactctaccacattccgtatttcagaaaggctgtttatcacatgcccaccaccgagaacgatatgccctcaggaagcatcccactagctctacagtcactcttttataagttgcagtataatgacagcagtgtctctacaaaggagctcacaaaatcgtttgggtgggatatgcatgattcatttatgcaacatgatgtacaagaattgaacagagttctttccgagaagttggaagataagatgaagggaactgttgtggagggaacgatacaacaattgtttgaagggcaccacatgaactacattgagtatctccagcttgatgtcaaaggttgtcaggatgtctatgcttcatttgataagtacgtagaagtggagcgtctggaaggtgacaacaagtatcatgccgacaaacatggcctgcaggtcctagagccctctgaggcgtctatggaccacaatgggaggcaacatgctcatcgctactggatgtcttcaattccttgtaggtgtgttaaggatgcaaaaaaaggagttctttttatcgacttccctcctgttttgcaacttcagctaaaacgttttgagtatgatttcatgcgtgacacgatggtgaagataaacgatcgttatgaatttccactccaattggatcttgatagagataatggaaaatatttatctcctgatgctgacaggaatgtgcgtaatctttatacccttcacagctcataacgattactcttacagtgttcttgtccatagtggtggtgttcatggtggacattactatgctttcatacgacctacactttctgatcaatggttcaagtttgatgatgagcgtgtgacaaaagaagatgcaaagagggcactagaagagcaatatggtggtgaggaggagctacctcagacaaatcctggcttaaacaacaccccattcaagtttactaaatattcaaatgcatacatgcttgtgtacattcgtgaaagtgacaaggacaaaattatatgtaatgtggatgagaaagatatagcggagcatcttcggattagattagaaaatgaccgtgaagagaaggaacgtcggaagaaggaaaaagcggaggcacacctctatactataatcaaggttgcaagggatgatgacttaaaagctcagatagggaaagacatatattttgatcttgttgatcatgataaagtcccaagcttccgtatccagaaacagatgacctttgctcaattcaaggaggaggtagcaaaagagtttggtattcctacacagtttcaacgattttggctgtgggccaagcgacaaaaccatacctaccgacctaacaggccattgtgtcctcaagacgaagcacatactgttgggcagctaaaggaactggtgaacaaggcccacaacgcagaactgaaactgttcttggaagttgaacttggactggaccttaaacctcttcctcttcccgacaagactagagaagatatatttcttttcttcaaactctatgaacctgaaaaggaacagctgcggtatgttggtaggctttttgtaaaggcttcaggaagaccacaggacattctgctgaagttaaggatgttggcaggtttttcacaggatgatgatattgaactttatgaggaaattaagttcgagcccaatgtgatgtgtgaatacattgacaacaggcttctgtttcgatcttgccagcttgaagacggggatataatttgttttcaaaagccttcaaaaccagatagtgcagaccgatatcgatttcctgacgtcccatcctttttgacgtatatacgtaaccggcaggtggtgcacttccgttcattggagaagcccaaggacgacgaattttgccttgagatgtcaaagattttcacatatgatcaagtcgtggaaaaagtagctgaaaaacttggcgtggatgacccatcgaaaattcgtcttacatcacataattgttattcgcaacagcctaagcctcaaccaataaagtacagaggcgttgaacgtctactggatatgctgattcattataaccagacttctgatattctgtactatgaagtattggacataccacttccagaattacaagcgctgaagacattaaaagttacctaccatcatgccacaaaagatgaggtgtcagttcacagtataagattaccaaaaaacagcactgttggcgatgtgctgaatgatatcaaaacgaaggttgagttgtctcataccaatgctgagctaagattacttgaggtcttttatcacaagatatacaaggtatttgcaccaaatgaaaagattgaaaacatcaatgatcagtactggacactgcgtgcagaggaggttccagaggaggagaaaaatcttggccccttcgatcgtttgattcatgtatatcattttacaaaagacactcaaaaccaaacgcaagttcagaactttggagaacctttttttatggttattcgtgaggatgagaccctatcttctatcaaagaacgtatacagaaaaagcttaaggttccagatgaggatttctcaaagtggaagtttgcatacatttcactcggtcgtcctgactattttgaagattcagatactgtagccctaaaattccagagaaacatgtatggagcttgggagcagtatcttggactggaacatccggacacggctcctaggaaggcacacacggctaatcagaaccggcattcattcgagagacctgtaaaaatttataactaggcatgttagaaattgagcgatgagctgccgctcaataccaagccaggctgaagttgctggcttgaaatagagagcatgttgctcaggtttttcgatggagctgtggaactagttcagaggagactgatcgggcgacttgtcatctttcctgtttgttttgctgccccggatatataaagttgtacagagatgaccccaccagacaattgtctttagtagataagataactttttacagtcgagtggccgatgttttagtcgatcactctgttctgcagttggtggtggtgctaggtggccttgagctgttgagggtacttgtctttcgactctttctgtatattattgacgcggcggatgtttgtaattccaatgatacatttcttacttgctggtttccggtgctttcc

SEQ ID NO: 10386 - DNA, 3987 bp, Zea Mays
tcccctcgcgatttccacctcctcccccacccccacctccgtaacccacttccaggtgggccccccacatcgccgccggtgacacgcacctccctccctgcctcccccgctaccgaccaccacgtccacgcccccggtcatgacgacctcgccgccgcccgccgagcaggaacagcaggaggaagaggaggtgctggtgccgcatggcccgcaccaggagctgcccaatggagcgcagccaatggaagttgtgcctgctgagccagctgctaccgtggagaaccaacagatagaggatccaccaatctcgagatttacttggaccattgagaatttatcaagagttagcacaaagaagctctactctgaaatttttgttgttggaggctacaagtggcgaattttgattttccctcgggggaataatgttgaattcttatctatgtatttggatgtagctgattctggagtcttgccctatggatggactagatacgcacaattcagcctctctgtggttaatcagattcacaacaagttcacaataagaaaagaaacacaacatcagttctctgctcgagaaagtgattggggtttcacttcatttatgccgctgggtgaactctacaacccaagtaggggttatcttgtaaatgatacttgtatagtggaagctgaagttgctgtgtgtaaagttgttgagtattggagttatgactctaaaaaggaaactggctatgttggtcttaaaaatcagggtgctacctgctatatgaattctcttcttcagacactctaccacattccgtatttcagaaagatacagctaactacagatatctcttgccaggctgtttatcacatgcccaccaccgagaacgatatgccctcaggaagcatcccactagctctacagtcactcttttataagttgcagtataatgacagcagtgtctctacaaaggagctcacaaaatcgtttgggtgggatatgcatgattcatttatgcaacatgatgtacaagaattgaacagagttctttccgagaagttggaagataagatgaagggaactgttgtggagggaacgatacaacaattgtttgaagggcaccacatgaactacattgagtatctccagcttgatgtcaaaggttgtcaggatgtctatgcttcatttgataagtacgtagaagtggagcgtctggaaggtgacaacaagtatcatgccgacaaacatggcctgcaggatgcaaaaaaaggagttctttttatcgacttccctcctgttttgcaacttcagctaaaacgttttgagtatgatttcatgcgtgacacgatggtgaagataaacgatcgttatgaatttccactccaattggatcttgatagagataatggaaaatatttatctcctgatgctgacaggaatgtgcgtaatctttatacccttcacagcttgttagatgttgatgatattttagctattaaagctataagatgtgtagttgttgatctgatagacagccatgctcataacgattactcttacagtgttcttgtccatagtggtggtgttcatggtggacattactatgctttcatacgacctacactttctgatcaatggttcaagtttgatgatgagcgtgtgacaaaagaagatgcaaagagggcactagaagagcaatatggtggtgaggaggagctacctcagacaaatcctggcttaaacaacaccccattcaagtttactaaatattcaaatgcatacatgcttgtgtacattcgtgaaagtgacaaggacaaaattatatgtaatgtggatgagaaagatatagcggagcatcttcggattagattagaaaatgaccgtgaagagaaggaacgtcggaagaaggaaaaagcggaggcacacctctatactataatcaaggttgcaagggatgatgacttaaaagctcagatagggaaagacatatattttgatcttgttgatcatgataaagtcccaagcttccgtatccagaaacagatgacctttgctcaattcaaggaggaggtagcaaaagagtttggtattcctacacagtttcaacgattttggctgtgggccaagcgacaaaaccatacctaccgacctaacaggccattgtgtcctcaagacgaagcacatactgttgggcagctaaaggaactggtgaacaaggcccacaacgcagaactgaaactgttcttggaagttgaacttggactggaccttaaacctcttcctcttcccgacaagactagagaagatatatttcttttcttcaaactctatgaacctgaaaaggaacagctgcggtatgttggtaggctttttgtaaaggcttcaggaagaccacaggacattctgctgaagttaaggatgttggcaggtttttcacaggatgatgatattgaactttatgaggaaattaagttcgagcccaatgtgatgtgtgaatacattgacaacaggcttctgtttcgatcttgccagcttgaagacggggatataatttgttttcaaaagccttcaaaaccagatagtgcagaccgatatcgatttcctgacgtcccatcctttttgacgtatatacgtaaccggcaggtggtgcacttccgttcattggagaagcccaaggacgacgaattttgccttgagatgtcaaagattttcacatatgatcaagtcgtggaaaaagtagctgaaaaacttggcgtggatgacccatcgaaaattcgtcttacatcacataattgttattcgcaacagcctaagcctcaaccaataaagtacagaggcgttgaacgtctactggatatgctgattcattataaccagacttctgatattctgtactatgaagtattggacataccacttccagaattacaagcgctgaagacattaaaagttacctaccatcatgccacaaaagatgaggtgtcagttcacagtataagattaccaaaaaacagcactgttggcgatgtgctgaatgatatcaaaacgaaggttgagttgtctcataccaatgctgagctaagattacttgaggtcttttatcacaagatatacaaggtatttgcaccaaatgaaaagattgaaaacatcaatgatcagtactggacactgcgtgcagaggaggttccagaggaggagaaaaatcttggccccttcgatcgtttgattcatgtatatcattttacaaaagacactcaaaaccaaacgcaagttcagaactttggagaacctttttttatggttattcgtgaggatgagaccctatcttctatcaaagaacgtatacagaaaaagcttaaggttccagatgaggatttctcaaagtggaagtttgcatacatttcactcggtcgtcctgactattttgaagattcagatactgtagccctaaaattccagagaaacatgtatggagcttgggagcagtatcttggactggaacatccggacacggctcctaggaaggcacacacggctaatcagaaccggcattcattcgagagacctgtaaaaatttataactaggcatgttagaaattgagcgatgagctgccgctcaataccaagccaggctgaagttgctggcttgaaatagagagcatgttgctcaggtttttcgatggagctgtggaactagttcagaggagactgatcgggcgacttgtcatctttcctgtttgttttgctgccccggatatataaagttgtacagagatgaccccaccagacaattgtctttagtagataagataactttttacagtcgagtggccgatgttttagtcgatcactctgttctgcagttggtggtggtgctaggtggccttgagctgttgagggtacttgtctttcgactctttctgtatattattgacgcggcggatgtttgtaattccaatgatacatttcttacttgctggtttccggtgctttcc

SEQ ID NO: 10387 - DNA, 2252 bp, Zea Mays
tctctatgcaaggcagaaaaaaactaacaagtcttccgcaaggataacaggaccatgctctccaggaaggacttgtttaaggacactctaagaaaggcagcccatgcatggaagcgtattgtggaactacgtctcacagaggaggaagcaggtatgctgaggctatacgtcgatcagcctggttatgttgatctgcattggggcatgtttgttcctgctataaaaggtcaaggtactgaggagcagcagaaaaagtggttaccaatggcttacaagttccaaataattgggtgctatgctcagactgaactcggtcatggctcaaacgttcagggccttgaaacaactgccacatttgatccaaagactgatgagtttgtcatccacagtccaactctgacctccagcaaatggtggcctggtggcttggggaaagcttccactcatgcagtggtgtatgctcggctgataactgaaggaaaggactatggtatacatggtttcattgtgcaactgcgaagcttagaggatcactcccctcttcctggtattactctgggtgatattggtggaaaatttggcagtggtgcatataacagtatggacaatggtgttctgcgatttgaccatgctttcacaagttacaagggaggggaaatatgttcattcagatgtcccaaagcagctgctttatgggacaatggtttttgttcgccagacaatagtcgcagatgcttctaaggctttgtcccgtgctgtttgcattgctgtacgatacagcgccatccgaaagcagtttggctctcaagatggtggccctgagactaaggtccttgattacaagactcaacaaagcagactctttccgttgctggcttcagcatatgcatttagatttgtgggtgactggctgaagtggctatacatggatgtcactcagaaactggaagctaaagactactcaacactgcaagaagcccatgcctgtactgctggtttgaaggctgtgacaacatctgcaacagctgatgccattgaagaatgtagaaagctctgtggcggacatggttacctgaacagcagtgggcttcctgaattgtttgctgtctatgttcctgcttgcacttatgaaggagacaatattgttctgcttttgcaggttgcaaggattctaatgaagaccttatctcaattgacatctggaaaacaacctgttggtacaatggcttacatgggcaatgtacaatatctgatgcaatgcaaatgtgctgttaacacagctgaagattggcttaaccctgttgccatacaagaggcgtttgaagccagggctctcaggatggcagtaaactgtgcccagaacataggccaagcagcaaaccaagaagaaggtttctatgagcggtcccctgatttgctagaggctgcagtagctcacatccagttggtcattgtaaccaagttcatttcgaaggtgcagcaggacattcctggacctggagtgaaggaacagctccagaacctttgcaatgtctatgccctctacattctccacaagcacctgggcgacttcctggcaaccgggtgcatcacacccaagcagggagcgctggcaaacgagcagctgggcaagctttacgcacaggtgcgtccaaatgctgttgcgctggttgatgccttcaactacacagaccactacctggggtctgtgctggggcggtacgatgggaatgtgtacccagcgctgtacgaggaggcgtggaaggaccctctgaacgagacggtggtgcccgaggggtaccacgagtacctccgccccttgctcaagcagcagctcaagctctccaggctctagtctgatcggctaccccccctggaattctccatggcggctgccttctcagaaaatctcacgcgacctccgaatgaaagtgatgtaagctactaacgattcttgttagagccaggaaagaggctctccagccaattataaatttattcctcaagctctgaggatcaagttcaagctgtggattatataggaagcacgtttaataattaataaagagggagaggatgagcatctctctgttgctgctcaagtgttgtgcgcagtgcgagtagtagaatgaatatgtatgtacgagtgcgtgtattgtatggtgaattgaagttccatttgtttgctaaaagtatatcagaaaacaatggcttgatttgcctaagtccaaaatgaaagccagattccgaac

SEQ ID NO: 10388 - DNA, 790 bp, Zea Mays
atggcgtcgcggcaccggaatgcttctccggtgacggcagggaaggactcgccgcagcctgcctcggcggcaacctcgctgcggcttgtggcagagttcccgctcgacgcgcccgaggccaaggagagcgtgaccgttaccgtccgcttccggccgctcagctcgcaggaggttcggctgggggaagagatcgcttggtacgcggatggggacaccattgtgcggagcgagcagaatcacagcatcgcttacgcgtacgatcgggtcttcggaccaactacaacaacccgacacgtatatgatgctgcagctctgcatgttattagtggtgccatggagggaataaatggtacaatatttgcatatggagttacaagcagtgggaagacacatacgatgcatggagatcaaagatccccggggatcatacctttggctgtgaaagatgcatttagtataatacaggagactccaaagcgagagtttcttcttcgtgtatcatacttggaaatctataatgaggttgtaaacgatcttcttaatccttcgggtcagaacttacggattagggaggatcttcagggaacatttgtcgagggcataaaagaagaagtggtcttgtctcctgcacatgctttgtcccttattgcagccggagaagaacatagacatgttggatccacaaatttcaatttgctaagcagcaggagccatacaattttcacactgacaatagagagcagcggcccctgcagtgaatctagtgaagaggaagcggttaccttctcac

SEQ ID NO: 10389 - DNA, 3162 bp, Zea Mays
atggcgtcgcggcaccggaatgcttctccggtgacggcagggaaggactcgccgcagcctgcctcggcggcaacctcgctgcggcttgtggcagagttcccgctcgacgcgcccgaggccaaggagagcgtgaccgttaccgtccgcttccggccgctcagctcgcaggaggttcggctgggggaagagatcgcttggtacgcggatggggacaccattgtgcggagcgagcagaatcacagcatcgcttacgcgtacgatcgggtcttcggaccaactacaacaacccgacacgtatatgatgctgcagctctgcatgttattagtggtgccatggagggaataaatggtacaatatttgcatatggagttacaagcagtgggaagacacatacgatgcatggagatcaaagatccccggggatcatacctttggctgtgaaagatgcatttagtataatacaggagactccaaagcgagagtttcttcttcgtgtatcatacttggaaatctataatgaggttgtaaacgatcttcttaatccttcgggtcagaacttacggattagggaggatcttcagggaacatttgtcgagggcataaaagaagaagtggtcttgtctcctgcacatgctttgtcccttattgcagccggagaagacaatagagagcagcggcccctgcagtgaatctagtgaagaggaagcggttaccttctcacagctgaacctcatcgatctggcaggttcagagagttcaagggctgaaactacaggagtacgccggaaggaaggatcttatatcaataaaagcttgctaactcttggaacggtgatatcaaaactgactgatggaaaagctactcatgttccatttcgagattccaaattgacacggttactacagtcatccttaagtggccagggacgtgtttctctaatatgcactgttactccagcatcaagcaattcagaagagactcgtaacacgttaaaatttgcccaccgtgcaaagcacattgagattcaagtgtcacaaaacaagattatggatgagaagtctttgataaagaagtaccagaatgaaatttgccaattaaaggaagagctagaccaactgaaaaggggtatactttctggcactccttcgaaagatgccacagaagacaatgtcattctttggaaacagaagctagaagatggtaatgtcaagctccagtctagactggaacaagaagaggcagctaaagctgctttgcttgcaaggatacaacgtctaacaaagctaatcctggtttccacaaaagcaactcagactcctagactgtcccaatgtcctaggccaaggagaagacattcttttggtgaagaggagttggcatgtctcccacacagaaggcgagatattgtattggatggtgaaagcaatgatttatttgttgctatggaaggatttgatgaaacatttgaagtttcttccaaaggagagaacaagaatcgcaaagggcttcttaactggttcaaacttcggaaacatgacggtggttctaatgctccaagcttaggtggtgaccaatctagcctgaggaaagcattggctgccccttggacacccgtagaaattggacttaattctcaaacagagcaagagatgtctaattctcccgagaatctatcagctaacctactgagcattgaccatgaagaatttcattctgatggactttatggagaagaagcttctttggtacaatatatgagcacatctttctttgtttattctactactcatctaatcagaaccaatgcaggatacgtcaccagaaaaacatcagatcatgttgatttattgagagagcaactgaagatcctatcagaggaggttgcattacataaaagtgttctaaagcgactcgtcgaaggagctggaagaagcacaatgaatgggcatgtcgagatcgaaatgaaaaaggtcagtgacgagattaaggacaagcagcagcagatagcacatttagaaaggcagattaagggggagcttgaccagttagaacatacaccgtctcatgctacgctcctggagcaggtcaacgagaaagcatttgaacttgaggtgaagacagcagataacagaatattgcaagaccagctacaacaaaagacgagagagtgtcaggcattagaagaaacagttgcccacttacacgaacagctttcccaagctcttgaagctaatgatttattgtcagaaagcatcatatttcagcagtacacagacaacaaccttcaaactggatcgcaaattcacattgaaaatccagaatctatagatatctctgatgaactgcatcagaaggcagagcagagattgatgaattgaagcaaagattgtgtgagcttactgaggccaaaactcaactagagacccacaatcagaagctgcaagaggaaagcatgtacgcaaaaggcctggcctcggctgcaggtgtggaactgaaagcactgtctggggaggtcaccaaactcatgaaccacaacgagaggctcgcgaacgatttggctttggcaagaaattcaacacgagtgagaagtggtcatagggttgggaggagggatagctatactaaacggcttgagccagcgagtagaagagatgttcatgctagcagtgagagggaatcagctctggaggtcatgcttatggcgaaagaccaaagagaggcagagctccaaaagaaaatcgaggagtccaagcagaaggaagccttcctggaaggagagcttgcgaacatgtgggttcttgtggcgaaactgaagaaaggtcaggtaattgaccaagatgatgtctcgatgccgtacccaatggatcgtgattcatgaccctagacaatgacaaaaacaattattgaatcggctatgcttcggcattgcactttccttgtctgtggactgtggtggtttgcaccagtgtgaatccgtgtatctatattgccggtagttgtaattagctggattggaatcttgtaatgtatataacaatcagattttgccttgttctcaggattgtcatgcctgtctagtttgttcagggctttcaacaattatactgtacatagattgtcgagtggaaagaaatgaaagcctgatgatgcatctccccca

SEQ ID NO: 10390 - DNA, 3327 bp, Zea Mays
atggcgtcgcggcaccggaatgcttctccggtgacggcagggaaggactcgccgcagcctgcctcggcggcaacctcgctgcggcttgtggcagagttcccgctcgacgcgcccgaggccaaggagagcgtgaccgttaccgtccgcttccggccgctcagctcgcaggaggttcggctgggggaagagatcgcttggtacgcggatggggacaccattgtgcggagcgagcagaatcacagcatcgcttacgcgtacgatcgggtcttcggaccaactacaacaacccgacacgtatatgatgctgcagctctgcatgttattagtggtgccatggagggaataaatggtacaatatttgcatatggagttacaagcagtgggaagacacatacgatgcatggagatcaaagatccccggggatcatacctttggctgtgaaagatgcatttagtataatacaggagactccaaagcgagagtttcttcttcgtgtatcatacttggaaatctataatgagtgccctttcgcccaggaagtctgtaatcaaattctcaattgggaaggattgacaatgccacaacaagcaaacccatcaaactttgatagcattagcgagtggtgggaatcggcggcttctcacatctccagagaccgcagtagagaattcaatggatctgtgatctacaccatgtggaatatctggaaagagcgcaaccgaaggatcttcgagcacaactcgctatcggttgtaaacgatcttcttaatccttcgggtcagaacttacggattagggaggatcttcagggaacatttgtcgagggcataaaagaagaagtggtcttgtctcctgcacatgctttgtcccttattgcagccggagaagaacatagacatgttggatccacaaatttcaatttgctaagcagcaggagccatacaattttcacactgaacctcatcgatctggcaggttcagagagttcaagggctgaaactacaggagtacgccggaaggaaggatcttatatcaataaaagcttgctaactcttggaacggtgatatcaaaactgactgatggaaaagctactcatgttccatttcgagattccaaattgacacggttactacagtcatccttaagtggccagggacgtgtttctctaatatgcactgttactccagcatcaagcaattcagaagagactcgtaacacgttaaaatttgcccaccgtgcaaagcacattgagattcaagtgtcacaaaacaagattatggatgagaagtctttgataaagaagtaccagaatgaaatttgccaattaaaggaagagctagaccaactgaaaaggggtatactttctggcactccttcgaaagatgccacagaagacaatgtcattctttggaaacagaagctagaagatggtaatgtcaagctccagtctagactggaacaagaagaggcagctaaagctgctttgcttgcaaggatacaacgtctaacaaagctaatcctggtttccacaaaagcaactcagactcctagactgtcccaatgtcctaggccaaggagaagacattcttttggtgaagaggagttggcatgtctcccacacagaaggcgagatattgtattggatggtgaaagcaatgatttatttgttgctatggaaggatttgatgaaacatttgaagtttcttccaaaggagagaacaagaatcgcaaagggcttcttaactggttcaaacttcggaaacatgacggtggttctaatgctccaagcttaggtggtgaccaatctagcctgaggaaagcattggctgccccttggacacccgtagaaattggacttaattctcaaacagagcaagagatgtctaattctcccgagaatctatcagctaacctactgagcattgaccatgaagaatttcattctgatggactttatggagaagaagcttctttggtcaccagaaaaacatcagatcatgttgatttattgagagagcaactgaagatcctatcagaggaggttgcattacataaaagtgttctaaagcgactcgtcgaaggagctggaagaagcacaatgaatgggcatgtcgagatcgaaatgaaaaaggtcagtgacgagattaaggacaagcagcagcagatagcacatttagaaaggcagattaagggggagcttgaccagttagaacatacaccgtctcatgctacgctcctggagcaggtcaacgagaaagcatttgaacttgaggtgaagacagcagataacagaatattgcaagaccagctacaacaaaagacgagagagtgtcaggcattagaagaaacagttgcccacttacacgaacagctttcccaagctcttgaagctaatgatttattgtcagaaagcatcatatttcagcagtacacagacaacaaccttcaaactggatcgcaaattcacattgaaaatccagaatctatagatatctctgatgaactgcatcagaaggcagagcagtcagagattgatgaattgaagcaaagattgtgtgagcttactgaggccaaaactcaactagagacccacaatcagaagctgcaagaggaaagcatgtacgcaaaaggcctggcctcggctgcaggtgtggaactgaaagcactgtctggggaggtcaccaaactcatgaaccacaacgagaggctcgcgaacgatttggctttggcaagaaattcaacacgagtgagaagtggtcatagggttgggaggagggatagctatactaaacggcttgagccagcgagtagaagagatgttcatgctagcagtgagagggaatcagctctggaggtcatgcttatggcgaaagaccaaagagaggcagagctccaaaagaaaatcgaggagtccaagcagaaggaagccttcctggaaggagagcttgcgaacatgtgggttcttgtggcgaaactgaagaaaggtcaggtaattgaccaagatgatgtctcgatgccgtacccaatggatcgtgattcatgaccctagacaatgacaaaaacaattattgaatcggctatgcttcggcattgcactttccttgtctgtggactgtggtggtttgcaccagtgtgaatccgtgtatctatattgccggtagttgtaattagctggattggaatcttgtaatgtatataacaatcagattttgccttgttctcaggattgtcatgcctgtctagtttgttcagggctttcaacaattatactgtacatagattgtcgagtggaaagaaatgaaagcctgatgatgcatctccccca

SEQ ID NO: 10391 - DNA, 2950 bp, Zea Mays
cctgcgtttcctccgacgtctgctctcccggcgaaggaagggaaggagccacgcgaaagaaagctgacgcccacgcgcccaggagcaccaccggtgacgcgtgatcatattcgagcaccaatcccctcatcctccccagcccccggcgctaaaatctacacaaagcctcgctaaaccggcctgattcgcgctcccgatctcgcgttcgatcccagcccaccgtgaggtcctccagcctcccgcctcccgccagatctcggtgtcgttcgttcggtttcgatttggtggtggaagggaagggatgagcgggatgagcgcacggataaaggagatggtgcgtgtggccacggcgcggctgggcggtgagcaggcggggggtggcggggcttcctcctcaggcttcgcgcgccgggagtccacggcgcggctcggcggcgggggcaccagcctccggaggcagccgcagccgatggcaccctccgtgcgcaccgtctgttgcaacgaccgcgaggccaacgcccctgtcgggtacaagggaaattctgtgtcgactacgaagtacaacatcctaactttcttacctaaaggattattcgagcagttcaggcgggttgcaaatctttactttctcatgatctcaatcatgtcaactacacctatcagtccagttcatcctgtcactaatgttgttcccctaagtcttgtgcttctggtgtctctcatcaaggaagcttttgaggattggaagcgttttcagaatgatatgtcaattaacaatgcacatgtcgatgtattgcaaggtcaatgttgggaaagtactccatggaaacgactgcaggttggagatattgtgaggatcaagcaagatggttatttccctgctgacttgctcttcctatcaagtacaaaccctgatggtgtttgctacatcgagacagcaaatcttgatggggaaacaaatctgaaaataaggaaggctttggagaagacttgggactatgtaattcctgaaaaggcttctgagttcaaaggtgaagtgcagtgtgaacaaccaaacaattccctttatacgtttactggcaatcttatcatggacaagcagactatacctctctcaccgaaccagttactcctaagaggatgcagccttcgtaatacagaatacattgttggtgttgtcatattcaccgggcacgagacaaaagttatgatgaattccatgaatgttccctccaaaagaagtacattggagaaaaagctagacaagcttatccttgccctttttgcaaccctcttcacaatgtgtgttattggtgccattggaagtggtgtgtttattaatgaaaaatacttttatcttggattgcgtgggcatgtggaggaccagttcaatccccaaaacaaatttgtggtgaccattttaaccatgtttactctaataactctatactcaaccatcatcccaatttctctttatgtgtccattgagatgatcaaattcatacagtgcacaaaattcattaataacgatcttcatatgtaccatgctgagagtaacacccctgctttggcgcggacttctaatcttaatgaggaacttgggcaggttgaatatatattttctgacaaaactggaacgcttacaagaaacctgatggaattctttaaatgctcgattggtggagaaatgtatggaactggcatcacagagattgagaaaggaggagcagagcgggctggaattaaaattgatgatgatgagggtaaaaggtctgccaatgcagtccatgaaaaaggattcaattttgatgacgctagaatcatgcgtggtgcatggagaaatgaacctaatcttgaggcttgcaagttcttccagagggtgaggaaactccggaaaagataagttaccaggctgcctcacctgatgaggctgcacttgtggctgctgctaagaattttggtttcttcttttacaggcgtacacccaccacagttatggttcgtgagtcacatgttgaaaggatggggagtatacaagatgttccatatgaaattctgaatgttctggaattcaacagcacgagaaagcgacaatcggtggtttgccgtttcccaaatggaagattagttctctattgcaagggtgctgataatgtcgtatatgaacgattggctgatggaaatcatgatatgaaaaagacaagcagagaacatctagagcaatttggttctgctggcttgcgtactctttgtcttgcctatcgggatcttagcagggagcaatacgaaagctggaatgaaaagtttgtacaagcaaagtcatctttacgagatcgtgataagaagctcgatgaggtggctgagttgattgaaaaagaccttatattagttgggtgcacagctatagaggacaaactgcaagaaggcgtgccaacctgcattgaaactctctctgcagctggcataaaaatttgggtgttaacgggagataagatggaaacagcaattaacattgcatatgcatgcagcttggtaaacaatgacaccaaacagttcatcattagttcagagacagacactattagggaggctgaagaccggggtgaccctgtggaaattgcacgtgttattaaagattcagtaaaacagagtctgaaaagctttcacgaggaagcccgacattctttgattagcacccctgaaaggaagttggctctcattattgatggtagatgcctgatgtatgcactggacccaactcttcgtgttgatcttcttggattgagtctaagttgccactcagttgtatgctgccgagtttctccgctgcaaaaggcacaggttacaagtttagttaggaagggcgctcagaaaataactctcagcattggtgacggtgctaatgatgtgagtatgattcaagctgctcatgttgggattggcatcagtg

SEQ ID NO: 10392 - DNA, 3294 bp, Zea Mays
ttttcacagccacagcccaaccaaacagaccctaaaacacacacaaaaaaagttggaaagaaaacccctcaaaaccctacaccctccatggccttattggctcccctcgccgccgccggagggaggcggtcaaacgatgctatcccttcccctacgccgccgccgccgcctccttcgcttctgcgctcgccggaaccctaccttcctgcgcctctccatcgctgcctccgcggctgccctctccaccgcccctaccgtcgcttccgccgtcgtcactcccatttccgaccgcctacgcgtcctccgctccctccacgctgtcgcccctgaccaccttctctcccacccgctcccctcatccgcccatatctgcctcgccgcccacctcgctgcccgcgctcgcctcttcgcgcactcccgccgcctcctctcccgcctgcttggtgctggccaccggccccacctcgccgcctccctcgtcgacattcttcaccgcgcggccctcgcgctggggcctcatcgcagcgcgctaccttccgtctttgacaccctcctctccctgctcgccgatcacggcctcctcgacgacgccgtccgcgcccttgcccgcgtgcggcagctgcgggtgccccccaacacccgtacctgcaaccacattctgctacgcctcgcccgcaaccgccaaggcgggctcgtcaggcggctcttcgaacatctgcccgcgcccaacgtgttcacgttcaatatcgtgattgattttctgtgcaagcagggagagcttgtggaagcgagggcattgttcgtgaggatgaaggcgatgggctgctcgccggacgttgtcacttacaattctttgattgatgggtacggtaagtgcggggagctggaagaggtggagttgttggtgtcagagatgaggaagtctggatgtgcagctgatgttgtgacgtacaatgcattgatcaattgcttttccaaatttgggtggatcgagaaggcctacagctactttggggagatgaagagactgggagtgatggcaaatgtggttacgttgagcacttttgtcgatgcattttgcaaagaagggttggtccgggaggcaatgaagctgtttgcacagatgagggtgaggggaatgatgccaaatgagttcacttatacttcattggtcgatggcacttgtaaggcagggaggctagatgatgccattgtattgcttgatgaaatggtgcaccaggggttggtgccaaatgtggtgacgtacactgttatggtcgatggcctttgcaaagagggtaaggttgctgtagcagatgatgttttgagtctgatggagagagctggtgttaaagccaatgagttgctctacactacacttatccatggacacttcatgaataagaacagtgagagggctctggatttgttgaatgagatgaagaataaaggaatggaacttgatgtctctctctatggcactcttatttggggtctctgtaaagttcaaaagctggatgaagctaagagtttgttgcataaaatggatgactgtggtttgagacctaatactgtcatttatacgacaataatggatgccttctttaaagcaggaaaagagtcagaggctgttgccttactccacaagattccggattctgggctccaacctaatgttgttacttattgtgcattaattgatggattgtgcaaagcaggatcaatctatgaggccatctctcattttgataaaatgagagagttaggtctggatccaaatgtacaagtttacaccaccttaattgatggtttttgcaagattggttccttgagtaaggctgtgcacttgatgaatgaaatggttgacaagggtatgtctcttgacaaagttgtgtacacatctctcattgatgggcacatgaagcagggagatctccagggtgcctttgcactcaaggccaagatgattgaaactggtttgcaacttgatctctattgctacacttgttttatctcgggcttctgtaatatgaatatgatgcaagaagctagaggggttctttcagaaatgattgggactggcattacacctgataagacggcttacaactgtctgataagaaaataccagaaactgggaaacatggaggaagcgtcaagtcttcagaacgaaatggaaagtgttttgagctcttgcacagaagaggatactgcttctggttctggttgtgaaacctgagtttgcagctgtacaaagagctggccggccttggagcatgtggcaagcacatctggagaatgggggcgccatgaagcacaagctgctgaaggatgtttccaaaatgttgttcgtgcctaatgggatttcgactgagagatctactagatcaaattgaagatggaaaataggtttcaaacactaagagagctgggatccaaaggaaaaagaagcaacccactggtgcttgaagagttcatgtgggaaaatgaatgggttgaagaaaatgaagatgatggtgacaacaacatatggtatgctgtggatgaggcattaggagcaactcaggctcttcgaggcagaaacgttccttaaatgaaggtttttgcgatgaagtggtcaaatgggccagagtcactgtacgttcttgaatcctgatgtcatcccggtcttagccaacaaagaagaattcaagggagagacatatcacatatgcaatagaggcgcgtgtagctaaaaacaagcccataacttgaagaccatgtagttttttttcagggacagcagcaacttgagagagaaccataacagtggatcttctcttgggtattggcaattccataccaagtggttatatacaggatttatgcaaagaaagaacagaacatttttgcgagagacatctgttgaaaaatcagcctcgaaggtgcctgtctcttctaggagcaaagagctgccgaacttcaagagaaaagtggaggaagaaagtctccttgtttaccaggaagaaacataggaaggaggcgtcaaaaacgcccgctggaaatgagaaaactgagggcacgtcctctgctgtagcaaaacagaaaccggggcacacgctctgcttcaaacgtctctaaactactttatgctatgaatttataatctttttaccattatgctcataaatcaatgaagtagtaagagaatacacacgtcgtcaatctatctccaattatttttttattatatataaagtatatggtgtctctgcccgcagcaacatatatctaatattagaatttagaacgctg

SEQ ID NO: 10393 - DNA, 1621 bp, Zea Mays
taataatgctcgctctgcttctcagtactacctccacgacatcgtgttccttgtcaagttctcataactcatagtgcatacatacatatatagcttgctttgtgtgccatcggaatcgcgaaatggcaagcgctagttctgcacaaggcgcacacgagacagaccctgagaaggtgaagctcgtcaccgtcctgagcatcgacggtggcggcgtcagagggatcatccccgccaccatcctcgccttcctagaagagaagctgcaagaactggatggaccggacgctaggatcgccgactacttcgacgtcgttgccggcacgagcaccggtggtctcctggcggcgatgctcacggcccctggccaggaccatgacggacgtcgacggccactcttcgacgccaaggatctggcgcagttctacatcgaccactcgcccaaaatcttcccacagaagaactggatcctgtccaagatcgccggcacgctgaggatggtgagggggcccaagtacgacggcaagtacctccatggcctgcttcgccagcacctcggcgacatgaggctggacaaggcgctcaccaacgtggtcatcccgaccttcgacatcgcgctcctgcagcccacgattttctcaagcttcgagctgaagcgccggccgtcgaagaatgcactcctggcggacatctgcatcagcacctcggccgcgccgaccttcttcccggcacactacttcgagacggaagacggggacgggaggaccagggccttcaacctcgtcgacggaggcctcgccgctaacaatcccacactgtgcgccatgggccaggtgtccaaggacatcatcctcggggacgacgacttcttcccggtgaagccggcggactacggcaagttcatggtcatctccgttggctgtgggtcgaaccgggaccgcaggtacagcgccaaggccgccgccaagtggggcatcttcaactggctcatcaaggacggcacggctcccatcatcgacatgttcaactccgccagcgccgacatggtcgacatccacctctgcgtcctcttcagggccctccattccagcgaaaactacctgcgcattcagtatgatcaactgacgggcagcgcgggctccatcgacgactgctccaaggagaacatggataagctggtgcagatcgggaaggaccttctcagccagaacgtctcccgggtggacctagagactggcaagaacatggacgtccccagcgcgggcacaaacgccgagcagctcgccaagttcgcgaagcagctctctgacgagcgacgccggcgccagaagctttcaaagtagcggtactgaaaagaaaaaaagaagaaataaagattttgtaacgacgcttcaactgccgatcatgcatagggcattggtttaaacattctccagctgcttgcactttcatgctctggaacgtgtgttccgttcatttcatggcgcttttgttgtcacgtagtattattacctggtttgcattgatcagatactatcaataaggtcatcggttttacttgtgaaagttgctttgtcaggtcttaagtgcatgcacacagcagcactcatcatttttctgtgcg

SEQ ID NO: 10394 - DNA, 447 bp, Zea Mays
gtgctgctgtgaacaaggctctcgtggacaggactttgtgaactatttcttcagaacgccgctgtgccaccggagaacgtccttattattctggcctcctcagtaccccctaaagcttacacgtcttagcttcactgatgtcgatgaaggaagaagttcaagaagcacgaagagtgaaaatgttgtgttgcccaagcaaggcaatggacactgagaacgagatccaagttttgtgtgatcaactggctgaaaaatctccagattctctttgccttttgaaagaggcgaagagccacaatccatatgcttttgctgcatgagggttcttccacctccggatgaccttctaggaccgtaataagttggaaggttcctaccttccaggactgtaataagttttatcacactttagaaaccaagttttgtaataataatgactcctatatc

SEQ ID NO: 10395 - DNA, 4521 bp, Zea Mays
tagcctgctagtctctccttgggtgattgggtccttcagtccttgcaatttcctcccgcactcccggttctcccgcacgctcccctctgcctgtccgtgtcgcttgcttcgcttctgcaaacccctgcccggcggccggggcgagggggcgtgatggtgttcaaggggcgcttcttctcgtcgcgacacaagtcatcggagtcatcttccagcccagacggcagcaacagcccacgcacgcctacctcggccccggcctcggcatccgcggcgtcgccggcgtcgtcgtcgtcgtctagatccgacaagaagaagactaaatcggagactcctaagaagcgcgacaagctcttcggttccgcggccaccgcacccaagagcgccgcatcgtcggcctcgtcaagcccggcgggtgatgggaggaaggggtccgtgccgcatcatagggatgcgggcgtcgggggcgggggtggcgcgtcggcggccgcgctgtcgccgatcctggcgtcctcgctggggctcaaccggatcaagacgagatccgggccgctgccgcaggagggccaacgcatggctgccgtgatcgggagcagcaacctctcgcgcgggcagggccaagcggaaccgtcggctgcctcagccggcgtcggcggtagaaagggcgtcacctcctgggcggatactagtagtagcagccgcggaaaagggaagacgaccgagctgccgatgcgaagtacagctgggacgagcttgggaccagtagggaagagcgctgtaaaagctaaacctagtgcacagcggaaccattctggagatttgaggacacctactcacatacctgaggctgcgtgtgcatatgatccgtgtgagacaccaaaggaatccgagtccccacgctttaaagccattatgcaggctactagtgcaccgaggaagagactccctgcagatataaaaagtttttcacacgagctgaactccaaaggggtgcgcccatttccttttttgaaacctcggggcatttacaacttaaaggaggtaataaaagttatccatgtgagatttgagaaggcaaaggaagaggtaaattcagatttggcagtttttgcaggagacttggttagcgtaatggaaaagtatgcagactctcatcctgagtggaaagatgccctggaggacttgctaatacttgcacgtacctgctgtgtcatgacacctggggaattctggcttcagtgtgaaggtatagtgcaagatttggatgaccatcgtcaggaactctcaatgggtgtgctgaagaaactatacacccggatgctttttatccttacaagatgcacaaggctgctccagttccacaaagaaagtggttttgctgaggatgaagttgttattgatcagcgtgataagattatacaatctgcagataggcagattttaactcaatcaggtgtgggtgacacaacatccagagccagtaaaagtgaggcaagaaaatcatacagtcaggagcagcataatttgaaatggaagcgtagccaggagataaagcctgttaaccttcttccaccacttgatacggatgttaagaaagtggctgattctccaaccaaagaacgaatatcttcctggaaaccttttccatctcctgttacgaaggtcccaaaagaatctactcctactaaattggaatcacctaataagaaaacagatgcacactctacagttagtagccatgttgaattaagcagtccagttgaatctttaccacaacaacagcttcctgtcaagcatcaacataaaacttcatggggccactggtctgaccagccaaatatttctgaagagggttcaataatgtgtcgcatatgtgaagagtatgttccaacacagtatgtagaagaccattcaagggtctgtgcaattgctgacaggtgcgataaaaaaggtgttagtgttgatgaacgcttaatcagagttgcggaaatgctagaaaagatggtagaatcttattcaccgaaagacctgccaaatgctgcagtcagcccagatgttgcaaaagtttcaagttcaagcatcaatgaagaatctgatggtccctctcctaaactctctgattggtctagaagaggatctgctgatatgcttgactatctccaagagactgataacactatttcattggatgacattaaaaatcttccttcaatgacatgtaagactcgttttggaccaaaatctgatcatggaatggccacatcatccgctggaagtatgactcctaggtctccattaactccaagatcaaatcatatagacatgcttttagctggtaaaaatgcaattaatgagagtggtgatcttccgcagattgtcgaacttgctgatattgcacgatgcatagcaaatacccctctggatgaagaaagcgcattatcccaaatggttacctgcatagaagatcttcaagaaattgtcaaccgcaggaagcatgaggccctcacagtccagacatttggaacacgcatagaaaaactacacagggagaagtatctgcagctctgtgactcagttgatatggacaaggttgattcagcaagcaccataatggatgaagaagatgatgttgttcgtagcttgcgcgcaagtcctgtccatccagtcaaggatcgcacttcaattgatgactttgaaatcatgaaacctattagccgtggagcatttggacgtgttttcttggccaagaaaagaactacaggagatctttttgctataaaggttcttaggaaggcagatatgattcggaaaaatgctgtcgagagtatattggctgaacgtgatatcttgattacagtcaggaacccttttgtggtacgctttttctattcgtttacctcacgggagaatttgtatctggtcatggagtacctgaatggaggggacctttactcattactgaggaatttagggtgcctggatgaagacgttgctcgtgtatatcttgcagaagttgtactagctttggaatatttgcactctatgcacatagtccatagggatctaaagcctgacaacttgttgatagcccatgatggacatattaagttgacagattttgggttgtccaaggttggtttgatcaacagcacagatctgtctggtcctgctgttagtggggcttcactgtatggagatgatgagcctcagatgaatgagctcgaacaaatggatcaccgagcacggagacaaaatcgttctgctgttggaactcctgattatttagcaccagaaatccttttggggacaggacatggttgcagtgcagattggtggtctgttggtgtcattctgtttgagctcattgttggcatacctccattcaatgcagaacaccccgaggcaatttttgaaaatattatgaatcgcaaaataccttggccacatgtcccagaagagatgagttttgatgcacaagatttaattgacagattattgacagaagatcctcatcaacgactaggagcaaatggtgcctcagagggggaggacagcactggcctcaatgagtttgaatctagtgcaaatgtcaattattctttcagcaacttctcgttcaagaatctatcacaacttgcttccatcaactacgatctgctcaccaaaggattgaaggatgatccaccgccaagaacagaaatgtagcagttaatctaaatttggatggactcatttgagtactcagacagtctacaaggtgctcgtgggatgtaggtcttgtacatatcaaagtgtgaggcatggtctgttcctattgaggctgttcctacatctcgcggatccgagtacagttttggtgttgccttgttttcatgactattgccatgccatcatcagtgaaatcacccttgaccaaatttggcattcgacctaggagcgctgtctttttggttcgtctttcctttttttttagtcctattatgagccttgggtttacggagattggtcaaggttactgtattcagaatacagctcctgaagacgtaggcgggtttcagagaattgccattctggcatacagttgactctggttcgttaagctggtagcccgctggacttcctgcggccagaactgtccacaacattttgatggccgtggaatataacattttgcttaatgtgtccagtgtccaacagaatcagggacattttaagaagaatattaaccgattgacattataaggatatcaaatggaagcggcgttttatgcaattcaaaattcgatgggcatcgcccagtagtcatattgtgagtatctgtaggctagtcggaatcgtaacggtttgtccgatgtcatgtcgcttgcaaaatgctgtagtagcactacctgctgtttattaaactcagaactcgaactcttttaatagccctcgtagactatttttaacatcgccaagagcactgccatgtcacggatgagatatttaatccagctacctttggcttggatattttagaaattg

SEQ ID NO: 10396 - DNA, 4588 bp, Zea Mays
tagcctgctagtctctccttgggtgattgggtccttcagtccttgcaatttcctcccgcactcccggttctcccgcacgctcccctctgcctgtccgtgtcgcttgcttcgcttctgcaaacccctgcccggcggccggggcgagggggcgtgatggtgttcaaggggcgcttcttctcgtcgcgacacaagtcatcggagtcatcttccagcccagacggcagcaacagcccacgcacgcctacctcggccccggcctcggcatccgcggcgtcgccggcgtcgtcgtcgtcgtctagatccgacaagaagaagactaaatcggagactcctaagaagcgcgacaagctcttcggttccgcggccaccgcacccaagagcgccgcatcgtcggcctcgtcaagcccggcgggtgatgggaggaaggggtccgtgccgcatcatagggatgcgggcgtcgggggcgggggtggcgcgtcggcggccgcgctgtcgccgatcctggcgtcctcgctggggctcaaccggatcaagacgagatccgggccgctgccgcaggagggccaacgcatggctgccgtgatcgggagcagcaacctctcgcgcgggcagggccaagcggaaccgtcggctgcctcagccggcgtcggcggtagaaagggcgtcacctcctgggcggatactagtagtagcagccgcggaaaagggaagacgaccgagctgccgatgcgaagtacagctgggacgagcttgggaccagtagggaagagcgctgtaaaagctaaacctagtgcacagcggaaccattctggagatttgaggacacctactcacatacctgaggctgcgtgtgcatatgatccgtgtgagacaccaaaggaatccgagtccccacgctttaaagccattatgcaggctactagtgcaccgaggaagagactccctgcagatataaaaagtttttcacacgagctgaactccaaaggggtgcgcccatttccttttttgaaacctcggggcatttacaacttaaaggaggtaataaaagttatccatgtgagatttgagaaggcaaaggaagaggtaaattcagatttggcagtttttgcaggagacttggttagcgtaatggaaaagtatgcagactctcatcctgagtggaaagatgccctggaggacttgctaatacttgcacgtacctgctgtgtcatgacacctggggaattctggcttcagtgtgaaggtatagtgcaagatttggatgaccatcgtcaggaactctcaatgggtgtgctgaagaaactatacacccggatgctttttatccttacaagatgcacaaggctgctccagttccacaaagaaagtggttttgctgaggatgaagttgttattgatcagcgtgataagattatacaatctgcagataggcagattttaactcaatcaggtgtgggtgacacaacatccagagccagtaaaagtgaggcaagaaaatcatacagtcaggagcagcataatttgaaatggaagcgtagccaggagataaagcctgttaaccttcttccaccacttgatacggatgttaagaaagtggctgattctccaaccaaagaacgaatatcttcctggaaaccttttccatctcctgttacgaaggtcccaaaagaatctactcctactaaattggaatcacctaataagaaaacagatgcacactctacagttagtagccatgttgaattaagcagtccagttgaatctttaccacaacaacagcttcctgtcaagcatcaacataaaacttcatggggccactggtctgaccagccaaatatttctgaagagggttcaataatgtgtcgcatatgtgaagagtatgttccaacacagtatgtagaagaccattcaagggtctgtgcaattgctgacaggtgcgataaaaaaggtgttagtgttgatgaacgcttaatcagagttgcggaaatgctagaaaagatggtagaatcttattcaccgaaagacctgccaaatgctgcagtcagcccagatgttgcaaaagtttcaagttcaagcatcaatgaagaatctgatggtccctctcctaaactctctgattggtctagaagaggatctgctgatatgcttgactatctccaagagactgataacactatttcattggatgacattaaaaatcttccttcaatgacatgtaagactcgttttggaccaaaatctgatcatggaatggccacatcatccgctggaagtatgactcctaggtctccattaactccaagatcaaatcatatagacatgcttttagctggtaaaaatgcaattaatgagagtggtgatcttccgcagattgtcgaacttgctgatattgcacgatgcatagcaaatacccctctggatgaagaaagcgcattatcccaaatggttacctgcatagaagatcttcaagaaattgtcaaccgcaggaagcatgaggccctcacagtccagacatttggaacacgcatagaaaaactacacagggagaagtatctgcagctctgtgactcagttgatatggacaaggttgattcagcaagcaccataatggatgaagaagatgatgttgttcgtagcttgcgcgcaagtcctgtccatccagtcaaggatcgcacttcaattgatgactttgaaatcatgaaacctattagccgtggagcatttggacgtgttttcttggccaagaaaagaactacaggagatctttttgctataaaggttcttaggaaggcagatatgattcggaaaaatgctgtcgagagtatattggctgaacgtgatatcttgattacagtcaggaacccttttgtggtacgctttttctattcgtttacctcacgggagaatttgtatctggtcatggagtacctgaatggaggggacctttactcattactgaggaatttagggtgcctggatgaagacgttgctcgtgtatatcttgcagaagtttggggcttcactgtatggagatgatgagcctcagatgaatgagctcgaacaaatggatcaccgagcacggagacaaaatcgttctgctgttggaactcctgattatttagcaccagaaatccttttggggacaggacatggttgcagtgcagattggtggtctgttggtgtcattctgtttgagctcattgttggcatacctccattcaatgcagaacaccccgaggcaatttttgaaaatattatgaatcgcaaaataccttggccacatgtcccagaagagatgagttttgatgcacaagatttaattgacagattattgacagaagatcctcatcaacgactaggagcaaatggtgcctcagaggttaaacaacatccatttttcaaagacattagctgggatacccttgctaggcagaaggctgcctttgttccttcctccgatagtgcatttgatactagctacttcaccagtcgctattcttggaatcaatcagatgaaaacatatatgaagcatatgagttagaggactccagtgataatggaagccttagtggaagcagtagttgtgtgagtaaccaagatgacatgggggaggacagcactggcctcaatgagtttgaatctagtgcaaatgtcaattattctttcagcaacttctcgttcaagaatctatcacaacttgcttccatcaactacgatctgctcaccaaaggattgaaggatgatccaccgccaagaacagaaatgtagcagttaatctaaatttggatggactcatttgagtactcagacagtctacaaggtgctcgtgggatgtaggtcttgtacatatcaaagtgtgaggcatggtctgttcctattgaggctgttcctacatctcgcggatccgagtacagttttggtgttgccttgttttcatgactattgccatgccatcatcagtgaaatcacccttgaccaaatttggcattcgacctaggagcgctgtctttttggttcgtctttcctttttttttagtcctattatgagccttgggtttacggagattggtcaaggttactgtattcagaatacagctcctgaagacgtaggcgggtttcagagaattgccattctggcatacagttgactctggttcgttaagctggtagcccgctggacttcctgcggccagaactgtccacaacattttgatggccgtggaatataacattttgcttaatgtgtccagtgtccaacagaatcagggacattttaagaagaatattaaccgattgacattataaggatatcaaatggaagcggcgttttatgcaattcaaaattcgatgggcatcgcccagtagtcatattgtgagtatctgtaggctagtcggaatcgtaacggtttgtccgatgtcatgtcgcttgcaaaatgctgtagtagcactacctgctgtttattaaactcagaactcgaactcttttaatagccctcgtagactatttttaacatcgccaagagcactgccatgtcacggatgagatatttaatccagctacctttggcttggatattttagaaattg

SEQ ID NO: 10397 - DNA, 4619 bp, Zea Mays
tagcctgctagtctctccttgggtgattgggtccttcagtccttgcaatttcctcccgcactcccggttctcccgcacgctcccctctgcctgtccgtgtcgcttgcttcgcttctgcaaacctcggccccggcctcggcatccgcggcgtcgccggcgtcgtcgtcgtcgtctagatccgacaagaagaagactaaatcggagactcctaagaagcgcgacaagctcttcggttccgcggccaccgcacccaagagcgccgcatcgtcggcctcgtcaagcccggcgggtgatgggaggaaggggtccgtgccgcatcatagggatgcgggcgtcgggggcgggggtggcgcgtcggcggccgcgctgtcgccgatcctggcgtcctcgctggggctcaaccggatcaagacgagatccgggccgctgccgcaggagggccaacgcatggctgccgtgatcgggagcagcaacctctcgcgcgggcagggccaagcggaaccgtcggctgcctcagccggcgtcggcggtagaaagggcgtcacctcctgggcggatactagtagtagcagccgcggaaaagggaagacgaccgagctgccgatgcgaagtacagctgggacgagcttgggaccagtagggaagagcgctgtaaaagctaaacctagtgcacagcggaaccattctggagatttgaggacacctactcacatacctgaggctgcgtgtgcatatgatccgtgtgagacaccaaaggaatccgagtccccacgctttaaagccattatgcaggctactagtgcaccgaggaagagactccctgcagatataaaaagtttttcacacgagctgaactccaaaggggtgcgcccatttccttttttgaaacctcggggcatttacaacttaaaggaggtaataaaagttatccatgtgagatttgagaaggcaaaggaagaggtaaattcagatttggcagtttttgcaggagacttggttagcgtaatggaaaagtatgcagactctcatcctgagtggaaagatgccctggaggacttgctaatacttgcacgtacctgctgtgtcatgacacctggggaattctggcttcagtgtgaaggtatagtgcaagatttggatgaccatcgtcaggaactctcaatgggtgtgctgaagaaactatacacccggatgctttttatccttacaagatgcacaaggctgctccagttccacaaagaaagtggttttgctgaggatgaagttgttattgatcagcgtgataagattatacaatctgcagataggcagattttaactcaatcaggtgtgggtgacacaacatccagagccagtaaaagtgaggcaagaaaatcatacagtcaggagcagcataatttgaaatggaagcgtagccaggagataaagcctgttaaccttcttccaccacttgatacggatgttaagaaagtggctgattctccaaccaaagaacgaatatcttcctggaaaccttttccatctcctgttacgaaggtcccaaaagaatctactcctactaaattggaatcacctaataagaaaacagatgcacactctacagttagtagccatgttgaattaagcagtccagttgaatctttaccacaacaacagcttcctgtcaagcatcaacataaaacttcatggggccactggtctgaccagccaaatatttctgaagagggttcaataatgtgtcgcatatgtgaagagtatgttccaacacagtatgtagaagaccattcaagggtctgtgcaattgctgacaggtgcgataaaaaaggtgttagtgttgatgaacgcttaatcagagttgcggaaatgctagaaaagatggtagaatcttattcaccgaaagacctgccaaatgctgcagtcagcccagatgttgcaaaagtttcaagttcaagcatcaatgaagaatctgatggtccctctcctaaactctctgattggtctagaagaggatctgctgatatgcttgactatctccaagagactgataacactatttcattggatgacattaaaaatcttccttcaatgacatgtaagactcgttttggaccaaaatctgatcatggaatggccacatcatccgctggaagtatgactcctaggtctccattaactccaagatcaaatcatatagacatgcttttagctggtaaaaatgcaattaatgagagtggtgatcttccgcagattgtcgaacttgctgatattgcacgatgcatagcaaatacccctctggatgaagaaagcgcattatcccaaatggttacctgcatagaagatcttcaagaaattgtcaaccgcaggaagcatgaggccctcacagtccagacatttggaacacgcatagaaaaactacacagggagaagtatctgcagctctgtgactcagttgatatggacaaggttgattcagcaagcaccataatggatgaagaagatgatgttgttcgtagcttgcgcgcaagtcctgtccatccagtcaaggatcgcacttcaattgatgactttgaaatcatgaaacctattagccgtggagcatttggacgtgttttcttggccaagaaaagaactacaggagatctttttgctataaaggttcttaggaaggcagatatgattcggaaaaatgctgtcgagagtatattggctgaacgtgatatcttgattacagtcaggaacccttttgtggtacgctttttctattcgtttacctcacgggagaatttgtatctggtcatggagtacctgaatggaggggacctttactcattactgaggaatttagggtgcctggatgaagacgttgctcgtgtatatcttgcagaagttgtactagctttggaatatttgcactctatgcacatagtccatagggatctaaagcctgacaacttgttgatagcccatgatggacatattaagattttgggttgtccaaggttggtttgatcaacagcacagatctgtctggtcctgctgttagtggggcttcactgtatggagatgatgagcctcagatgaatgagctcgaacaaatggatcaccgagcacggagacaaaatcgttctgctgttggaactcctgattatttagcaccagaaatccttttggggacaggacatggttgcagtgcagattggtggtctgttggtgtcattctgtttgagctcattgttggcatacctccattcaatgcagaacaccccgaggcaatttttgaaaatattatgaatcgcaaaataccttggccacatgtcccagaagagatgagttttgatgcacaagatttaattgacagattattgacagaagatcctcatcaacgactaggagcaaatggtgcctcagaggttaaacaacatccatttttcaaagacattagctgggatacccttgctaggcagaaggctgcctttgttccttcctccgatagtgcatttgatactagctacttcaccagtcgctattcttggaatcaatcagatgaaaacatatatgaagcatatgagttagaggactccagtgataatggaagccttagtggaagcagtagttgtgtgagtaaccaagatgacatgggggaggacagcactggcctcaatgagtttgaatctagtgcaaatgtcaattattctttcagcaacttctcgttcaagaatctatcacaacttgcttccatcaactacgatctgctcaccaaaggattgaaggatgatccaccgccaagaacagaaatgtagcagttaatctaaatttggatggactcatttgagtactcagacagtctacaaggtgctcgtgggatgtaggtcttgtacatatcaaagtgtgaggcatggtctgttcctattgaggctgttcctacatctcgcggatccgagtacagttttggtgttgccttgttttcatgactattgccatgccatcatcagtgaaatcacccttgaccaaatttggcattcgacctaggagcgctgtctttttggttcgtctttcctttttttttagtcctattatgagccttgggtttacggagattggtcaaggttactgtattcagaatacagctcctgaagacgtaggcgggtttcagagaattgccattctggcatacagttgactctggttcgttaagctggtagcccgctggacttcctgcggccagaactgtccacaacattttgatggccgtggaatataacattttgcttaatgtgtccagtgtccaacagaatcagggacattttaagaagaatattaaccgattgacattataaggatatcaaatggaagcggcgttttatgcaattcaaaattcgatgggcatcgcccagtagtcatattgtgagtatctgtaggctagtcggaatcgtaacggtttgtccgatgtcatgtcgcttgcaaaatgctgtagtagcactacctgctgtttattaaactcagaactcgaactcttttaatagccctcgtagactatttttaacatcgccaagagcactgccatgtcacggatgagatatttaatccagctacctttggcttggatattttagaaattg

SEQ ID NO: 10398 - DNA, 1533 bp, Zea Mays
atttgggatatgatggagtaaagatggcaatggtattacccatcagtgctcatccacctcttcaagctgaagatcttccacatggagttgttacaatgcgctgcgatatcacaacttgcagttctgcacatgtgtcgtttcttgtttcatgcagtgcccaaacttgttttgatgatcagcttctagggagccgtatcaagaatgaaattattgagaagaggcagttagttcgtgctctattgaataatgaggataacaagccatcttcatatgagcctttgccttccatgtgcgtggcttgcggagcttctacttttgaagtctggataaccatgccaaaatgggcagcacaggttttgaaacatcttgcgccagaaatctcctacagaagcttggttgcacttggaattgcttgggtaaatggtacaccagtgtcctcatttgataggcaggatgcagaccggcttcttttcttttgctctaaccagtgcggagatcaagctattcaaaatggctcatatgctcatgtatccagctggtcagcaccccttaccaaggatagaaccactggaagtctcgagtcaaaacagatgtcatttggtgcaaaaggagttgtaggggataatacgatctccctatcatcattgaaaccaaggctaaagcctgcaacaatgagaccccttcctcactctcgcaagcaacaaatgcatccctttatggggtttcctcagtccatcattcacgatgctagtcaagttaagcctagcttgccagcccctcctgtgaagcacaacgcagtacctgttaccgcagtgacaccgagaaaatcatcatctgggtcaccatcatcctggtcacgtgttcagctaccaatcccattgaatcctctgccaataaagaaacatgagtgcaatcggttgcctatccacagttgctctgaagaagacttcttgaaagatgtcatgcagtttctacttcagaggggccacatccgacttgtacctcagggaggactggcagaatttcctgacgcagtgttaaattcaaagcgtcttgatttatataacttatacaaagaggtggtataccgaggtggcttttatgtaggcaatggcataaattggaaaggtcaaatcttttcaaagatgcacaaccatacagttacaaacaaaatgacgtggtgctctgggtgactgggtgaactgtggattatgtggagaatgggcccaccttggctgcgatagacggaaagggctgtctactttcaaggactactcgaaggcggatgggatggaatacatatgtccccagtgtagccttgcgaaatacaaaccgccgttgcctgcaccatgaaatatgttgattaacttctgttactttcttaagggtgatggtttggatagaaattagtggctaaggatgtgtagtgttgacctgtactattgaatatgatcctgtacgatttgtacaatttttataaaatttctgatttccgaagggtgtctggtctgtttgtaagaccttagtttttaa

SEQ ID NO: 10399 - DNA, 2134 bp, Zea Mays
atatatccacatagcgcacacctgcttgtgaaaagttcaatcttgagtgtcgcttgtttcaaatcccacctttgcttgctccccccggctcctcctcctcgtaccaaatctagggttcccgatcgaaatcctgcgccgccgccgccgccactgccgttggcgataatgtcggccagcaccgagcccgagaaggacgccgctgccgctgccgccaccgagggcgacgagaagacggaggcgaaggacagcggctccggctgggagctgctgtactgcggcgggacgagcttcgacgccatgggtcggaaggtggtgggcggggcgcagggcaacctggtgtcgccgactcggctgcggccgctcgtgggcgttgatatccgcttcgttgcctctggatgcactgcttgccactgtgttgctttagatgctggaggcaaatgttatacatggggtcgcaacgagctagggcatggagatactcttctgcgtaacctgccgactgttgtttctcaactatcaaaatacaaaatcatcaaagcatgtgttggaagaaaccatacagtggttgtaactgatgatggcaaatccttatctttcggtcataacaagcatggacagttagggacgggttccttaaggaatgagattgagtcatcgccagtgtcctgtatcgttgcggaagcaaccaacgttgcatgtggggctgattttactgcctggttgtcatctgtggaaggctcttctatacttacagcaggtcttccccaatatggtcaactcgggcatggaactgataatgagtacaatgctaaagaatcgtctgtgaaactgacctatgaaccccagccccgtccaagagcaatagctgcattttctgggaaaactgttgtcaaagttgcatgcggaactaaccatacagttgattccaatggctttgtttacacctggggcttcggtggatatggaaggttggggcatagagaacagaaggatgaatggcaacctcgccttgtagaagtcttccagaagcacaatgttctgcctcctaatgccattgtctcagctggttctgtgagttctgcatgcactgctggtggtggacagttgtacatgtggggaaagatgaagaatacaggcgatgattggatgtacccgaaacctgtgatggatttaagtggttggaacattcgctgcatggcttctggtaacatgcaccacattgttggtgctgatgattcttgcataagctggggtgtcgcccagaatggagagcttggttatgggcctaacgggcagaaatcatcagcaaatcccaaaaaggtggacattcttgagggcatgcatgttacaagtgtcggctgtggatttggactgtctctgattgttgtggacagagcaaatgttggtgatcgacttggtcagctggaaatttatgatggtgacaccggtgctgaagtagagaaagtggaggtgcaagtaaccaagaaggcatctgccagcaccaactcacgtgccaacaagcgcaagaaaacgaaggatgtttctgaatctgaatccgaagaggatgatgatgatgatgaggatgaaagcggagacgatgaaaatggtggtgtagaagagtcaaagggcaggcgtggccgtaaacccgctaatagagggagaggcaggggaggcaaaaaggcgacccctgaggcaaagccatctggaaggggcagaggccgccccaagaaaaccgagagttctgctcagaaagccggaggaacctcgggcagaggaaaaagaggacggccacgcaagtgatggtccgccctacagtaatgcggcgttgaaaatcagtaacgcctgatgtgatcccattgacattgaggattcattttggtagcaatgcccgttgcactctgcccattttctcactctgattgttgcagctatccaatccaaagacattattagtctcttccccctcccccaatttccgaaatggggtttgccatcccattgtaagtctagaaatgcttaacatgcacatctgtgttcttcattgacgatgattttcttcagctttaggctattaatgaacccttgattcgagtgatttatttatcctgttcaatcacatggtccttgatgggta

SEQ ID NO: 10400 - DNA, 1949 bp, Zea Mays
cgccgtttttctcaaacctggccatcctcatctaccttgcagcgccggcgccctatcttccgctccttccgttccttgcgctcggcgcgcaggtggcggccccatctttcgcttcctcccttcctccgccaccactcaccccttgatccgttctgcctcctaaatttggcgtcaccaagcaaccccactcatgccgttctcaaaaccctacccgaccaatccgtccaattccaaggctgtcggctttgcgttatgagcgccgggtcaggggaggggcggaggatcagatcagcagccgcacgagcattgagcgatatggcttctatgtaggatgcaactggacatcgccgtccactcgtctagctattgatgctgaagtcccgatgcttcatgccaccgcgatggtggctggttgatctccgatatcaagaggagggaagaggcactgaagaatggtgcagatccacatttgtttttgcataattgctgccttagctccaccaattgtatttcatgggaaatcattaacgtaagtttgccactccttttatctaaagtaatcaaagtcattagttattatgggcttgggtaatgtgagtaagcaccattgcatagatagccagtgatgttggctgctggaaaaggagaaatcaatgaattatagattgggatcacagaacttcatagaggaaactaggttgattgttcaatatctttttaagaacacttagtatcctggataatatgtgaaacaaacaatatgtgaaacaaataagtatttaaccagccgcatagaagcatgtttgctttgtgaccctagaaaccagccaggcacaagcagcacctcgaccccctcctcgaccagatgactactgtctcgaggcgtacagtggccactcacctagcgggtgtgtctagctcgtcatcggtctccaatgccacgttcgcgctactactccaatcattgctgacccgtatgatctccactgacttccacaaggagtgcaggcaccttcggtcccatccgctgttaaggagaacacatggttatggtgttccacagactggcattttattcattcattgaaaggcttacctcgcttatggtgttccacagagtgacatgaaactattttcacttatgcaaaaggtttgataaaggaactattgtacttagattttgtcctacgtttagcatgtcagcaatttacattagatttgttcctacgtttacacctttttagccctcagatgcatgcataaatcttgattggtagatatattgacaagacatcattttccatatgctctaaatgttttagtagtttatgctgatgattttgctttctttccagttatgatatttcaatagacctttttatatgtgctaactacacaaaagataagctggtatctaccagctcaagacattgtttgctagtagacttcatattagttgatgattgtctcggtacaactcaagacatttttcataacaccattgttggtctatgagaaaataaagacaaccctttaggttgctgcaattttcatcgacctaggcacatgtgattattacacttgttgtggttttattataatatattgttctaagtctgattatgctttttagatgtacatatcatcgcactatatatgcaccccttttgcaactgttataactagccatggcaccatttatgcatccaactgttataccattggaaatccgcgcaactgcactatatccattggaattctgtgcttttgtcagtaattggtttgatggatttgaatttatgatccccaagtataatggcagatgcttaaatagttattggaaaatgggaaatctttctgctagacatgtatagggatgttttttgcgctcacaaccagttgattggaagcacattaagtcattagctctgctagtttatggaatatgg

SEQ ID NO: 10401 - DNA, 694 bp, Zea Mays
aaggctctaatttatcactccactgactgcagcagtgcgatggaatcacagtgactggatcctcaacctggatcaaagaggaaatgcccacacctcaaatccaatgaagaggatgtagagctttcggatagctttacgcgctctgtccatcttacaccaataaagcgactcaaggaaagccatgacgccagatatggagcgggggaatccgccaaaactacccatttctctaatagttcctctggtggttaccacgaggatatgaatttacacaactcaagaggttgccttcagaactccccctgtaatgttgaggatgccctgtccaaagggtttgagggttgtatttcgatgaaatgtccattttgatgtaacaaatttcgtgtcagcccagaagctatacattcccttttagcggcaaaatcatcctgtgtgtgtatctagtcattttgtgcaaaaaaaatgcagtaattgaatgcattttttttaaaatgctttaaagtgtattgatcagcatcggacctgtttttagaggcatcggtatgaagggagggctgttggttgtgtttgcttgacagcaaatccctcccattcaataccccgcactttctgaaaattgcgacttccatattcccttcctttgagctttgttaagacagtattgtattacaagatctgaatcgctgcaagcgtg

SEQ ID NO: 10402 - DNA, 2002 bp, Zea Mays
gggcaaggcaagtagccgctgcgcggtgctgccacctgacctgactgccgtcccggtccccggtccatccgaacgccgttacggggccgcccaccgcgacggaacggaaaggtgcggtcaacccaccccgtcccagtcccatcaccgccgggggccgggtggataaacaaacccagcggccccggccccctgtccgcctcattcccttccttcctttgctcctcccctgcctcgcctctctcccctctcctcgcctccagctcctgctcggcccgctcgcgtccagctgcgcgcgcgcctgcggtggccgtgaaggacagcccgagggacgcgccgggtgcactgatctgggggccgcgtgtccccggtggtggggcgaggcggcgccggcttccaggaatgggcagcttgtagtggctgtttcttttgcatatgcgctttctattgttgttgtcatttcaaaggaggccatagtctcctggattttgtatgccttgttatctggaattggtgaccatagatgtcatttcgtagcatagtccgtgatgttagggatggcttcggcagcttgtcaaggagaagctttgagcctggtcctcgagatggaaatacaatggtccagtgttttataaagaggaataagtcaaaatccacttaccatctctacctgtgccttagcaatgttgttacttcagaaagtgggaaattcctcttatcagctaaacgacaccgcaaaaccacatgcaccgagtacactatatcaatggattctggcaacatctcaagatcaaaaagaacctacattggaaaaataaggtctaacttccttggcacaagatttttaatttatgatacacaaccgccctataatggggctgtagttcctcctgccggaaggacaagcaggaggttcaactccacaaaagtctctccaaagctgccttcagtcagttacaacatcgcacaggtatcgtatgagttaaatgtccttggcacgagaggtcctaggcggatgcgttgcatcatgcactccatacctgcatcatcagtggagccaggtggcacagtgcctggacagccagagcagattgtacctcgagccctggaggattcattccgcagcacggcttccttctcgcagtcgttccgtagcactgcctcattctccaagtccatcatggactcatccatggatttcaatagcgctcgcttctctgacatcgctggcagcagcgctcgcttcacgggcgttcctggtagcagcgctcgcttcgcgggcgttcctggcagcagcgctcgcttctcgggcattgctggcgccagactggacaacgacgaggagagtgaaaccaaggagaggccactggtgcttcgtaataagccgcctaggtggcacgaacagctgcagtgttggtgcctcaacttccgtggccgtgtgacaattgcctcggtgaagaacttccagctgatcgccgcggctaccccgccaccggcaggtgcgccaaccccctctcagcctgccccgtcagatcccgacaaggtgattctccagtttggcaaagtggcaagggatatgttcacgatggactatcgctaccctctctcggctttccaggcctttgccatttgtctgagtagctttgatacaaagttagcctgtgaataaatggagaagaacaaaggtaaaggagaacatcaggttgcttgcattaggccatcagtgtacctctttccatctggctctcgtgttgccttggttgtatttgtgcttaatgtagccatgaatttggtggcccatatatggacgcatgtgttgttgttggccctctcccttagaagtgattaaaagttgcatttggaccacatgttacccgatctgtaatatacttgcagtggcatcgcatgccgcgtgataacaaagttcccgttcgtgattggacttgtatggtttcagaaaagcagcaaacaaagtttggtacggtgtgcattttttttgctcgtc

SEQ ID NO: 10403 - DNA, 1216 bp, Zea Mays
cgcatctaaccccttccgatgcgtgtcccgatccaacggtctccgtcgtcccgtccgcgtgataaagcgccggcgcctcttctcgcgtggcctcccgaaggttctaggctcgattgaacaaattggagcggcactacactcctccacgcctccacctccagcctcccactgatctggcctctctcgagatcaatatgagaaggggctacagttacagtccttcaccaccaaggggctacaggagaagggcgcgcagtccaagtcctcatgatcattatggtggtcgtggtagggatctcccaaccagtcttctggtcaggaatctccgtcgggactgcaggccagaagacctccgtcgcccatttggacagtttggtcgagttaaagatatatatcttccaagagattattacactggggatccccgagggtttgggtttgtccagtattatgatcctgctgatgctgctgatgcgaagtactatatggatgggcaggtagttcttggtaggcaaataacagttgtttttgcagaagagaacagaaagaagcctcaagagatgagagctagggacagagtcaggggtcattcttatgatgacaggaggtattctcgctctaggtcgcctcgttattataggggccgctctccttcacgcagccaaagctactcgaggtctccacctcagaatccaagacacagacttagagagaggtcctactccggctcacctgtggacagcagatcaagaagtgggagcccttatgaggatggatatcgcaaatcatcacggagagagaggtctctttctgtcagcggatgaagcagttttacggtctagagctattgctgtgaatctgcgcatggtggcctacttgctatgtctttctgaaccatatatgttctgtctagattatcattcccagtaccagagaagtatcgtgagactgtttgctgtactttctagtcttgaggatacagaagggggtcaccgattctctcagtagatggactattgaccactagctacgccagttccactgctttgtgtatttacaggcagctttgcggtttgaataaaattgtttgcatcgtgaaagctaattggtaaaaagactgaatcatgaaacgaacgttttgcatccctgttccctgatggcatttggatacgattttttgttctttcgacgaacaatttggcaaatctgcatctta

SEQ ID NO: 10404 - DNA, 1485 bp, Zea Mays
cgcgtggcctcccgaaggttctaggctcgattgaacaaattggagcggcactacactcctccacgcctccacctccagcctcccactgatctggcctctctcgaggaatctatggattcgatgtgaagtcccaaagggtagcttttagggagggggaatgatgagatgttggaagttcacaagttgtgtctttcttaaaggctggtaaccttaatcctagatcaatatgagaaggggctacagttacagtccttcaccaccaaggggctacaggagaagggcgcgcagtccaagtcctcatgatcattatggtggtcgtggtagggatctcccaaccagtcttctggtcaggaatctccgtcgggactgcaggccagaagacctccgtcgcccatttggacagtttggtcgagttaaagatatatatcttccaagagattattacactgggtaagacacctagctagactggcattgcaaactgttgcgaccctaaatgacgcaacacaagcctaaaagattattgttgaagagaaggaagaaatagagaaattcaattaagtgatctgcaacttaaaagagtactcagtactgttcaagagatgggaagaaatagagttacaagtttaagagatactcacatcatgaagagtttcaagtctgaatttaaactctcatgagtgcaagggatccccgagggtttgggtttgtccagtattatgatcctgctgatgctgctgatgcgaagtactatatggatgggcaggtagttcttggtaggcaaataacagttgtttttgcagaagagaacagaaagaagcctcaagagatgagagctagggacagagtcaggggtcattcttatgatgacaggaggtattctcgctctaggtcgcctcgttattataggggccgctctccttcacgcagccaaagctactcgaggtctccacctcagaatccaagacacagacttagagagaggtcctactccggctcacctgtggacagcagatcaagaagtgggagcccttatgaggatggatatcgcaaatcatcacggagagagaggtctctttctgtcagcggatgaagcagttttacggtctagagctattgctgtgaatctgcgcatggtggcctacttgctatgtctttctgaaccatatatgttctgtctagattatcattcccagtaccagagaagtatcgtgagactgtttgctgtactttctagtcttgaggatacagaagggggtcaccgattctctcagtagatggactattgaccactagctacgccagttccactgctttgtgtatttacaggcagctttgcggtttgaataaaattgtttgcatcgtgaaagctaattggtaaaaagactgaatcatgaaacgaacgttttgcatccctgttccctgatggcatttggatacgattttttgttctttcgacgaacaatttggcaaatctgcatctta

SEQ ID NO: 10405 - DNA, 926 bp, Zea Mays
agtttcaccgctgggtcagccatggccgccacatccatcaaggtcgcgcacctcacaaccctcgcgctcttctctccgactccaaaccccttcggtccgaagtccagcaaacacagagctagagccccaccacccatctccatctccatggatccggccctcgtggaccctgcccacctgcaggcccttatgctcgcctgcggccactcttgcacgctccgcctctcgccggcgctatcagtttccgccgttgagccggtcgacctcagcaagctccggactgcccttgcgcacagcttcgtcgtcgtatctgtcttctgcggtgctaggttcttcacacatgacagggaaagggagggggagggacagagattcttgggcttggagatcggtctcgatcttcagggtgagcggcgccttgtcggattcgggcgcgccgtctccgacctcgggctcaccgcatccgtccatgacattgtgtgacttacaggtacatccattactacagaggagaggaattggccaaaagatagtgaacaaaattacaagggtacttcatagcagaggtatatatgacatctctgcgttatgtacagcaaaggagaggcccttttttgaagcttgtggatttggtgatgatatgatgggttcaacaacaatgttgtatactagaaaaacacagaaatagagttcattaaaaagttctcaattggtataatgttatttgttgatatgataactcatctgttggtcttcactgctgatgtttcaaagcattactctcagaaaaggttgatcttcacagctgatgtttgaaatcattttactcagaaaaaggggggtgggttatgagatgtagcagttatctcaatgtgcgcacctattgggaaaaataatcacaatggagtcgtgacgattaagacaag

SEQ ID NO: 10406 - DNA, 2311 bp, Zea Mays
cagtccaggctgggaaatcgtatcgtcagggagagcagcatgaaggggcggctgctgctgctgctgtgggcgtgggcggccgccacatgggtgtccgtcagcgccgtgactcgcctcggcagaggcgtcgccggagagcagccgctgtccaggatcgccgtcgagagggtggtcctcgccgtcaacgacgcggcgtacgtcaaggcgtcccctctggttctcgggcacaaggtaaagctcggctccagttcgcttctctctcaccaccgctcttgcggtcttgctggaaagtcgatttgtggttcactgcagggcgagaacagtgagtgggcggacgtggagttcttccacccgaacccgtccgacgacgactggatcggcgtcttctctcccgcaaatttcagtgatgcgatctgtgaggctgagaatacgggtaccccagtgctgtgcactgcacctatcaagtaccagtttgcaaacttcgaaaacgatggctataacaagactggaaagggctacctcaagcttcagttgatcaaccagagggaagatttctcattcgcgcttttctcagcccaagctgatttctgtctccaacaaggtagcctttgctaatccaaaggcaccagtgtacccgcgtttggcgcaagggaagtcttggaatgaaatgacagtcacctggacaagcggctacgatattacagaagcagttccttttgttgagtggggtgagaaaggaggtcgacgacttcttgctccagctggaacattaacatttgaccgaaatagcatgtgtggctcaccggcacgaactgttggttggcgccatcctggttacatccatactagcttcctgaaggatctgtggccagactcgccgtatacttacaggcttggccataggctgatgaatgggacccgcgtctggagcaagtcatacagcttcaaagcgtcgccttaccctgggcaagattctttgcagcgagttgtcgtatttggggacatgggaaaggcagaggctgatggttcgaacgagttcagcgacttccagcccggttcgttgaatactacttaccagatcatcagggacctcgaagacatcgacatggtggtccacattggggacatctgctacgcggatggctacttgtctcagtgggatcagttcactgcacagatcgaaccgattgcttcaagggtgccatacatgattggcctgtacagtactcccttgtgttcctcccatgttcatgcacaccgccgtttacgataacgagatccttctttcttcctttttttttgcagcggtaaccatgagagggattggcctggcactggttcattctacgggaaccttgactccggtggagagtgcggcgtccctgcccaaactgtgttctacactccagctgagaaccgtgcaaaattctggtacgcgacggactacggcatgttcaggttctgcatcgcaaacacggaagaggactggaggccggggaccgagcagtacaagttcatcgagcaatgcctgtcgtcggtcgacaggcagaagcagccgtggctcatcttcctcgcgcaccgcgttctcggctactcctcctgcacctactacgaatcggagggcacgttcgaggagcccatggggcgggaagcgctgcaggagctctggcagaagtacaaggtggacatcgccttctatggccacgtccacagctacgaaaggacatgcccggtctaccagtctcagtgcgtcgtcgatggatccgaccactacagcggcccgttccaggcgacgacgcacgtcgttgtcggcggcgcaggagccagcattctcgattctgagttcaccacctcgaagatccagtggagccacttcaccgacttcgaccacgggttcgtcaagctcacggccctcaaccattcctccctgctgttcgagtacaagaagagccgcgacggcaacgtgtatgaccatttcacaatctcacgcgactaccgggacatcctcgcttgctccatcgacaactgcccccggagcacactggcttcctgaagtcccacagtagttgcagaccagaaattttagttcgtagcttttctgtactgcaccgaccaataaatgaggccttttcttttttaataatatataattatatgcatgcactattttcttgtacctatagtcataaatgttagaagccaatttcgatagcaatttaatctaggaaaaaattaagcatgggagatcaagagatagaaaacttatcgtcatcatatgcataactctagaagttatgatggaaaactttcg

SEQ ID NO: 10407 - DNA, 2345 bp, Zea Mays
cttgcagtctctcagcctatggtcatcgtggacacgagctcacactgacactgactgacagagtcaatggcgacgggcgtgcttgataggcgcgccccaactaacacgacgtcggtcctcgatgactgactgggtatatatgccatgggtcaccccttccgccaatccagtcaggttcgtcgtccggtcgccgccacctagttgctgccagtccaggctgggaaatcgtatcgtcagggagagcagcatgaaggggcggctgctgctgctgctgtgggcgtgggcggccgccacatgggtgtccgtcagcgccgtgactcgcctcggcagaggcgtcgccggagagcagccgctgtccaggatcgccgtcgagagggtggtcctcgccgtcaacgacgcggcgtacgtcaaggcgtcccctctggttctcgggcacaagggcgagaacagtgagtgggcggacgtggagttcttccacccgaacccgtccgacgacgactggatcggcgtcttctctcccgcaaatttcagtgatgcgatctgtgaggctgagaatacgggtaccccagtgctgtgcactgcacctatcaagtaccagtttgcaaacttcgaaaacgatggctataacaagactggaaagggctacctcaagcttcagttgatcaaccagagggaagatttctcattcgcgcttttctcaggtggtctctcaaagcccaagctgatttctgtctccaacaaggtagcctttgctaatccaaaggcaccagtgtacccgcgtttggcgcaagggaagtcttggaatgaaatgacagtcacctggacaagcggctacgatattacagaagcagttccttttgttgagtggggtgagaaaggaggtcgacgacttcttgctccagctggaacattaacatttgaccgaaatagcatgtgtggctcaccggcacgaactgttggttggcgccatcctggttacatccatactagcttcctgaaggatctgtggccagactcgccgtatacttacaggcttggccataggctgatgaatgggacccgcgtctggagcaagtcatacagcttcaaagcgtcgccttaccctgggcaagattctttgcagcgagttgtcgtatttggggacatgggaaaggcagaggctgatggttcgaacgagttcagcgacttccagcccggttcgttgaatactacttaccagatcatcagggacctcgaagacatcgacatggtggtccacattggggacatctgctacgcggatggctacttgtctcagtgggatcagttcactgcacagatcgaaccgattgcttcaaggcggtaaccatgagagggattggcctggcactggttcattctacgggaaccttgactccggtggagagtgcggcgtccctgcccaaactgtgttctacactccagctgagaaccgtgcaaaattctggtacgcgacggactacggcatgttcaggttctgcatcgcaaacacggaagaggactggaggccggggaccgagcagtacaagttcatcgagcaatgcctgtcgtcggtcgacaggcagaagcagccgtggctcatcttcctcgcgcaccgcgttctcggctactcctcctgcacctactacgaatcggagggcacgttcgaggagcccatggggcgggaagcgctgcaggagctctggcagaagtacaaggtggacatcgccttctatggccacgtccacagctacgaaaggacatgcccggtctaccagtctcagtgcgtcgtcgatggatccgaccactacagcggcccgttccaggcgacgacgcacgtcgttgtcggcggcgcaggagccagcattctcgattctgagttcaccacctcgaagatccagtggagccacttcaccgacttcgaccacgggttcgtcaagctcacggccctcaaccattcctccctgctgttcgagtacaagaagagccgcgacggcaacgtgtatgaccatttcacaatctcacgcgactaccgggacatcctcgcttgctccatcgacaactgcccccggagcacactggcttcctgaagtcccacagtagttgcagaccagaaattttagttcgtagcttttctgtactgcaccgaccaataaatgaggccttttcttttttaataatatataattatatgcatgcactattttcttgtacctatagtcataaatgttagaagccaatttcgatagcaatttaatctaggaaaaaattaagcatgggagatcaagagatagaaaacttatcgtcatcatatgcataactctagaagttatgatggaaaactttcg

SEQ ID NO: 10408 - DNA, 1984 bp, Zea Mays
aaattataatttaggagggtcattctaacgtcgtcttatatcagataaaatggttttcgcgtacccattagttcatgagcgctcttagttcattaccatatgtactcgtgttggtgcgttcgccccgtagcagccgtcgggcttctctgccttgtacttgcgatcgagtccagacctgcggagatagatctactagtcgaccgatccggatccttcccttccgtctcacgctgcttgctcgggacgggaaccggaggtggggttgcgatggcgctgcagtacgtggaggcgcagcggcagttgcgcccggacctctccgactggtacgcctccctcgccgacctctaccagcggaagctatggcaccagctcaccctcaagctcgaccaattcttacagctccagaccggagacactatcattcagctctacaacaatttcattgtcgactttgagaccaagattaatctgctcaaacttgcccattttgcggtgataacttctcgccagtaccctgataaggatgctgcaattactttcttagagggggtgatcacaaagctgcgtgagacaagggagtcacggatcaatgaaccaattctctatgtgaagatgcaaattgcagctattaatcttgagaaaggaaacaaaaaagagtgcaagaatttgttggaagatgggaaaaccactctggatagtatgactgatgtcgatcccacagttcatgctagcttttactggatatcatctcaataccacaaggcctgccaagaatttgcagagttctataagaatgctcttctctatctggcctacacaactgtggagtctctatctgagtcattcaagctagacttggcttttgatctatctctagcagccttgctgggtgataacatttacaactttggggagttgttagctcacccgattatcaatagtcttattggaactaaggtggagtgggtttatcatatgttacaagcattcaacagcggcaaccttgccctctaccaagaactttgcagggttcacaatgctgctcttactgcacaaccagctttggtgcagaatgagcggaagctgcttgagaaaatcaatattctttgtctgatggagataatctttagtcggccatctgaagatagaactattccattaagtgttattgctgagcggactaagctttcaatcagtgacgtggaatgtcttcttatgaagagcctctcggttcatcttattgagggaataattgatgaagtggacagtacagttcacgtatcatgggtccagcctagagtgcttggaattccacaggttaaggctttgcgcgaccgcctggatgcctgggttggaaaggtgcataccacattgctttcagttgaggcggaaacacctgatcttgttgctgtgtaatttcacagctgttacacttccgcgagaggcttggtcagcaaggtcccatttgcaaaatgacatggatggttagaactgcacgcagtgtcacggagacgggaccaatggattgaaaatttcatactagtagggtgttactagtagaacacgatgcaggagaatcttgctggaacatgagttgtgcctgatgtttgcatgttgcactgcgataagacgtggatcatcattaacatattagctgtttttcagtgcacatggctcttaccgatcgctaatgttggtcatctgttaaatctgttaaagctactgcatgaactataccagggcacacaattaaaggtaggatacattctcctcttgccatgatgtaacacttcaaaattgagtttggagattaggcaaattttcttttcaaaatctaagaaaatgtgttctctagtagggattaattaaaaaaagagatccttagtcaaactatcctttgttcgacgatgtaatttgaaaatatttgaactaaaacatctcttagaatttacgtttttaaacaagtaataaatattgatatcac

SEQ ID NO: 10409 - DNA, 2328 bp, Zea Mays
cgctaatggcacgggttcgcgatttggcggcagagtgccccgacggcgggaggtattgtgccgccagcacggtgaactgcccactcgttgagtcgttgttgctgcggacctgcggtactctattgatccctagatttcccaacaaatatggcggaggcgggggccgactcctccaacgcggccgtcgacggcggtggcggtagcgtccaaaacgactatcccaccattgacccgacctcgttcgacgtggtgctctgcggcacgggcctcccggagtctgtcctcgccgccgcctgcgccgccgctgggaagacggtcctccacgtcgatcccagcccgttctacggctccctctactcttccatccagctctcctccctcgcctccttcttatcccgtgaggccaccccgcccacctcgaccgtggcagcggccgcctccgattggcataccgtcgtcgatctccaccgacggatcgtgtactccgaggtcgagacctcgggggcggcgccagagccggcgaggcggttcaccattgacctggtggggccccgggtgctgtactgcgccgatgaggcagtggacctcctcctgcggtcggggggcagccaccatgtggagttcaagagcgtggaggggggcagcctcctctactgggaaggctgcctctacccggtgccagactcgaggcaggccatcttcaaggacaccacactgaagctcaaggagaagaacatcctcttcaggttcttcaagcttgtgcaggcgcacattgctgccgcctcagcttctgctgatgagacgggacagggggatgcacctgccaggatacttgaggaggacctggatcttccctttgttgagttcctcaagaaacaggggcttcctcccaagatgagagcggttgtgctgtatgccattgccatggcggattacaatcaagatgtcttagcaacacgttttattatccaggtgttgcggatgccagtggttgcacttcttatggatgaggaaaagaaacattttgtaggcgctagattggtatctggtcaggatattttatgccaacaattgataattgatccgtcttataagactatcttggatgtcccatttgatggttcagattctcattttccaagaaaagttgtgagaggggtatgcataattagcaagtccgtgaaacagggatcatcaaatgttctggttattttccctccaaaatcactagaagagcagcaagttacagctgttcgacttcttcagttgagcagcaatctcgcagtatgccctcctgggatgtttatgtcatatctgtctactccctgtaccgatgtctcagtcggaaagcaatgcataaaaaaagcaatagatgctctttacagtcctcaggcttcagatggttcagaagaccatcttgagacagccagtgaaagcaccgaggatgtgaagccaacactaatctggagttgtgtgtatgttcaagagatcacacagggaacagctggtcctttattgtcatgccctatgcccgatgaatacctggactacagaaacatactgggatcaacaaaaaagttattcgcaagtatctatgctgatgaagagttcttgcctaaaaagtcagctcctgtatatgccaatgatgactctgattctgcagagtaaaaccatctttctagagcccgtcactgaaattccgagggcaaaagagcgtcgcaaggggagcctgtggggcttgatgagcagttgtgctggatttccaatgtacaggtgcccactggctggccatacattgcattggtagggaacagttggagggagacatgctcggtgcaaatggccttgtatggattggcaaacattgttgtacgcaagatcacagcaaatacgggatacaaaatgctgaacgctcgatttggtcccccaatttgaacgacagagtgtagaagggtattctgaagacttactagttaagtggctgagggctgatttagcgacgagggaaataaaggtgatccatgaggaaaatagcaatgaaattcctcccccgtgtggccatgtctccatgtggtcattaaaccagccctgaatgtatttttggtcggccaaagcggtgtgtatagtatctttctttgtttttggttgtttcaggtgaggttttagtcttcagctcgcagaattgggcgatattattacccggcctatagtattttttttcttctcgcaaccattttttgtttgttgatgagttctgagagtgcattgtttagttttctacaagaacaatcgtaggacgacacgggaacatgggactcactgctgaag

SEQ ID NO: 10410 - DNA, 2360 bp, Zea Mays
cgctaatggcacgggttcgcgatttggcggcagagtgccccgacggcgggaggtattgtgccgccagcacggtgaactgcccactcgttgagtcgttgttgctgcggacctgcggtactctattgatccctagatttcccaacaaatatggcggaggcgggggccgactcctccaacgcggccgtcgacggcggtggcggtagcgtccaaaacgactatcccaccattgacccgacctcgttcgacgtggtgctctgcggcacgggcctcccggagtctgtcctcgccgccgcctgcgccgccgctgggaagacggtcctccacgtcgatcccagcccgttctacggctccctctactcttccatccagctctcctccctcgcctccttcttatcccgtgaggccaccccgcccacctcgaccgtggcagcggccgcctccgattggcataccgtcgtcgatctccaccgacggatcgtgtactccgaggtcgagacctcgggggcggcgccagagccggcgaggcggttcaccattgacctggtggggccccgggtgctgtactgcgccgatgaggcagtggacctcctcctgcggtcggggggcagccaccatgtggagttcaagagcgtggaggggggcagcctcctctactgggaaggctgcctctacccggtgccagactcgaggcaggccatcttcaaggacaccacactgaagctcaaggagaagaacatcctcttcaggttcttcaagcttgtgcaggcgcacattgctgccgcctcagcttctgctgatgagacgggacagggggatgcacctgccaggatacttgaggaggacctggatcttccctttgttgagttcctcaagaaacaggggcttcctcccaagatgagagcggttgtgctgtatgccattgccatggcggattacaatcaagatgtcttagcaacacgttttattatccaggtgttgcggatgccagtggttgcacttcttatggatgaggaaaagaaacattttgtaggcgctagattggtatctggtcaggatattttatgccaacaattgataattgatccgtcttataagactatcttggatgtcccatttgatggttcagattctcattttccaagaaaagttgtgagaggggtatgcataattagcaagtccgtgaaacagggatcatcaaatgttctggttattttccctccaaaatcactagaagagcagcaagttacagctgttcgacttcttcagttgagcagcaatctcgcagtatgccctcctgggatgtttatgtcatatctgtctactccctgtaccgatgtctcagtcggaaagcaatgcataaaaaaagcaatagatgctctttacagtcctcaggcttcagatggttcagaagaccatcttgagacagccagtgaaagcaccgaggatgtgaagccaacactaatctggagttgtgtgtatgttcaagagatcacacagggaacagctggtcctttattgtcatgccctatgcccgatgaatacctggactacagaaacatactgggatcaacaaaaaagttattcgcaagtatctatgctgatgaagagttcttgcctaaaaagtcagctcctgtatatgccaatgatgactctgattctgcagagtaaaaccatctttctagagggctttatcatttggttggagaacgccgtcagcccgtcactgaaattccgagggcaaaagagcgtcgcaaggggagcctgtggggcttgatgagcagttgtgctggatttccaatgtacaggtgcccactggctggccatacattgcattggtagggaacagttggagggagacatgctcggtgcaaatggccttgtatggattggcaaacattgttgtacgcaagatcacagcaaatacgggatacaaaatgctgaacgctcgatttggtcccccaatttgaacgacagagtgtagaagggtattctgaagacttactagttaagtggctgagggctgatttagcgacgagggaaataaaggtgatccatgaggaaaatagcaatgaaattcctcccccgtgtggccatgtctccatgtggtcattaaaccagccctgaatgtatttttggtcggccaaagcggtgtgtatagtatctttctttgtttttggttgtttcaggtgaggttttagtcttcagctcgcagaattgggcgatattattacccggcctatagtattttttttcttctcgcaaccattttttgtttgttgatgagttctgagagtgcattgtttagttttctacaagaacaatcgtaggacgacacgggaacatgggactcactgctgaag

SEQ ID NO: 10411 - DNA, 1313 bp, Zea Mays
gccttgtctaccgttcaagcccaaacgaaaaaaaaaacaaaaaaaaactcaaaccatagcttcgtaaaccctcgccgccgccgccgccgccgccgccgatgacatcggaggagcacccctcgtctgcgtcctcggacggcagcaccaccatcggctccgacgaacatcttgacccctcgccatcaccttcgacgtccttcgactctcctcctgaatccgacgactccgccgcctcctcgctgctctcagacggctcttcagagtccgagcccatcattttcaagaaaccccgcccacccgtgcgctcgtggccggcctccgacgagatcgcgatcctcgagaccgtcgcgtcgcaccggcagaagcacgggcgacttcccctggcagacgacctcgccgccgcggtgcggggccgcctcagcgtgggggaccgcctcagcgccgcgcagatcaccaggcggctgtgcgcgctccgcaaccggtacgacaacaccgttatccgcctcaaacgcggcacgatcccggcgaaggacagcgacgtcaccatctacaggctctccaagctcatctgggagggcacgcgcagggggaggatagagaagaagacccgtgtgcccgacgcgcgcaatgacccaagagggttcgacgatctggccgagctgtacccttgcctctccgcggaggtggaggcgattggtgcgaggtgcggctacggggcgctgaagagggcattcgggcgcatcggtgacgacacggcggcgcggctggaggcgaagctgaagaggcagcggatggcggagaccagggcgagcggaaagcttgaccggctgaggtcgagagtcgccaatgcgcttcagggatttaacaagtgaaatgtggcggactttgttgaaggagctgaacgtggacgtctggaggattattagacaatagacacgccaagtgaaagtggctttaagattttgtcaaggagaggaagctacataacatggaggacttgctttgatgttctgcttaggttctatttgggactgatctaactttaaaaaattaatttggtggagctggcatagcaggttattaggtttattaggtgatccagaaaatcctagacctgcagaacctttagaaaatatcttgataagtcattttatttatattttagattaaaaatatatttaaatttatattataaactacaaccccaagctaaagttggaacatggagcaatcataaacacccctttaattcttgagggttggattttttttggatgtttgtctctagctttcttgccactgtgttgtgcttc

SEQ ID NO: 10412 - DNA, 1858 bp, Zea Mays
aaaaggcccgcacgcacctgcgtctgtgtgcagcgaccagcgacgcaacaacttccgttccgtccccggcgccggtaaacgacgtctcactttcaacgcacatccccaatcttcattcccctgaaaccctagccgctccgtccggtcgcgccactcccttcgcctctctaaggttccggcggaagccgtcctctgcgtgactgcgtcggctgcggtggagatggcttcctcgtcggcgtcttcgaggcaccaggtcaccatcaccctcggccgcagcggtcaggttgtcaaaaggagggctatgtctgatgatattaatgacggtgaattgcctttgttggggaaaaagcgatctgtgagggataggttaggaagtaatgtgtctgattctgatttttatgaaagccagcagagaaacaaacggcgacaattagaaagtaatagctcacatggagatgatggttcagaccgcctggttgggaagggtgatctgagactgaaactcatgaggaaaggcttgttgccgaggagcaatggtagtgcagaacagaatgacatagatctccgtgaaaagctttctcgaaaccataagttaccaaattatgattctagaggtcatgctgcagaatcaagggctagttatgatatgagagatgagcctccagagttaagttccagatattcttcgagggaggatgtcctagggtcgaggcactcttctgttgtaagtcgagttccttatgcaagaagtgtggatgatttgttaaagttggattattcaagaaaatcctacccgtcatggacagatgatggtttgaggcacagatcacctgaaaggatgttaaaagttcggagcgatatgtatccacggatagcttatgatcagattaggcccatgccaccccttaggtctgctggttcctcgagacctcaaagttttattacaagagatgctcctgacacgtcaaggagccaaccatatgctggcaaatccaccatttctattgatacagtacagaggactaatggaatcactccatctactgcagctctgcctaaggcccctgttatggatgaagccccgcttacagttactggattgctgaactcgttgggtcttgagaagtatgttgttctctttcaggctgaggaggtggatttgtctgcattgaggcaaatgggagagagcgacctcaaagacatgggggtaccaatgggaacatgattcagcaagcaccaacattcttcaggtgcaaacgtgtttgacacagaccactgttttcaggaaaacaaagttttggcccgaggaagaagattctccttgcagttggccctcagtccaaataacgccaaagatgagcaaacagggtgtgggtctaagaacatttgttggcaaccgaaaatattggtgtaagaactccagatataagatattgtatacccaattatccatagtggcggtcttaatccacccttttgttgccgatgacgtttcgtgccgtagttgacatgtaagtctgttcggtcagctgttaatccaggttctatcgttctcggtctgtccggtgcctgccttactgtttttttctttttctttttttaaacagcctgccttactgttattattgcttcgaaatgggacgatacgccatatgcttggtgtacccattgatagttggcttgggaattgatgatccattcagttcttgtgtcagaaatcacaaggcgacgatactttacataagatcttattgctctaaccgaaagaaaggcttgccgcctctcagatgtcattgtgaactgatggaaagggaggaagagatactctgctgagctagcgagacaaatcgggcacgga

SEQ ID NO: 10413 - DNA, 820 bp, Zea Mays
cacctggtcgtcaactgctcggccgccgccttcaatcactgctagtccgcaggcaaccgagagcccgagaccgcccaggcgcccaccactccaccagccaaccctagagcctctccagtctccactgctcggccgccgcctgccgcagcccgccgtccactggtcccgcctccctgcgtccgctccactactcctggcgtccgctccattgctaccatcgtccggcgttctgctcctgcgccctccctttgattcgttgccagttgtagtgtccggtcagatttgagctatggcagcaagcaaggattgacgaagcgtgcgttcccatcgcaccaccatgggctacacagagatcgacatccgcccctctgggagcggcaagcggcgtgagggattgacagactgctgactacgggagccgggagggggcatcgtgcgccgtgcgcggtggcgaaggaagagcgaagcggcggaggccgagctgctacggcgctgactggccgggtcgcacggctacgccgctactcgacgcttgctgcggcttgtgggaagctggagaagaaagtttgtcgcctgtacagctgtcggagaagaaagctcgtgcttggcggcttgctatgggccgcgattgagaggaggtgcgagctgcaatcaaagttaaggcattagtcatcatttgcttcacctcttctggacaggctgcaaggttgctctgacataacgaggaagtccctcttcatggtcggagaaattgggggcaatgactacaacctacctcttcaatcgagtgccatttgaaaagggtgttctggacaaagaa

SEQ ID NO: 10414 - DNA, 1279 bp, Zea Mays
aggtgatgcgggcgcaccggatcatggagcgcgtgcaggaggaacaacgctgctagtacggcgtcaaggagccgaggcaggtgctcgccgtcaccccgacctactcacgcgcattctaggcgctccacctcatcggcctcctccactcactccgtcggaatccttgcgcatactggcacgacagaccaactacggctcagcgaggaggacaagcagaatatgcctcttccagtccatggccctgcttgcaactcctcagggcatctgattggatggcacacgttcaactcattgcccttctctgggaagacggccacagttgttggtgaagcagcccctgttctgcccagggatttggagtgggctggttttgtgttgaactcgaggatgctgtggaaggaggctgacggtaagcctgactgggtgaaggatcttgatgctgtgggcgagaatggcgaggagattgagaacccacttactctgttgaatgatccgtcctctgttgagccactgggcaactatgggaagaaggtcctactgtggtggctttgtgttgaagcacgggctgatagcaagtttcctgaaggaaagtggccttagagaatggattaattttggttgacacaaagtatgagtttggaaaaacatctgatgggacaattgtgttgattgatgaggttcatactcctgactccagcagatatcggattgctaattcatacgaagatagattcatatctggccttgaacctgaaaatgttgataaggttctgccagaagctccagaagagttggtatgttagttggcctggcggtcatccaaagatcatccaccgcgacattaaggcatctaacattcttcttgacttcaaatttgaagctaaggtcgctgactttggacttgcaaagtgcactactgataataacacccatgtttcgacaagagtaatgggcacctttgggtatttggcacctgagtatgcaacatctggcaagctcacagaaaaatccgatgtattttctttcggagtcatgcttcttgagcttattactgggcagcgaccaattgacacaacccaattagcaatgcttgctataagcacatatgtacttccatttgcatgttgtataatactaataccaattgcaaaattatagttatttttctacccttgttagttaataagcatatttctggtcaataggttgtattcttattcttgtaaccgtgttaattaatgttatggacttgtagtctcgtattaccttgtgaatatat

SEQ ID NO: 10415 - DNA, 2410 bp, Zea Mays
atcgaacatcggagagatgcgcgcgggcggcggcgcgcctccccgacacgcaccactctccccgaccgcctccgccactgccacgctagtacccgcttctgtcgccatgcccacgccgcgcctcgtacacctccgccacctcctctcattccgctccgcccttccccgcccgctgggtcccaaccaaagccacccgctccccgggtcggttcacccgtcccttctcctcccccgtgccatggctggtgtcgcatacgcaggtctggcgacggggtcggcggaatacgaggaggtgctcgggtgcctcgcgtcgctgataacgcagaaggtgcgcgcggacaccggcaaccgcggcaaccagtgggagctcatgtccaagtacgtccagatactggaactggaggaatccatcgcgcagttgaaagtggttcacgttgctgggaccaaagggaagggttcaacatgcacatttgctgagtcaatccttcgatcatgtggtttccacactgggctcttcacttcaccacatttgatggatgtccgcgagcgatttcggcttgatgggctggacatttcagaagaaaagtttattaggtatttctggtggtgctggaagacactgaaggacaagactggtgatggtgtaccgatgccggcctactttaggttccttgcactgctagcattcaagatcttttcagatgagcaggtggatgtcgtagtgctcgaggttggtttgggagggaagtatgatgcaacaaatgtggtcagagcacctgtagtttgtggaataacatcccttgggaaacacacttggagaaattactagagagaaggctgggatactgaagaaaggagttccagcgtatacagttccacagccagaagaggcaatgtctgtactgatgaagcgagctactgaattgggtgtttctcttcaagttgtccaccctttggacccacagaaattagaggatcaacctcttggactccatggtgagcaccaatacatgaatgcaggtcttgcaattgcattggctaatacctggcttgagaggcaaggccatttgaacagattacatgtcaaacattctggtaccttgccagatcagttcatcaaagggctgtcgagtgcttgtctgcaaggtcgaggacagattattccaaattcacaagtgaactcagaaaatgatcgtgattcttcattggttttctatttggatggggcacatagctcagaaagcatggaaatgtgtgcaagatggtttgcccacgctacaaatagtgatggaatacagccaggtccttcggagcagcctcacactgatagggattccaggaagtttctccttttcaattgcatgactgtaagagatcctcagagattgctcccacgtcttctagatacatgtgctcaaaatggtctccactttgagcatgccttatttgtgccaaaccaatcacagtacaacaagcttggatcccttgcatccccaccttcagagcgtgaacaaattgatttgtcatggcagttgtcgcttcaaaaggtgtggggaaacctgcctcatcacaataaaggtctaaatgatgtaaactctagcggagctacctcggtttttgaatctcttccattggcaattaaatggctaagggaaactgctcaacaaaatcaatcgattcagtttcaggtcttagttaccggctcgctgcaccttgtcggcgatgtcttaagattgctcaagaacaataagtaacttcatttggaatggcacattgttcagattgaactggctgcctacggaccactaaggcactaactggagcttatcgaaatttgtgattgggatagcacaacataccaacttggttacaaggctggaagaaattgaaagacatttttatttcagttccaatcagcggtaaaattgttgtatttaatcgtttctttaagttcctggcgttatgtgccatcacatcctcactccagaaggatgtaaccaatttttagaatgtacaattagtggattctcagcgacacatctttgtatgattggtggacgggtctgcgtagcctttgcaacagacaatcaagaagacgctttgacggcctgctaattcatttttggtggaatttatggctggaacgaaataacagaattttccaaagtcagcatagaagcgttaatcaagtggcccttgcagtcatcagatattgctagtagctgaggtcttgttgatctggtctagtgggtttttgttcttctccttttattttttcttttttaccctctcccctccggttctctggttttgtatcttccatttctttgctctctaatctaatatatttcggagtggcaagtcttttgccccttcctttcaaaaaaaaaaaaacaattagtggattata

SEQ ID NO: 10416 - DNA, 3726 bp, Zea Mays
cgcagaaaagatagctgtagacatccccggaagaaatggtcccgtgcgtgcgctcactcctttgctgtttttcttctctccgttcaccttgcgtgcgcgacatctagggcgaccgccgccgccgccgccgccctacgcccagcagcccaggtcttcgtcgcgccctttgccggctacgagcacccaccacaccagatcactgtaatccaggctgaattgtggctggtattggcgatataagcattcgttagctgtttaaattgtgtcttttgtctttgattaagcgtcattggaaaggctgtcatgagaaaactcttttgttcaaacgtttctctcctgtaatatgaatcattcatgcaaattcgtggatattaattcagaacctggtggcatattaatcttggatacttggtcaactgcaaacttgaagattcattttcatgcaatcaatggagagcctagcgcaattagaggtgttgtgtgaaaagctttataattctagagactcggctgagcgagcgcatgcagaaagcaccctcaagtgcttctcagagaacagcgagtacatttcgcagtgccaatacatattggacaatgcctcaactccatatgccctgatgctggcgagttcaagcttgctgaagcaagtttctgaccgcagtctttctttgatgctccgtctcgatatacggaattatgtcataaactatcttggcacaagggggcctaaattgcagaactttgtcattgtgtccttaattcagctggtctgtcgaattacaaaatttggatggtttgatgatgacagattcagagagactgtcaaggaagcgactgattttttaggtcttgcttcccaggatcattatttcataggcttgaagatactaaacaatctcgttacagaaatgaatcagccaaaccccgcgatgcctttgacgcttcataggaaaattgcgggttcattcaaggatcagtttcttctgcagatcttccaaatttcgttaacctcactaaaccaactgaagagtgaagctccggatgactttggacatattcctcttgaccttgccttgaagtgcttatcttttgactttgttggttctccggtggacgaaagctctgaagaatttggaacagtgcagcttcctgcatcttggaggcctcttcttcaagatccttccacactccaaatcttttttgattactacaaagtcaatgacatacgggtttcaaaagaggccttggagtgtctggttcgacttgcttctgtcaggcgcagtatttttgtggaggatcctgcaaggtcccagtttctttctcatctgatgctaggcaccaaggagatacttctaactggccaaggacttgctgatcatgacaattaccatgagttctgccgtcttttgggacgtttcaaagtgaattaccagctggcagagcttttgaatgttgagttttatggtgagtggattggtctagtagctgaatttacaactagatccttgttgtcatggcagtgggccagcaacagtgtctactaccttctaagtctttggtcaaggctggtgacatccgtgccttacttgaaaggtgaaacaccaagtcttcttgatgaaactgttcccaagatcacagaaggttttatcacttccagaattaattctgttcaggccatccttgctgacaactcactggaaaatcctttggatagtgtggaagttctccaggaccagctggagtttcttcctttcctttgcagattccagtaccaaagtagtagtctgtacatcataaacatcatggaacctcttctgcaagcttatacggtccagattacccgctcctggtgatgctgatgagctgtctgtcattgaaggccaaattgcatggatggttcacataattgcggccattgtcaaagttaggcaggtaacaggtgttagtcaagaaacacaagagttgattgacgcagaactctctgcccgtgtactacagttgataagtgtgactgatacaggagcgcacacacagagatatcaagaattaagtaagcaaaggcttgaccgagctattctcatttttgtacaaagtttcagaaggtcatatgtaggagaccaagctatgcattcttcaaagcagttgtatggaagattgtctgagcttctaggacttaatgaccatttaattctactcaatgtgattgttggcaaaattgctacaaatatgaagtgctatgctgagagtgaggatgttattgatcatactctgtccctgttccttgacttggcaactggctatatgactggaaagctgctgcttaagctggagagtgtaaaattcatcattgcaaatcattctccagagaatttcccatttcttgcagaatacaaatgttcacgtagtagaactacgttctattacatccttggctccttagtcttcatggaagatagccctgtgaaattcaggactttcatggaaccacttcaacaggttgcattaaacctggaggcaactcctgatgctgcttttcggactgatgtcgctaagcgtgcatttgttggttggatgagagatctacgtggcatagctatggcaaccaacagccgcaagacatatggcctcctatttgactggttgtatccatctcgcatgccacttctgctgagagccatctcactttgcactgatgaaccagaggtcaccacacccttgctcaagttcacgtatgaatttgttttgaacaaagctcaaagactgacatttgattcatcatcaccaaatgggatccttttattccgagaggttagcaagataatcgtggcttacgggtcacgaattctattgcttcctaatggcacagacatttatggaagtaaatacaaaggcatatggatctcactgactgttctttcaagggctttgtgtgggaattatgtcaattttggcgtatttgagctctatggtgacagagcacttgctgatgcccttgatatatctctgaagatgaccctctcagttccattatctgatatattggcattcaaaaagctgtcgaaagcgtactttgggtatatggaagttctgttcaacaaccatatcaagtttgttctcaatttggacacaaacacattcatacatattgtcagctcactcgaatctggcttaaaaggtctagatgcagggatatcatcacagtgcgcttctgccatcgacaacctggcagccttttactttaataacattacatctggtgactcacctccatcaccagcttcagtaaatctcgcacgacatattggagagtgtcccaatttgtttcctcagatactgaagactctttttgagatcatgctctttgaggatgctggtaatcagtggagtctgagtcgaccaatactgagcctgataatgaccagtgaacagatgttcagtgaactcagagcgcacatattagcatcacaggttgtgtggtgcaattgcaatgcggcactgcgcattgtagctgcttgctggtaggagatagtggtcttgttgcttgccggagcttgtactggcctacctggaggtgcagacatgcaatgcagcagagaatttcttgagcctagggccccagctgtggaggtttcatattgccattcctgtgtttacgagtaatagtcagatcgtcatgttttgtttgtttgattatgttgatttcttgtttttacgatgctctttaaa

SEQ ID NO: 10417 - DNA, 4201 bp, Zea Mays
cgcagaaaagatagctgtagacatccccggaagaaatggtcccgtgcgtgcgctcactcctttgctgtttttcttctctccgttcaccttgcgtgcgcgacatctagggcgaccgccgccgccgccgccgccctacgcccagcagcccaggtcttcgtcgcgccctttgccggctacgagcacccaccacaccagatcactgtaatccaggctgaattgtggctggtattggcgatataagcattcgttagctgtttaaattgtgtcttttgtctttgattaagcgtcattggaaaggctgtcatgagaaaactcttttgttcaaacgtttctctcctgtaatatgaatcattcatgcaaattcgtggatattaattcagaacctggtggcatattaatcttggatacttggtcaactgcaaacttgaagattcattttcatgcaatcaatggagagcctagcgcaattagaggtgttgtgtgaaaagctttataattctagagactcggctgagcgagcgcatgcagaaagcaccctcaagtgcttctcagagaacagcgagtacatttcgcagtgccaatacatattggacaatgcctcaactccatatgccctgatgctggcgagttcaagcttgctgaagcaagtttctgaccgcagtctttctttgatgctccgtctcgatatacggaattatgtcataaactatcttggcacaagggggcctaaattgcagaactttgtcattgtgtccttaattcagctggtctgtcgaattacaaaatttggatggtttgatgatgacagattcagagagactgtcaaggaagcgactgattttttaggtcttgcttcccaggatcattatttcataggcttgaagatactaaacaatctcgttacagaaatgaatcagccaaaccccgcgatgcctttgacgcttcataggaaaattgcgggttcattcaaggatcagtttcttctgcagatcttccaaatttcgttaacctcactaaaccaactgaagagtgaagctccggatgactttggacatattcctcttgaccttgccttgaagtgcttatcttttgactttgttggttctccggtggacgaaagctctgaagaatttggaacagtgcagcttcctgcatcttggaggcctcttcttcaagatccttccacactccaaatcttttttgattactacaaagtcaatgacatacgggtttcaaaagaggccttggagtgtctggttcgacttgcttctgtcaggcgcagtatttttgtggaggatcctgcaaggtcccagtttctttctcatctgatgctaggcaccaaggagatacttctaactggccaaggacttgctgatcatgacaattaccatgagttctgccgtcttttgggacgtttcaaagtgaattaccagctggcagagcttttgaatgttgagttttatggtgagtggattggtctagtagctgaatttacaactagatccttgttgtcatggcagtgggccagcaacagtgtctactaccttctaagtctttggtcaaggctggtgacatccgtgccttacttgaaaggtgaaacaccaagtcttcttgatgaaactgttcccaagatcacagaaggttttatcacttccagaattaattctgttcaggccatccttgctgacaactcactggaaaatcctttggatagtgtggaagttctccaggaccagctggagtttcttcctttcctttgcagattccagtaccaaagtagtagtctgtacatcataaacatcatggaacctcttctgcaagcttatacggaaaggtccagattacccgctcctggtgatgctgatgagctgtctgtcattgaaggccaaattgcatggatggttcacataattgcggccattgtcaaagttaggcaggtaacaggtgttagtcaagaaacacaagagttgattgacgcagaactctctgcccgtgtactacagttgataagtgtgactgatacaggagcgcacacacagagatatcaagaattaagtaagcaaaggcttgaccgagctattctcatttttgtacaaagtttcagaaggtcatatgtaggagaccaagctatgcattcttcaaagcagttgtatggaagattgtctgagcttctaggacttaatgaccatttaattctactcaatgtgattgttggcaaaattgctacaaatatgaagtgctatgctgagagtgaggatgttattgatcatactctgtccctgttccttgacttggcaactggctatatgactggaaagctgctgcttaagctggagagtgtaaaattcatcattgcaaatcattctgtaaagtcttccgcttcccactaacttttatttattttccatcgctgcactcagttttagagataactcttttttattattcttccagccagagaatttcccatttcttgcagaatacaaatgttcacgtagtagaactacgttctattacatccttggctccttagtcttcatggaagatagccctgtgaaattcaggactttcatggaaccacttcaacaggttgcattaaacctggaggcaactcctgatgctgcttttcggactgatgtcgctaagcgtgcatttgttggttggatgagagatctacgtggcatagctatggcaaccaacagccgcaagacatatggcctcctatttgactggttgtatccatctcgcatgccacttctgctgagagccatctcactttgcactgatgaaccagaggtcaccacacccttgctcaagttcacgtatgaatttgttttgaacaaagctcaaagactgacatttgattcatcatcaccaaatgggatccttttattccgagaggttagcaagataatcgtggcttacgggtcacgaattctattgcttcctaatggcacagacatttatggaagtaaatacaaaggcatatggatctcactgactgttctttcaagggctttgtgtgggaattatgtcaattttggcgtatttgagctctatggtgacagagcacttgctgatgcccttgatatatctctgaagatgaccctctcagttccattatctgatatattggcattcaaaaagctgtcgaaagcgtactttgggtatatggaagttctgttcaacaaccatatcaagtttgttctcaatttggacacaaacacattcatacatattgtcagctcactcgaatctggcttaaaaggtctagatgcagggatatcatcacagtgcgcttctgccatcgacaacctggcagccttttactttaataacattacatctggtgactcacctccatcaccagcttcagtaaatctcgcacgacatattggagagtgtcccaatttgtttcctcagatactgaagactctttttgagatcatgctctttgaggatgctggtaatcagtggagtctgagtcgaccaatactgagcctgataatgaccagtgaacagatgttcagtgaactcagagcgcacatattagcatcacagactgtggaccagcaacaacgcctttcacagtgcttcgataagctgatgacggatgtcaataggaacttggaacctaagaatcgtgacagattcactcaaaacctgacagcatttagacgtgattttcgactgaagtaacagctccttggtaccagctatcagtttgaaggtgttcctgcatgatgtaaatactccagttaccttcttttttggaaccacctttctgtgggttgagaaaagaagagcttgtccttaggtttgccttggattggctgaagatggtcttgttgatgcatgtggtagtgaaagcagctgtaaatttcatagcatgtcattttaatcagaatggtgaaaggtggagattgtttcttttgttttttattttatattgcatccctttagcatgtacagcaaaattggtgctagaacaggggtggctgtttgcccaatttgttaagtgggaggcagtcatctcagatataattcatttgttaagaagtcaacgaggtaaaggatgtaaatgattccgttggctttgctgaatatgaaagttgaacagtaagaaggatggctcagttgcatccgctgtgcagattgaactgttaatgataacaatttcttttttttttgtctctgtttg

SEQ ID NO: 10418 - DNA, 931 bp, Zea Mays
acaactattaagacccaaatgtagactgcccccgcctgcgaacgaatcccacccgccgctctgcctcccccgcggcgaatcccgcccgcgcctcccccgccatagaacccgcctccaaccgcgaatcgcccgccgtgccttcacccgccgctcctccatctcctcctcctcgtcgtcgctgccgccgcgctgcggggggcgccgttggcggacgccggcgcggacacctgcaaggcgtggttggtgcagtccatccccacggacatgccgcacctgagccgcatccccggggtcctatccacgggagatgtgctccagtggctctcggggaatgcaacgaagagtctggacatccttgcgcagtactggcagttcttgccccagccgaacaatccgaaatcgggggactacgggttctccaagagtgacatgaggagattcggggccgacgagggccgccgggtttacaaggcactggaaaatgctgcagaccgattgtccagcactctggatttgctcctgattttgaccaagagagcgcagatctggctgcaggaagaccaaatgttgagaacgcaaccgttcttttcgaggactggtggggatctggtgttgtgcacgcaaaggtctggatatcagataagaaggatgtgtatataggttccgcaaacaacgactggaaatcccttactcaggtcaaggagcttgggatttattttgctggttgcccacatatagcaaaaactgtggaggtctattttcaaaacctgtggacgctttcaaccctcaactcaactttttacaccaaacaagcctgggatacgcagtggcaagtttctagaaaggttccatgctggtctcatttcctacagcccaaagaaagatgcagttcaacacagcacatgtccaaggagttggggcaggaagaatt

SEQ ID NO: 10419 - DNA, 1008 bp, Zea Mays
acaactattaagacccaaatgtagactgcccccgcctgcgaacgaatcccacccgccgctctgcctcccccgcggcgaatcccgcccgcgcctcccccgccatagaacccgcctccaaccgcgaatcgcccgccgtgccttcacccgccgctcctccatctcctcctcctcgtcgtcgctgccgccgcgctgcggggggcgccgttggcggacgccggcgcggacacctgcaaggcgtggttggtgcagtccatccccacggacatgccgcacctgagccgcatccccggggtcctatccacggtggctctcggggaatgcaacgaagagtctggacatccttgcgcagtactggcagttcttgccccagccgaacaatccgaaatcgggggactacgggttctccaagagtgacatgaggagattcggggccgacgagggccgccgggtttacaaggcactggaaaatgctgcagaccgtaagatcaaaatcaggattgtccagcactctggatttgctcctgattttgaccaagagagcgcagatctggctgcaggaagaccaaatgttgagaacgcaaccgttcttttcgaggactggtggggatctggtgttgtgcacgcaaaggtctggatatcagataagaaggatgtgtatataggttccgcaaacaacgactggaaatcccttactcaggtcaaggagcttgggatttattttgctggttgcccacatatagcaaaaactgtggaggtctattttcaaaacctgtggacgctttcaaccctcaactcaactttttacaccaaacaagcctgggatacgcagtggcaagtttctagaaaggttccatgctggtctcatttcctacagcccaaagaaagatgcaggggcggcgtgaagcgcatctccgggctcatctacgaggagacccgcggcatcctcaagatcttcctggagcaatgctgctggtttaggggttcttcgcgcgcgcatccggccaggcc

SEQ ID NO: 10420 - DNA, 1353 bp, Zea Mays
agaaatgtgaagaagactatattgttgctagaaccgaagaggaggcgattgcagaagctcatgaaaaatatggaaaatcagttgaaatatatcaagaccctgatgttcttgatacttggttctcaagtgctctgtggcctttcagcacgcttggttggcctgatctttccaaggaggattataagcatttttatccttcaactgttctggagacaggccacgatattttgttcttctgggttgcacgaatggtcatgatgggaattgagttcacaggatcagtaccattttcttatgtctatctacatggtcttatccgggatgctgagggtcgaaaaatgtcgaagacattagggaatgtcattgatcccctagataccatcaaagagtacgggacagatgctttgagatttacactatctttgggcactgcaggccaggacctcaatctctctacagaaaggttgacgtcaaataaggctttcacaaacaagctgtggaacgcagggaaatttttgttacagaacttgcctgataaaaatgatgtctctgcatgggatgtcttgttgtctaataagttcgactcagaagcatcactccagaaactgccattgccagaatgctgggtggttacaggactacatgaactcatcgataaggtcagcagaagctatgataagtttttcttcggagatgctgctagagaaatatatgattacttctggggggattttgctgattggtatattgaagctagcaaaacacggctttaccactcgagtgacaagatcgctgctgctacagcccagagtgttctggtgtatgtgtttgaaaacatactgaagttattgcatcccttcatgccattcgtcactgaagaattatggcaggcatttccatacagaaaacaagcacttatggttactccctggcctaccactgaccttcctaaagatttgaggtccatcaaacggttccagaatttgcaatcattggagaactgcgcatcttatataaaagagaggaagaaaagccatacaaaagatggcatcttgctgagcaagttccccaaggatcctacacacaaccgtaggacattacaaaccggaaccaagacttgaccctacctcgctaagagctgcaactaagcctaggtgctttagctcttcagctcctgccatagcccagctagtacattcatccaggaaccttcgaagaattctagataatgagggggactccccttcaaacactgttctgtttctctggatccatagacaccaagctcccaggaggccaggatgatcaaggagttaagcccctttttcatgttcttggaaaccctgaggctca

SEQ ID NO: 10421 - DNA, 1779 bp, Zea Mays
ttggaaagaaatgtgaagaagactatattgttgctagaaccgaagaggaggcgattgcagaagctcatgaaaaatatggaaaatcagttgaaatatatcaagaccctgatgttcttgatacttggttctcaagtgctctgtggcctttcagcacgcttggttggcctgatctttccaaggaggattataagcatttttatccttcaactgttctggagacaggccacgatattttgttcttctgggttgcacgaatggtcatgatgggaattgagttcacaggatcagtaccattttcttatgtctatctacatggtcttatccgggatgctgagggtcgaaaaatgtcgaagacattagggaatgtcattgatcccctagataccatcaaagagtacgggacagatgctttgagatttacactatctttgggcactgcaggccaggacctcaatctctctacagaaaggttgacgtcaaataaggctttcacaaacaagctgtggaacgcagggaaatttttgttacagaacttgcctgataaaaatgatgtctctgcatgggatgtcttgttgtctaataagttcgactcagaagcatcactccagaaactgccattgccagaatgctgggtggttacaggactacatgaactcatcgataaggtatattgaagctagcaaaacacggctttaccactcgagtgacaagatcgctgctgctacagcccagagtgttctggtgtatgtgtttgaaaacatactgaagttattgcatcccttcatgccattcgtcactgaagaattatggcaggcatttccatacagaaaacaagcacttatggttactccctggcctaccactgaccttcctaaagatttgaggtccatcaaacggttccagaatttgcaatcattgataagaggaatcagaaatgttcgagcagaatattctgttgagccagctaaacggatatcagcttctgttgttgctactgcggatgtcctggaatacgtatcaagggagaagcaggtcctagcattactttcaaagcttgacgttcagaacgtacattttactgaatcagcaccaggcgatgcaaaccagtcggttcacattgttgctgatgagggtttggaggcgtatctacctttggctgatatggttgacgtgtctgaagaggttaagcggctctccaagcgcctctccaagatgcagtcggagtatgatgctcttgttgcccgactcaattccccaagttttgttgaaaaggcccctgaagatattgttcgcggagttcgtgaaaaagcgtctgaggcagacgagaagatctctctaactaaaaatcgtctcacttttctgcaatcaaccattaccacttaaatacagtaatccacggggactctaccaggatgccattttgatcgatgacgcaggacaaaactgattgttaatagtttttggttgaaggatatgatagattggcaacgaagttgtgccttgtccagcagaaacacacattctttctagttcatatctgttgtctcttgaaacttaaaacatacattcggctaggcatataatttatattcctgacttatggttttagagcctttcgggatgcccttagttgaggtaaattttgttctgcctctgaagttttgctgatgccattgttagtaatattcatattttgtaaggtgggcgcacgttattagatatgaatgatctgtaaggtcggtgcacatgtattatcaatgactattgtttcgggcgtca

SEQ ID NO: 10422 - DNA, 1780 bp, Zea Mays
ggactttgcatgcttgggctcgtcggcaaccggacaggaggacagcaaggcggaagcgcaaccgggcgtcgctggtccgacgggcggcacgtgtcagggagcgtgacaggggcggcagatccggacctccacgtccgtatccatatccacatccatccatcaaacacggaagagagagaggaagggagggagggagaggagagattattttggaccagttccaccgcttaatttgcaggaccgccaccccccgcggcgccgacgatcacctcaggcgtgcgcggatatggggcgccgcggctcctacgaccgcctcgaggcgctctccctggagatcgagcgcaagctgcacaaggccctgatgtccaactcacagcgtcttcagatacttcagcaattgtttgctgacatcgcattgaaggtggatgatcgcgctcgagatgcaattatgagtgagagtgatgatggcattgctccagcagatgaacgggaggatggttggctatgcttctatgagattcttgccaatcattttgttagagtgcctgaaagtggcaggcgtatacttgagttgattgtgcaactctggagccagtccttcgcggccaacatatttgcacttcttttccagaaatggttgtttgaagcccctcttgatgaaaaagaaatatcgctacgatatagctctgctcttgttcaaggtgctacaaatgtattttggattgacatacagacaaatacaagacattttctctctttgtatcattatctccttgaggacgttgctctagtccctgaaagacttagtaaaatatcattacaggctggtagagaccttttccttctgctctctagattcatgttcttctatgatcaagcttcaaaagctaaaaattgagccagtactactacactacctctcccgcatgagcatacttcaagggttggaactgaggttgagtacaagcaccagactaaaggcctgcctctacagcttcacttctcctggtggccctacctacccaacacgggcggtgcggcacgcagcctggaacaccttggatttgctgttccctatcggtcgttacccgaggcacgtgatcagcctgttcttccggctgctgtatccgtggtactggccttcctcttgctggaacttcgtgatgacctgtgccatgaccgtgtactactacatcctgaacctgctggtgtcgtgttgggagaacatgaggcggcggcccagtcaccggagaacgcacggtgaatgaagacgcggcggcccatccagtggcaccttgtgttgttgttgttgttcatttttctttcctttgcgcgagtggtgtagtagttagtagcagcggcttatgtgttcgtcgcgaaacaacattccctgtataatataaactgctgtacttgttcagctgttgttcatataggaagagccgaatgaagaggaacagctggtaatggagggagagcgtgtgcgcgcatttctcgcttcgtttctggggcatttacttatctgcagcgtccttccaccattgatctccaaatccgtgaagggactggggatggggacgacagacgagctcgcattggcaaccgtatataaagttactgtcagtcccagcaatgttgagctgtgagtcacgaggggggagacttcgatgtctgtccagactccagaaggactgcctagtggtccttcttgctttgtatagatggaagttgagctgcctgctgctgctgctgctgctgtatgtttgcctgggacggttgc

SEQ ID NO: 10423 - DNA, 2839 bp, Zea Mays
tttgagtgctaaatgtaaggcaaactgcagcaggattttgttgctgtgttatgtacatgcacttactgaagtgcccttaacgactgtctttatgcaatatgcttatggggctacaagattggttttgatggattatgacaagtctagaagaagtaactccaagaagaggacacattccaattctgatgacggaaagagaaaacggttaaacactaggcatgatgacacatctatgttctctgagccaattgaaaccatctacaggatattgtgcccggtaaaaaagataggcagtgtcttgggaagaggtggtgacattgttaaggcccttagagaggaaactaaagccaagataagggttgctgattccattcctggtgcagatgagagagtaattatcatcttcaattaccaaaatgagcctgaaccgactgatgaagcagctgaagaaaaaaatagtgatggcttagggaacttcaaatcccattgctttgcccaagatgcgttattgaagatacatgataagattgtgtctgatgaaattcatgatgaagtcgccaatgatgaaaagtctgaaagtgcagatgatgtgactgctcgaattttggttcaaggcaatcaagttggctgccttctaggaaaaggtggctccattatacagcaactacgaagtaatactggtgctggaatccgtgtcttgccatctgaaaaccttccccagtgtgcacttaaaagtgatgaactggtgcagatatctggagcaccttcccttgtaagaaaagctctatatgaaatatctactcgtctccatcagcatcctcgtaaggaaaatagacctcttgaagaaataatagatgcaagcacacaaaggaaacgtgaatctccaacactacaacatgaatattcaatgttgccgcacctgcatagtgatcatacacctccaatacccctgcttgatccatatagaagtggaccacaatatcctgttactgaaactgaagagttctctatcagaattctgtgtgcttctgagctcattggttcagttattgggaaaagtggggccaatgttaggcgtgtagagcagcagactggtgctcgcattaaagttcaagagatcgacaaagatgcttctggagaaaggctgatcattatttcatctaatgagataccagctgaaccaatatccccagcaattgaggcactcattttgctccatgataaagttagtgcaccctctgagaaacaccattcaagtacaaggcttgttgtaccatcaagcaaagttggctgtattattggggaaggtggaaaagtgattactgacatgagaagacgaactggggctgaaattcgagtttactcaaaggcagataaaccaaaatacttgtcttttgatgatgaacttgtgcaggttgctgggcctccaactattgcaagaggagccctcacagaaattgcttcgaggcttagaactaggactttgagagatacaagtaccgccaataatcctccaccttttgccccttttgatgatcctcctgttgatatgcctagcagaaagttgtcactatatggagggcctgccactgatccaccgtatggaaggcctgccaatgatccactgtatggaaggcctgccattgatccaccattcggaagacctaccaatgatcgaccatatggaaggactgctgttgctcccccatttggaagacctgccaacgatccaccatatggaaggcctaccaacgatccaccatatggacgaccttccggtagtataccatatggaagaccaaacggaagtgcacctcgtgagccttccgatgcatatcctgtagactacttttctaaaagagaatatcctagtggaagtcctatgtttactagtaatgccccatcagctgcttatgagagatatgcagcacccacacgctttcctactagagaatttccctctgctttcagtcctggtgtagatcatatgcctcatcattcctatcgtgaccatgtgcctactgatagctactctagtaggggtacacagcaattaggcatcacaagaggtggaaattcagatgcttatgactataccgaggctgctggacaaattcatggacgtgaggattacagagaaccgacaagtgctaccggaaggttcttgagcactattgaactaaggattccaaatagttctttggggtctatcgtcggtgctggtggggtcaatctagcagagatccgtcaggtttctggtgcaagactgaggctacatgaggctcatgctggttcttctgagtctgtggtggagatccagggcacactggaccaagcaaaagctgcccagagcctcctgcaaggctttattagtgcaaacagccggcagcaacagcagccctattcttctcgcatgccactttacccaagctggggatagcttctggtctcatggtcgtgtcagaggaaaacagagtcagcagggtttgtcatgtggctgtagatctcggactgcagattagctgtagcgatgatgttgttgaaggaggctgtttaacagtgcaagcaagataacttatacttatgccttaggacaagtaatattgttttcctctgatgaaatacttggtaacgatctgtctctgtatttttatatttgattctgaatgctttgaaccctagtgttacaaaagctgctattttgaggtcagactacggaggccgaataattctgttatctgcagaattgggcaaaaaagcacatcttgctgaggttcctatgtcttcacccatatcgtttcatattttgtccagaatattggaaaccctaactctagaa

SEQ ID NO: 10424 - DNA, 3311 bp, Zea Mays
cgggcctcatgcctcatcccctaaccgaacaggagtagccacggactccgacactccgttcaacccccctgcctttttgctctcctgttcaccccttgtgcccgcgctctctcgtggcgacgacttgcgcgaccgccgccaacgccaggcacctaggtcttcgtcggtcctttcttcagagacgagcacccaacagggggctacaagattggttttgatggattatgacaagtctagaagaagtaactccaagaagaggacacattccaattctgatgacggaaagagaaaacggttaaacactaggcatgatgacacatctatgttctctgagccaattgaaaccatctacaggatattgtgcccggtaaaaaagataggcagtgtcttgggaagaggtggtgacattgttaaggcccttagagaggaaactaaagccaagataagggttgctgattccattcctggtgcagatgagagagtaattatcatcttcaattaccaaaatgagcctgaaccgactgatgaagcagctgaagaaaaaaatagtgatggcttagggaacttcaaatcccattgctttgcccaagatgcgttattgaagatacatgataagattgtgtctgatgaaattcatgatgaagtcgccaatgatgaaaagtctgaaagtgcagatgatgtgactgctcgaattttggttcaaggcaatcaagttggctgccttctaggaaaaggtggctccattatacagcaactacgaagtaatactggtgctggaatccgtgtcttgccatctgaaaaccttccccagtgtgcacttaaaagtgatgaactggtgcagatatctggagcaccttcccttgtaagaaaagctctatatgaaatatctactcgtctccatcagcatcctcgtaaggaaaatagacctcttgaagaaataatagatgcaagcacacaaaggaaacgtgaatctccaacactacaacatgaatattcaatgttgccgcacctgcatagtgatcatacacctccaatacccctgcttgatccatatagaagtggaccacaatatcctgttactgaaactgaagagttctctatcagaattctgtgtgcttctgagctcattggttcagttattgggaaaagtggggccaatgttaggcgtgtagagcagcagactggtgctcgcattaaagttcaagagatcgacaaagatgcttctggagaaaggctgatcattatttcatctaatgagataccagctgaaccaatatccccagcaattgaggcactcattttgctccatgataaagttagtgcaccctctgagaaacaccattcaagtacaaggcttgttgtaccatcaagcaaagttggctgtattattggggaaggtggaaaagtgattactgacatgagaagacgaactggggctgaaattcgagtttactcaaaggcagataaaccaaaatacttgtcttttgatgatgaacttgtgcagctttcaggttgctgggcctccaactattgcaagaggagccctcacagaaattgcttcgaggcttagaactaggactttgagagatacaagtaccgccaataatcctccaccttttgccccttttgatgatcctcctgttgatatgcctagcagaaagttgtcactatatggagggcctgccactgatccaccgtatggaaggcctgccaatgatccactgtatggaaggcctgccattgatccaccattcggaagacctaccaatgatcgaccatatggaaggactgctgttgctcccccatttggaagacctgccaacgatccaccatatggaaggcctaccaacgatccaccatatggacgaccttccggtagtataccatatggaagaccaaacggaagtgcacctcgtgagccttccgatgcatatcctgtagactacttttctaaaagagaatatcctagtggaagtcctatgtttactagtaatgccccatcagctgcttatgagagatatgcagcacccacacgctttcctactagagaatttccctctgctttcagtcctggtgtagatcatatgcctcatcattcctatcgtgaccatgtgcctactgatagctactctagtaggggtacacagcaattaggcatcacaagaggtggaaattcagatgcttatgactataccgaggtacatccttgacgtgagcttccctcttttgcaaaaggccatcacctaaatttttcattagaagcttgagactttacacatgcctgctccattgcccctgttctgttatgttctgtattaggtggtactcctaaatattgcaaaaaagtcatatgttggtgtcttagctgtcacttctgtggcagcaatgttcaccctataatgtggtcacatggtgcaactcttttcatttgttgtcactcacaacttggttcaatatatatttggcagctgggatgtactctgctgctcttggctttaaccaatttttctttattttgtggcctatcagaaaatctcaagttctgtacatatttaaattttatcattgcacaggctgctggacaaattcatggacgtgaggattacagagaaccgacaagtgctaccggaaggttcttgagcactattgaactaaggattccaaatagttctttggggtctatcgtcggtgctggtggggtcaatctagcagagatccgtcaggtttctggtgcaagactgaggctacatgaggctcatgctggttcttctgagtctgtggtggagatccagggcacactggaccaagcaaaagctgcccagagcctcctgcaaggctttattagtgcaaacagccggcagcaacagcagccctattcttctcgcatgccactttacccaagctggggatagcttctggtctcatggtcgtgtcagaggaaaacagagtcagcagggtttgtcatgtggctgtagatctcggactgcagattagctgtagcgatgatgttgttgaaggaggctgtttaacagtgcaagcaagataacttatacttatgccttaggacaagtaatattgttttcctctgatgaaatacttggtaacgatctgtctctgtatttttatatttgattctgaatgctttgaaccctagtgttacaaaagctgctattttgaggtcagactacggaggccgaataattctgttatctgcagaattgggcaaaaaagcacatcttgctgaggttcctatgtcttcacccatatcgtttcatattttgtccagaatattggaaaccctaactctagaa

SEQ ID NO: 10425 - DNA, 1114 bp, Zea Mays
acaccaccaccaccggcagcaagaaaaaacattctttgtcctcttctcctccgctccccatttctcttgctagggtttctacccctccatatcctcgctccacggtcatggcgaagacgaagcagggaaataaggacgtggattcgtacaccatcggcggcaccaacaaggtcgtctatgtgggagactgcgtgctgatgcgggcgtcggactcggacaaccagccgtatgtggcgcgggtggagaagatggagggcgacgggcgtggcagcgtgcgggtgcaggtgcggtggtactaccgccccgaggagtccaagggcggccgccggcagttccacggcgccaaggagctattcctctccgaccatttcgacctgcagagcgcccacacaattgaggggaagtgtgttgtccactctttcaagaactataccaggcttgacaatgttgggcctgaggacttcttctgccgattcgagtacaaggcggccaccggttcgttcacccctgaccgcgtggcagtgtattgcaaatgtgagatgccgtacaaccccgatgacctcatggtgcagtgcgatgcttgcaagcactggccaaaaagctagatcactttgtttgctcagactgtttcaaagaaaatggttcaaagagactttcaaatgcatatgccacttcaccaaattttgagcctaaggctgaaccaaaaaggcagaggaggtaacaaactgtgagtggtaacatccatatgggtaaggggagatgtgctgcttctgtggtgaatcagcccttgccctttgctgtggtgagagcagaggtgtacagtgtactagaccagtgtttgctgttaggggaacgggttttgttcgatgtgtagaccgtgtggcatggcatgcagttgttggtagaggtcaaaagaacagtcgttgtgttcacttggtcagcttagcgccttagcccttgttaatgtgttaatgcactgtgttaactcagcgagccccccttgtggctgataatgcaagtcatgcagttgttgatacaaatgttgctgcggccatttcatcgactgtcattgttcagtggtactggagtttcggttttgccagctcagtgcagg

SEQ ID NO: 10426 - DNA, 770 bp, Zea Mays
ctgcggtcaattcgcaacaggtatgcctatctaaagggttaggcgcacccatcagatcagttgttgttggttcagaggccttcatcgacaaggctagaattcttaggaagaccctaggcggtgggatgagacaggttggatttctttgtgctgctgcttatgttgctgttcgtgacaccgtgggaaagcttgcggatgatcacaggaaggctaaagccttgagggcctgacgaaaattaaacagttcacggtggattcatcttcggtcgagaccaatatggtgttcttcgatatcgtggatccacacatttcaccgagcaagctatgccaagtcttggaacaacgcaatgttcttgcaatgccagcaagttcaaaaagtcgctatttcgcaagatcgtcgtggccctattgggaacggagatgctcttaatgaagtaggaggaccgaccaatccaactagcaacagcaggcagggagtggatgcgcctgctagaagagtgctagctccgcgcatacgctcgctcgacaaacgtgtgttgttaactattgtatatagtgttataattactgtcctttattcttgatgtttgttttgtagttgaaactcacattgttttttcatttccatctcgattttgtatgccgtgaccacgaaagactaaatgttttcttgcggtttctaaaaatatagctctctattgttgtgattgtgtgccgtcgcatcgcacgggcaatgacctagttctaaatgaattatgtttgtatgctgc

SEQ ID NO: 10427 - DNA, 1633 bp, Zea Mays
acatctgtaaagacattttcactagcccaacttcagaaggccacagatggttttgattcaagaagagttttgggtcaagggggctttgggcgtgtctaccatgggacgatagaggatggaaacgaaattgctgttaaattgcttacaagggaggacaggagtggtgaccgtgagtttattgcagaagtggaaatgctcagtcgattgcaccaccggaatcttgtcaaattgattggtatttgcattgagcggagtaaaagatgtcttgtgtatgagctcatacgaaacggaagtgtggaatcccatcttcatggcgctgacaaggctaagggtaagctgaactgggatgttaggatgaaaattgctcttggcgctgctcgaggcttagcatatctgcatgaagattcaaaccctcatgtcatacaccgtgacttcaaggccagcaatatattattagaggaagatttcactcctaaagtgaccgattttggtttagcaagggaagcatccaatgcgactcaacctatatctaccaggttatgttgctccagaatatgcaatgacgggccatcttcttgttaagagcgatgtctacagttatggggttgtcttgctggaacttatatcaggaaggaagcctgtaaacatctctgagtccaaggatcctgagaaccttgtaacttgggcccgtcctctgctaagccataaggagggcctggagaagttaattgatccgtctctggatggaaattttaacttcgacaatgtagcgaaggtggcatccatcgcttccatgtgtgtgcacacagatccatcgcagaggccgttcatgggtgaagttgtccaggcactgaagctgatctacaatgatccagatgaggcttgcgacgattcctacagtccaaggaattcatctgaccaagacggtgactacgaaggagacctggtctttgagagtggaagctggggctttggggcctctgggtgtctagactaccggaattccttaccgtttgtcactatggactacagttctggccgaatagaagggccgcacgaccctcgcgcggcattgtcagcgggatcccatgcccagtcaccagtgctgcagaatagatcaggccccttgcggatgaagaagaagctggcctccttctaccgctctagaggcagcattagtgagcatgggcacctgccacgccattgatcagtcagtgaactagtgttaggctgttagcttcggttgactctgggattgaggctggcgggggttgtcattacctgattcgtgcctcatgttagtgtacagttcgtggtgacccttcacccttgggtatgggtgttttctctctctctttgccttctgcttcttccccggaagcaatgaggatggggttggcaggtgctctctaattttcgcaaattgcggttcatttctcatgcatctgattggtttcttgccggagttctgggcatcatgttgttgtgactaggtggttgtactggatgcagttcgttgtaaacagacagtgtcagggatctacctcgcgttggagaggtgaactatacagccggctcagttcctcaaatgtcaggtggtacctgtgttaatattcttttggttcttactttg

SEQ ID NO: 10428 - DNA, 1599 bp, Zea Mays
agttctttgctttgcccttcctccgcccccttcctccccccgcgctgcctgccgtaggtacgggaagggaaaaaagtcggcgccaaatctccgcatccattcgcacgccgcgattcttgtgcgcgatccgccgcgcgatgatgatcccgtggggcggcgtggggtgttgcctcagcgctgcggcgctgtatctcctcgggaggagcagcggaagggatgcggaggtgctgcggtcggtggcgagggctggcagcatgaaggatttagctgctatcttggacactgcaagtaaagtcctaccacttgtagttgccgtctctgggagagttggttcagacacaccacttatatgccaacaaagcggcatgagaggtgtgatcgttgaggaaacggcagaacaacacttcttgaagcacaacgatgctggatcctggattcaagattctgcagttatgctttctgttagcaaagaggttccatggtatctgtgaggtttttgaggagtcagggaggacacttgtacgtggaactctagattatttacaagggttgaagatgctgggagtaaaacgaactgaaagggttcttccaactggaatctcattgacagttgttggtgaggctattaaagatgatgttggaactattagaattcagcgaccgcataaaggacccttctatgtatcaccaaaaagcatcgatcaacttattatgaatcttggaaaatgggccaagttataccgccttgcttcaatgggctttgcaacatttggtgccttccttcttgcaaagcgtgcaatacaacattttctagaaagaaagcgccggcatgaactgcaaaaaagggttcttaatgcagcagcacaaaggcaagctagagaagctgaagggagcattggttcatcggacacagagcctaacagtaaaaaagaccaattagtgttggacatatgtgtcatatgccttgagcaagagtacaatgctgtttttgtgccgtgcggtcacatgtgttgctgtatggcatgctcttcacatttgacaaactgcccgctttgccggagaagaattgaccaagctgtcagaacattccgccattgacggtgataccacgtgcactgcttttgaaaccagttggctattggaagtgctggctcctgtcaaccaacgatatgaactgcaaaactgggtcgtagcagcttcttcatggagtttgcttttcgaacagaacagcgagtgatgcaagttgcaagctcatgattggcagttaagaaagataccctactgagatagtgccaatgggtgctcttgcatgtaatgtactactactacaactgtgtacaggacacttgtgtaaatgcacataggttagcagcttgcttcttgactaacacctaatgggcatttatgttgtgctaaccgaatgacaaaattagctcgtttagttgtgataatcgttttttctagtgagtggggaatgatacggatatctccgttcttttgtgctcacaggatcataagaaacagaaaagatttgtaacatgttctatattttactgctcattttgtaacctgaatgtgaggacaacatgttggcgcatt

SEQ ID NO: 10429 - DNA, 1963 bp, Zea Mays
ccgcgaccctgcgtgcccccctccctccctcagtccctctctctcgctctcggcgacgactgggcgaccgccgccgccgctgcgccgcccttgtccaggtgcccaggtcttcgcaggcgccttcgccaggtcttcgacgattcagggaatataagtaaaatgaggccagttttttgtgggaaccttgactatgatgttcgcatctcagaggttgagcgcctttttgggaagtatggaagggtggaacgagtggatctaaagacagagattgtcaatcttcacccatgcctggtgcaaagaagctgcaaaaggatcaagttgttacttcatccgttgtgaagccagaggagtttcaggaaaatcagattatgtttatgttttactgttataagtcattggacaagtgtatatcaggataaattagaagaaaaaagttctttcttcaaatttaggtccagtactcaattatttctttgccgcagggatatcatggagcatatgtgctcttcctggttgatggactggctctacctttactgcctctgcctgtgccccatctcatgccttgtccatctccaggagttcacaagtccaccgtggcatctgttcacatggaaacgaccacctcgtgactgatgtcttacttttacgatcaacattgcatcctcctcccccgcctcatcaccatttcctcgccaatccaaccatgccaatctcatggccggctggagagtggagagaagtggaggttgcaccaccaattctttgatgtgccacgaatgtttggattgttgtactctactactctgacatcatttagttcaacataaacaagggtttgcatttgtctacatggaagatgaacgcgatgctgaagatgctatcagtagacttgatggaattgattttggcagaaaaggaaggaggatcagggttgagtggacaaaggaggatcgcactgttggccgaaaaagcagctcaaggaggtctccaaccaatacaaaaccgaccaaaaccttgtttgtgatcaactttgacccgatcaacacaagaatccgagatctggagaggcacttcgataaatatggcagggtcgcaaatgtaagaatcaaaaagaactttgcctttatccagtttgagatacaggaggatgctacaagagcattggagggtactaatggaagccatttcatggacagggtgatctctgttgagtatgcacttcgtgatgacgatgaaaaaggtgaaagagggaacgggtacagcccagacaggagaggtcgtgaaagatccccaggtagaaggcgttctcctagtccctacggtagaggacgggagagaggtagcccagattacgggagaagcaaggagagggggagcccagactatggcaggggaggacgcagccctgataatggcaggggagtaagcccagctggtggtggcagaggcgatcatgccaggggtggagggcgcagtcctgactatgatcgccagcgccgggaagctagtcctccaggttatgacaggtcccccagccgctcacctgggagggaggcgagagagtagaagcagcgttccattccatgcctgtgttcaagcatcagatgaatgtgcaagttggtaatgttagccagcaggaaacttgtctactatgcgcgttagctcgtgtttgactttccacccatttcagtatgaagcgacctcagaatgtaactcatgtagtagtattttttcaatggtagctttcagcactggtttgaacctgttgttggctttattttctgagtaaaatgcaccactcgaactttacgcattgtgtcacttgggtactgaactcagaaaaccagttaaacggatcatgaaactttgttggcccatgtaaaaccattcaaagtcagttctataaaccggtagccacttttgtcatttgggttctcgaactttcattaggatgttctaa

SEQ ID NO: 10430 - DNA, 3069 bp, Zea Mays
ttcaatttctcactaaagcagatgtgcttcttggaataagttatggtatacaatcacttgaggagagtgctgaattgctgagagagagatgtttgaagttccataaaggttgccgtaagtatactgaaggactaggggaagcatacgatggagatattgcatttgccagctcacttgaaacatttggaggaggccacaatgatccaatgagtgtcgcttttggtgggcctgtaatgaccaaatttacaattgccttaagagaaattggaacatacaaggaagtcctgcgctcccaggttgagcacatgttaaatgacagattactgaattttgttgacattgatttgcatgatgtgaaggatgctcataagcgctttgacaaggctagcctctcatatgaccagattcgtgaaaagtacctatcattgaagaaaggtacccgaccggacataacaacagcaattgaagatgagcttcacagtgctagatcttcatttgagcaagctcgtttcaacctggtcacttcactttcccatgtcgaggcaaagaagagatttgaatttttggaggctgttagtgcgacaatggattcacatcttcgttattttaaacaaggatatgaactattgcatcaaatggagccatatattaatcagattcttgcttatgcacagcaatcacgagaaagagcaaacaaggaacaagcttctctcgtagagaggatgcatgagtacaaaaggcagatagaccgggaaagtcggtcttctataaatggtttgaatgattcttataatggtgatcgaatgcagacaattggcagaagttcacataaacagatcgaggcagttatgcagtcaacttcaaaaggcaaggtagagaccatccgtcaaggttatctttcgaaaagatcttcaaacttgagagccgactggaaaagaaggttcttcgtacttgatagtcgaggaatgctgtactactatcgaaaacaaattactcggccacctgctggttgttccatgcaaagaaacgttaacccccctgaacatggttctgggttgttgagcagattgttctcttctcattaccatatacatgatgaaaagtctgtcgcacgtcatactgtaaatttgttgacatcgaccattaaagttgatgctgagcaatcagatttgaggttctgtttcagaattatttcacccacaaagatctacacattgcaggcagagagtgcagtagatcagatggactggattgaaaagataactggtgttattgcctctttactgagctcacaatcgccagaacagtgttttatgtcaagccctaagggcagtggtcatgataggagtaccagtgatggaagctcctttacaagttcagtggaatttgaaccttccgtaatcgatgatttagtactggagaagtactctggaaatgggcagcatgatgtaataagaggcacacatcatcacagaaccagcatgaaacctgaaaaaccaattgacttgcttaggaaagttgatggcaataatatgtgtgctgactgtggtgctttggaacctgattgggcatcattaaaccttggcgcacttctatgcatagagtgttctggggtgcaccgaaatcttggagtgcatatatcaaaggttagatctctgacacttgatgtcagagtttgggagccatcagtaatcaatctctttcagtcattaggcaacatgtttgtcaacaatatttgggaagacatgttgccagatgataattcaagtgctgatggatcagacacatcacagtacctctctgttagcaagcctaaacacaaagatgtattctctgccaaggagaagtttattcatgccaagtatgtagacaaagagtttatacggaagcgtagcatggatgagaatcaattagctgagcagatgtggaatagtgtagctgcaaatgacaagaaaacagcatacagtctcattgtgagatcacgtgccaatgtaaatttagtttacggagagatgccttctagcccatttttgactcttggaaaggcacttcagcaagagcaaccggtttcaccgcctgatggaagtcctaaatttttcgattgcaattcacatgacaagatttctcctcgggagcccctttcccctgctagcacgagttcacgcacagatgacatggaggacggttgcgaaggtctttccttgctccatcttgcatgccgtgttgcagacgttgggatggttgaattacttttgcagtatggtgctagtgtaaatatgaatgattctaggggtcggacaccccttcatcactgcattttgaaaggaagacatcggcatgcaaagcttctcctctccagaggggctgattcacaagccatggatcgagatggtaggacagcattgcagtatgcaatcgatggtggaacaagcgacgaagacattcttgcattgttagaggatcatagtagatgatcttgcaaccacaccttcagtaaattgaggttctcttggtgtggtcaactcaactaagaccttgttcggttagctctcaatccatgtggattgagtgtgattgggtgggttcaaatcccaaacaagtcaaagttcttctaatttttttccaatcctatccaatccatgtataatgggaataaccgaacaagacctaacagggatccagccccgctcggtcctagcttgtcgtgcagacaatccgaattcatggcatgaaagcaacctatgtacatgtcgttctagggcttcagtatcatgatgcgcatgttgtttctttccccgccgtttgcttgtttagcatcagtggtccttatttagtcatctggcaaacggtttggttttgtttgctgcaggtgatgcatagtaagcttgtaaatggagttgcttctcttaattttctagtcatcttttatcatgaagtagatgtggcattctaatgaaagatggttgtacatattgagatgtgctgttgtggcatatatgaaatattggcatggtgtggatggtatatacgaaagttgtgcttgcttaatcagaatatattgcattgttg

SEQ ID NO: 10431 - DNA, 1948 bp, Zea Mays
ccgggccttcttttatcgtgtcggccacgccgcctcgcgtgcgcgtcaaccattccctcggacgccgtgccgcgtggtgtcgtgtcgcctattcttcctcttgcaccgcagtgttcttgccgccggcaactcggctcggctcaacaagccacgcaaccttccgccgtcgagactcgtgaggcgtcgtcgcccctgccctctctgccgacaggggacagggtggagagttgcccgggctcgggttgactcgtgtgggcgcctctttcacgcgttcttgtgtgctattcattgattgccatgtcaacacgtagggaggttgtcttgtatcacccattgcctgcaccaggagtgacaaacaacctcaaggatgggatccagtcaaaagttatggaaacggttggcaatgcaatcaactcattcgatccaaatgcgttgcctcggcatatagaaggggcattgggaacagctggaaacctcattaactcatttgagccaaaatggtctgggaaaaatgagtttgatttaaatggggaagctgatttccttgatggatatgaatgccctgatgaatattggggctctgcacctgtgaaggcgcacaaaccagttaacattaagaacctgctgggtggcgttattgcgataatcggtcgcaatttgggaaatactgaagctgaacagccaaaggacactaagaccagtgtctcattccttgggtcggctgatgatggtaacacattcttgcattcctcagtctacatgccaagtgctccaccagtacttgatgaagaagccttaaattacaacatttatagggctgtactggaagcagagccaccagaatggcttcctgacagttatgctagtgcgtgtatgcagtgcgctgctctttttactgcccttacacgtggaaggcatcattgtcgattctgtggagggatattttgcagggcatgctcaaagggacgatcgctgttgcctgccaagttccgtgagcggaatccgcaaagagtctgtgatgcttgttatgataggcttgatccattgcagaacttattgattaattctgtcagcaatgcctcacaaactgcaaagcatgatgtcatggattggacttgtgcaagagggtggttaaattttcccattggattaacaatggagcatgagatatacaaggcagcgaataccttgacaagttacagccaggtggcaagaataaaccctgagaagtctattccccatgcagttcttagtggagcaagtgggcttgccatattgacagttgtaaaagctggtgctattcttacttacaaacttggaactggcctagtagttgctcgaagatctgatggatcatggtctgcaccatctgctatactttctgctggttttggatggggagcacaggttggtggtgagcttatggatttcatcatagtgcttcgtggcccagaagctgtccaaactttctgcagtcgaatgcatttttcacttggggcaggtgtaagtgctgcagcaggacctgtgggcagagtagcagaagcagacctgagagctggtgataaaggatcaggagtttgctatacatacagctgcagcaaaggtgcatttattggtgtctcattagaagggaatctagttgccacacggatggatgctaatctgcggttttatggtgacccatatctaacaaccagcgacattctcacggggaatgtggaacagccaaatgctgccaaatttctttacactgcactggataatctatactcagggctggattggtagtgtacatatgtactttgaatttttttttcgattgtaaaagttgtatatatccacaaaatgctttcgtttgttcggcgtggcaaaataattaatgaaatgctctgtattaatgaacttccgtgcgactgtccgttgatgatgatttaatatgatgttgatg

SEQ ID NO: 10432 - DNA, 1355 bp, Zea Mays
cccagttcccacggtttcccccacgacgccggcgatgggcaagcggaaacagcgcggcggcggcgacggagaacccgccgcggaaggcggtgctggcggaggacacagcccctccaccgtgttcgtttccaacctcccctacaccttcaagtcctccgatctcgaggcggtgtttagcgaggtcggcccagtgcggcgctgctttatggtcgcggagaaagggtcggagaagagtcgaggcttcgggttcgtgcaatttgcaactgttcaagatgctgatcgagctcttcaacaaaagaatggatctcctgttgctggtaggaaaatcagagttaagctagcaatgaatcgtgctccactgaaggaacgtttgcaaaaggggaatatgcaagtgaaggactctgatgcaaaagatgaagcagacgaaatttctcctgctgaaaagcataaggggaaatctcataaaacagatccagagcaactgcatttgttgtcaaatgatgctaaggtatcaaaggaagctcccattggcgactccgaaaaagtgaaaaattctgaaaagcaaagggttgcaaagacggtgatttttggtggcctgcaagactccgccatggcaaccgaggttttccgtcaagctcgagagattggttcagttgtatctgtaaactatccacttcccaaagaggaaatgagattcaatggacttgctcgagatggatgcacatcagatatggcagctgtactctttgcaagtgtcaaatcagcttgggattctgttgtccaactgcataataaggaagtcaagggagctactgtttgggctcgtcaacttggcggagagggctcaaagatcagaaaatggagagcgattgtcaggaacctgccattcaagagaaggagatcgtggatatgtttagttcagcagggtttgtctgggatgtgacaattccacataagtctgatgaggggatatcaaaaggctttgcttttgtatctttcacacggaagcaagatgcagaaaatgctataaaaaatattaatggaaaagatgttgcaaagagaccagtggctgttgattgggctgttccgaaaaaagtctacactgttgctgcaaaagttgatgctaaggataatgggaacagggttatcttctgttaatttaaaaataatttagtcttattcctgattgtctaaacagatgttcggtgtaggattttttgtgtcattttgttagactacccgtctagggtttgtgctattccccgtgtaatgaccgttatacccctgtgtaatgggccttggcccagttactctctctatttaataccactcccaacccctgattagggtatggg

SEQ ID NO: 10433 - DNA, 1412 bp, Zea Mays
ccaagcccacgtgacaacacccctcgtattctcaactaaaaccctagccccacagccccgactcccgacagttccttcggtctcatcgcaactgcgaagctccccccagttcccacggtttcccccacgacgccggcgatgggcaagcggaaacagcgcggcggcggcgacggagaacccgccgcggaaggcggtgctggcggaggacacagcccctccaccctcgaggcggtgtttagcgaggtcggcccagtgcggcgctgctttatggtcgcggagaaagggtcggagaagagtcgaggcttcggtgcaactgttcaagatgctgatcgagctcttcaacaaaagaatggatctcctgttgctggtaggaaaatcagagttaagctagcaatgaatcgtgctccactgaaggaacgtttgcaaaaggggaatatgcaagtgaaggactctgatgcaaaagatgaagcagacgaaatttctcctgctgaaaagcataaggggaaatctcataaaacagatccagagcaactgcatttgttgtcaaatgatgctaaggtatcaaaggaagctcccattggcgactccgaaaaagtgaaaaattctgaaaagcaaagggttgcaaagacggtgatttttggtggcctgcaagactccgccatggcaaccgaggttttccgtcaagctcgagagattggttcagttgtatctgtaaactatccacttcccaaagaggaaatgagattcaatggacttgctcgagatggatgcacatcagatatggcagctgtactctttgcaagtgtcaaatcagcttgggattctgttgtccaactgcataataaggaagtcaagggagctactgtttgggctcgtcaacttggcggagagggctcaaagatcagaaaatggagagcgattgtcaggaacctgccattcaagattacagagaaggagatcgtggatatgtttagttcagcagggtttgtctgggatgtgacaattccacataagtctgatgaggggatatcaaaaggctttgcttttgtatctttcacacggaagcaagatgcagaaaatgctataaaaaatattaatggaaaagatgttgcaaagagaccagtggctgttgattgggctgttccgaaaaaagtctacactgttgctgcaaaagttgatgctaaggataatgggaacagggttatcttctgttaatttaaaaataatttagtcttattcctgattgtctaaacagatgttcggtgtaggattttttgtgtcattttgttagactacccgtctagggtttgtgctattccccgtgtaatgaccgttatacccctgtgtaatgggccttggcccagttactctctctatttaataccactcccaacccctgattagggtatggg

SEQ ID NO: 10434 - DNA, 1514 bp, Zea Mays
gtttacaccgagggttctctctttgtctgttcactgttctactgggacgaccccaaatccccaaatcgaaaggggccgtccggctcagggtttctcgacggctccttgccctctccgccatggacgcacagcgagccctccttgacgagctcatgggcacagctcgcaacctaacggaggaggagaagaaggggcacaaagagctgaagtgggacgatccggacgtgtgcggcccttacatggttcggttctgtcctcacgaccttttcgtcaacaccaagagcaatatcgggccgtgctcgaggatccacgatccgaagctcaaggaaagctttgagaagtctcctaggcacgatacttatatgcaaaggtttgaggcagagcttgcacaacaatgtgagaaattggtaatggacttagatagaaagataaggcgtggtcgagaaaggctggctcacgattctgctgtgccaatgccaatccctggaaaattagctgagctgctttcagtgcgaaaagaacaggtgaagaagctgctggagcaaattgaggagcttggtgaggctggtaaagtggatgaagctgaggcacttatgagaagggttgacattttaaacgctgagaagacagctttagctaacgaagcagacaacaaagtagctatgcttgagaagaagatggaactttgtgaaacatgtggatcattcttagttgctgatgatgctcttgagagaacgcagtcccatgtgactgggaaacaacacattggttatggcatggttagggatttcctggcagaatacaaggcagcaaaagagaagacaaaagaggaagagcggcttgcaagggagcagaaagcagaggagcatcggaaacagaggggaaaagagtatgatagtgggggcagggatagagataccagaagggagaggtctggggagcgtgactttgaccgtgatcgtcagtatgagcgaagcagaggaagagatagggtttatgattacagggacagaggatcagaacaccgaagcaatcgctacagaaatgggagggattctgaaagaggtggacacagatacaggagtggtggtatgacaaatgaccgagggagaatgaggagcagatcacgttctccaaccaggcatggctatggaagatctagaagtccagatcattagctgcctagctggacatttagatagttttattcacagttgggactcatgagctctgttggaaccctacagtctccctattttgcatggggaaaaattcccagttaaatttagtaaggccggtactggatttcatatatggatgatgatgtttacagcttatagcagagttttgagatattccgtatgattggttgtctgcaccgtctcattttggatcactccatatcctgtcccgcatcgcgcgagcctgcacctctgcgagcagccatctaatcagccggattatgttttggatcaattggcaccacaatcttgttggagcagcgtctactgaag

SEQ ID NO: 10435 - DNA, 1744 bp, Zea Mays
gtttacaccgagggttctctctttgtctgttcactgttctactgggacgaccccaaatccccaaatcgaaaggggccgtccggctcagggtttctcgacggctccttgccctctccgccatggacgcacagcgagccctccttgacgagctcatgggcacagctcgcaacctaacggaggaggagaagaaggggcacaaagagctgaagtgggacgatccggacgtgtgcggcccttacatggttcggttctgtcctcacgaccttttcgtcaacaccaagagcaatatcgggccgtgctcgaggatccacgatccgaagctcaaggaaagctttgagaagtctcctaggcacgatacttatatgcaaaggtttgaggcagagcttgcacaacaatgtgagaaattggtaatggacttagatagaaagataaggcgtggtcgagaaaggctggctcacgattctgctgtgccaatgccaatccctggaaaattagctgagctgctttcagtgcgaaaagaacaggtgaagaagctgctggagcaaattgaggagcttggtgaggctggtaaagtggatgaagctgaggcacttatgagaagggttgacattttaaacgctgagaagacagctttagctaacgaagcagacaacaaagtagctatgcttgagaagaagatggaactttgtgaaacatgtggatcattcttagttgctgatgatgctcttgagagaacgcagtcccatgtgactgggaaacaacacattggttatggcatggttagggatttcctggcagaatacaagcaaaagagaagacaaaagaggaagagcggcttgcaagggagcagaaagcagaggagcatcggaaacagaggggaaaagagtatgatagtgggggcagggatagagataccagaagggagaggtctggggagcgtgactttgaccgtgatcgtcagtatgagcgaagcagaggaagagatagggtttatgattacagggacagaggatcagaacaccgaagcaatcgctacagaaatgggagggattctgaaagaggtggacacagatacaggagtggtggtatgacaaatgaccgagggagaatgaggagcagatcacgttctccaaccaggcatggctatggaagatctagaagtccagatcattagctgcctagctggacatttagatagttttattcacagttgggactcatgaggtagacagttcccttctgctatttattactgtacaatgggttttattgaagtgtcgcacttttttaagtctctgatctgttgtaacagctctgttggaaccctacagtctccctattttgcatggggaaaaattcccaggtcggtatcgattgccatccccacattttttgtgtttctggcattctatatgcgctaaagctttgtttcaatatttggaatcggaagttaaatttagtaaggccggtactggatttcatatatggatgatgatgtttacagcttatagcagtgtacaagagatcaagctttggtttgtagacaatggtgccctggctagaaccgcgaggattgggcctatttcctgactgtctagttattgtctcagaagtctggtttagataaggttctgtttccgcggcaaactattagatacctttgcagttgcggagttctgtaattgatgtattatttatgcagatagtgtagtctaactatgcaaactaatatatgatctgtttc

SEQ ID NO: 10436 - DNA, 2108 bp, Zea Mays
cacgcccgctcatctcaaagatctcagccgccgtcgtctccgtcgctccgccgcacctccccccatcaccgcctctctaaaaccctaatccctagccgccatggcggctgttgcggcggccacctcgcacctcctacgccaccaccgcaacccccaccttctcctcctccgcgcagcgatctcatcctcccgtgctttgccccagcagccggagctgtcccccgacccgaccgccggcacccccgacctcgccggcgcggccccactccctccaaaccccagcacggggagccccttctacacccagaactggcgcaacccagccgccgccaacccgccctcctcgcttctgcccaccgtcgtcgccggcagccccttcggggcgcagcacttcatggccgccttctacgatgcacccgacgtcacggggctcaaggagacgttcgccaagtatatggcggagcagcggtgggaagacatgaagcatctgttcgaccactgggtgcgctccctcgacgccgccacggggaagcccaaccaccccgacgtcgacctcttcaatcactacctccgcgccaacctcatgaccagggccctgccgcacgagatgctcgatctcgctgaccacatgctcgagttcgagctccaacccaacgctgcatcgtacaacctcgtgctcaagagcatggtcgccagccaggagaccgagggcgccgagaagctcattgaacggatgctgcaaacaggaacatttccagacgatgaatcctacaatttggttgtaggcctgcttatcagacagaacctcgtcgattcatctctgaagtatttggatctgatgcttaaatcgggctacacgttatcactaactgttttcacagattatatccgagcatgtatgagatctgggaggttggacacgttgacatcaattatagagaaatgcaagacaactgataagaacaaagtcttgtgtccggaatggacttggtgcattgacatagcagatgctgcatttgaagctaacaacagcaaattagctctttttgctttggaatatcttgcaagatggattgctcgtggtgagaatgttaaacctcctgttcagctgtcagttaatgaaggtcttgtaatatcagctctgagtgctgctggcagaacttataatactgacctcttgaatgctgcttggtcgctattacggaaatccctgcgccagaaaagggcacccaccccagagacatatcttgccaagatctatgctcattcatcaattggccagcttcaaagggcttttggtacattgcgtgaatttgaaaatgcctatgggaactctgaggacattgatttagagctcttctcaccatttacttctttgcatcctcttgttgttgcttgctgcaaagatggctttagcacattggattcggaaaaatttgacctcactccagacattcattcatacaatgctcttctgtgtgcatttgggaagttgaaacagacaggagaagcatgtaatgtgttccagcatgtattaactcttggtgttaagccaaatgcaacgacatactccttgcttgtcgatgcccatcttgcaaacaaagatccaaaagctgctcttgccataattgatgagatggttgatgctggcttcactccttccaaggataccctcaggaaggttcgaagacggtgctctcgtgaatcagacttcgacagtgacgagaaagtccagtccctggcaaagcagttcaactaccgaatgggtggtgagaaccgtagagagatgctttatagcatagaatacaatcctgtgtactgaaacattgctactgagtttgctagccattgggagagcacagacattgcagcttgtaaattacttggatgtaccaggattcttaagcaaattttcagtttctcgatcatcatttgtgctcgcagggttcgttttaggacttgctaataagatgacactttgagtctgtttggttgtcaggaccagcatatcctggtcaaagcccagatgcaggctgggcatagcctgcatgcattcgtgcaaatcaaaacaactctacttgtttggttgtttgtccacaattaaccag

SEQ ID NO: 10437 - DNA, 1782 bp, Zea Mays
agtttttcgtttgggaggagagggagggaaggaaggaatcagattggcgcagatgaggctggagggagaagggaggccagatcagttcaccagtcgacgaagcaagcggcaggaggaggcggactagggagtggttggcgcgtcgccgtcgcgagccagtgagctgcctaggagcgctcctttttagtcgctgcgacgcccgcgcctgcgtaggcgccgtgtgctcctgccggccgcactgagcgtggcgagctctgggccagactcgagcgatcttatcagaggacacagattatcagctgattgtcacggaagatgtcgctagccaagaaagaagaggtttgcagtcaccgacttgtaccgcgcttggacgagcctgcggttggtgtgcctattaagaagaggccatttttcttgtctgaccgatcggttgcatctgccataccgctctcgacaaagcccccatctccaacgaatacaatgcctgttgctgctacagggtcaggctgccgcgaggaacccttcttcaacatcgctaactcagacagaaaagtcatcaccaaaggaaggatgagaaactgggccagagtcgttcggaacactacaataacgttcctgttgcaaatgaaatcaatgcttctgggaatagtattgttgggagattgcctaacttggatctgaatatacctccggacccagctgattcacttgaaggtttgcctaaaatgcatgaaagtgggagtgggttctatcatcatagaacaattcaacatcagaaagctcaggtgaccccagccgcagccatttctacgataaacagtgggataggtcgaaatatgtgcagtactctgaacatgtctaattcatatgggctttctcataagtctggaccagctgatgttaccttagatttacaacttaaaccaccaactagacctgagctagggataaactggaaaggacttgctcctgctccagaactgagtctctctctatttggtaagcctatggacgagcctgagtttcctagcacccccaatgccttatttcattctggaactgctggaagttccaaaaaggtcagtggggaggctgctgctacacttgggtcagataaggcaccagttgagaagattgtaacacctgttccctgcaatgtaaatcctctgaatactacatcagcaactgtttctggaattgatcagctgccatctaataatttggtgaagaaagaacctgaagaaatatcccagcagcatattattgacggcgctaaaaagccaaatccattagaacgacaaagtgttggacaagttatcggttgtgctgaatctgaaaagacggacagtgcaccccaaggtgctcgtaaaattgggtttgatttgaattctgacatctttgcaaatagtagtatccataatgagtctgatgtagcagcagttgatgccccaataccagctaaaactttacctgatacttgccatgatacgagcatgcctgctgttcctgaagtagacaaatttgtgaagcatgaagaatccacaagtgccaccctcagtcctgttgtggaaacaggaaatggtcatactacactgttggtggaagcaaaatcacagcgttcgcaaggtaatgttgctagccctgctgttgggttatctgaatcctccagccagcccaccgtttctactgtttgcaagccaacagccggccatattcgtgctgatgaggatacgaggcagaggtcttgtgatactaatgaatcttgcggtgcattaccaagtt

SEQ ID NO: 10438 - DNA, 1495 bp, Zea Mays
ggcacagcccacccacgggagggaaggtctctccctctttctcttcgtcttcttcctcctccttttggtttccttttgattgattgatctagtagaacacagaaaggagagagaaagagaggagaggcaacacagaaacaagagaagaagaagaagaaggggagatcgagatcgatcacgcaccgggggagcagatccttcgcctcgccatcagggataaggattcatgcgaaatgccacctgaacttggaatgtcttctagaactgttgctggtgctgttgtaaataggaggcctcgccgcctgtttgggagatcatcagagaggaagaacccactcaaccttcagtttgagcgtcaagtagctcgcctcgaggcaaggcagcagcaacagaggatcaaggagcttgttagcagtgcaaatgtttctgaccaccgggtttttggggacactgaaaaattgcaaaatgcgaaattgtgtgagcttcatccagcttcctggttctgtgttgcctggtatcctgtttatcgtgtgcctcgtgggaatttccgtgcggcatttcttacttatcattcactggggaagttggttcataaaaaatgctccatggatacgaatgacgggcatacacaagtagtttcaccagttgttggtctccagagttacaacgacaagggagagcagtggtttcagctgagatgcccagatttgaagcaattgccaatagaagattctttaaaaaccagtcctgctgaagttcataaagagaggctgaggacgctgaagatgggtgcattggccatggcaagagctgttgtcccaaagggaagtggggagtcggtgaaccaccatcctgattacgagttcttcctgtctcgttgcgcctaggctaagcggttgtgatatgaaggaagaggggcttttctgcttctagctcctgaatgtagtagtgaccatgaaaatgaaaaaaaaacccagagtagtgactaaccagagaccggctatagatacagtttatcttagagagaggagagcctggggtgatgcatatcactgactgtataggagatagactcgaatattagatactctaacctgattccggattaccaatgcaaaccaagttggtgagctgttgaagtatggcagtacccgcgggatgggtgctttattggggctgggggcaaagatgagaagataccacagatgagatgacgctgcaggtgttcatcttttgtacaaagaccacaccagaggagcagcaagaaatttgctaccagcaagaaatttgttaacacatttgcgaggttgggcttttgttgtggcttgtttgctttgcagacttgcagtgttgctgtttctaatcatgatactgtgctgcttctgtttctaatcatgatattgtacatgaatgtgtcaacgtctggtgctgtgctgctagcaaacgcaagtgaaagcgtgcgagtaattagaggcgtgcaacctcattgcttctc

SEQ ID NO: 10439 - DNA, 3878 bp, Zea Mays
gtttttctctccctacctaccacaggcacaggcacagcccacccacgggagggaagaacacagaaaggagagagaaagagaggagaggcaacacagaaacaagagaagaagaagaagaaggggagatcgagatcgatcacgcaccgggggagcagatccttcgcctcgccatcagggataaggattcatgcgaaatgccacctgaacttggaatgtcttctagaactgttgctggtgctgttgtaaataggaggcctcgccgcctgtttgggagatcatcagagaggaagaacccactcaaccttcagtttgagcgtcaagtagctcgcctcgaggcaaggcagcagcaacagagattgcagaaaaaaatgtttgcaacaaagaattttacggtccacctggaagcaaaatgccattctaatgtttttcctctgccaatccttggtcggttatcctttgttaattaataattgtggtattcacttacttgccaggtgtgttattgtgacagttattcccttcaatttctgttacgacttcaaatcactatcgctcaccgagagtgcaagtgaggatccttcatctcgacctacatctccagaagagaaccctgaaacatcgtcctcaccatcgattttgttcctgcaccttaatgctcaagatgtatctcacagaagatggcaggataattcatcaaggctactggaagataagcccacaacatccaatagcatgtctgattcagatttcttagtcaacagctttaccaagccgagtgataatgcaaggccatcaagaaggaagagcaaaaagaaaagcaagaaacacaggcaacgctgtaggaagccgactgatggatctgaagctaaattcagagagggcaatggtgctgcctctgcagctgatgttggtgattgtgaagattcgacactttcgcctaagcatgttggtgacatacgctttgaggaaacttctcccagttcttctgtcaaggaagcttctgaagaggctcctgagagtgatgatgatgagtaccattgctgctcaggtggttcagtttcgagtgcgtcctactgtgatgagatggaactgtccaaatcaacaacttcgtgccctgcattgtgtggacaatgtcctagcagtaacttacagtatttggacaacactcaaaattctgcaccaacaggtccatctcaagaaacttgctatgctggcagtaaagcgaactgtaaccatgataccaagtccctgtttatattcagaaatgaacgtggatctgatccttgtgaggcaacagagttttgcagctctagcagtggatttgatgagaactggatagagaagtttgactatgatagtggcatttgttcgccaaaaagtgttggtacatatggtggagaccaggctgcccacttgtgcagtgacacaactggtgacaatgatttctgtcttgtaatatctagaaagagggccagaaaggagaagaaaatgtcattgtggaagagttatggagcgcatgcatccacacctgcacttgatcgaaataaaaaatatgttggccattcttcaatgcagatgaccaacgaattcaacagtaacgactggtcccatagacaaaatcatgttagcaggatacaccctcagcatggaaatgcactgaaaagctccaccaaaaatttcatgcagaggccaagcattggttgcagggagactcaatatgggtttccagctaaagaatccaagttaggagcaagtctcaatcattctacaggtccaagagaaaaaacttgtggaaaattaactggcggttttgataagacagcacaacagctttatttggacagagacctatccaatgctcttaacagcagtgaatcaatacgttgtgagacgagatcaatttcctcttctgaaccgacaactccaaagtctttaaaaggcaattatacttcagagtctggtgaatcaacagatattacaataggagctcttcccatgcagaaaagaagattgcaggatttagttcgaactgatgatgccagtgaaactatttctgggcgatcatcaccttgttctgagtcatcgacaactgaattaattgctggacatagtacagattcatctattgaagggaaccatggctgtcaagggctctgtaactctagaacacatctagcccagatgctcagggttgtaaacgatgcctgtaaagttcaggttggtgcagatgttctccttgctgctggttatccaatttctgatcttgagaaatttatatgctctgcaactcccgttattggtcgtgcaccttgcatgataagcaacacttgttcattggaccaagtagttagtgactcagtttgtcagcatgacatctctaatgtttccttgaggagaatatgggagtggtatgaagagccagggtgctatggattggaagtaaaagctcttagcaatctcagctctaaaacatccagcagcagcagttcagagttctttgcatactttgtgccttatctatctgctattcagttgtttgggttgtctaggaataacatgcatcacagttttggtgtgcaagggagggaattactgatatcatcaaatactgcaagctctatgagctctcatcctgtgcatgcaaaagcgcatacactgcttgaggaaagtaatgcatgcttgccagagtcatctttagttgtagaagatcctggagaactcatatttgagtactttgaaacagagcaaccttctctccggcctccattatttgaaaatgagtttgtgagcaatggaacttttcatgaccaagtgaccatgagggatttctttttctggtattgtattggatcaactgatcaggatgtttatgaattatggcctaaagcaagagaacttattttgtgcccatgatcaaggagcttgttagcagtgcaaatgtttctgaccaccgggtttttggggacactgaaaaattgcaaaatgcgaaattgtgtgagcttcatccagcttcctggttctgtgttgcctggtatcctgtttatcgtgtgcctcgtgggaatttccgtgcggcatttcttacttatcattcactggggaagttggttcataaaaaatgctccatggatacgaatgacgggcatacacaagtagtttcaccagttgttggtctccagagttacaacgacaagggagagcagtggtttcagctgagatgcccagatttgaagcaattgccaatagaagattctttaaaaaccagtcctgctgaagttcataaagagaggctgaggacgctgaagatgggtgcattggccatggcaagagctgttgtcccaaagggaagtggggagtcggtgaaccaccatcctgattacgagttcttcctgtctcgttgcgcctaggctaagcggttgtgatatgaaggaagaggggcttttctgcttctagctcctgaatgtagtagtgaccatgaaaatgaaaaaaaaacccagagtagtgactaaccagagaccggctatagatacagtttatcttagagagaggagagcctggggtgatgcatatcactgactgtataggagatagactcgaatattagatactctaacctgattccggattaccaatgcaaaccaagttggtgagctgttgaagtatggcagtacccgcgggatgggtgctttattggggctgggggcaaagatgagaagataccacagatgagatgacgctgcaggtgttcatcttttgtacaaagaccacaccagaggagcagcaagaaatttgctaccagcaagaaatttgttaacacatttgcgagcaaacgcaagtgaaagcgtgcgagtaattagaggcgtgcaacctcattgcttctc

SEQ ID NO: 10440 - DNA, 3525 bp, Zea Mays
taatcacaaaaatctcggttaaacctatcttcccattttgttcctcgtcgagctcctcgctccgcagccaatcatcctcagccaaaatttctagaacctcgcgcagtcgcccgcaccacgccaatctgctgctgctctcgatggtgcgcctccatcagctcctctctcgcacgcttgcatctcaccaaatcctcgcttctgccacctccagcgtccgctccaccccgcggctgcttctccctctccggttgccgccgcctgctcctcctccccatggccgtactctgcttcccatcatcgtagccgcgtcgcgtcaatacgcctcgtcgaccttcgggaggcgagggcgctcgacgcggccgccgatgttgctgaggcgcaagagagccaggagtccgacgcggaagggccctggcgagctccgcgtgcaaattggcatagaggaggcccttcccgacgaccctggaatcctgagcattgcagaaactcttcggacggatgttgggaaggcagtgaagctggccctcaacgaccttgaaggctcggattacatgaccagagatccttctatatgcaatgtggacaagtatgctagcattgaggtctctgtgttgctttgtgatgatgatttcatcaggaagctcaacaaagaatggagggatgaggatcatgctactgatgttctgtcaatgtctcagcatatcccagagcttgatattcccattctgcagttgggtgacatagtaatttctgttgacacagctcgacggcaagcagaagaaaggggacacacacttgttgatgagataagaatcctcatggtgcatgggctattgcatttattgggctttgaccatgaagtcagcaaggtggctgaagaagagatggagaaggaagaagaacatattttaaatactcttgaatggagaggaaagggattaattaagagtgcttatgatattgctactgttatggaacatttacaaaattctgttgaggctgatagcaatatagagaaagtgatcctacaagagaaacatcaacccaaactaagccatatcatctgtgatatagatggtactatcatggattatgaaggtggtctgcatgaaaaatcaataggatctttgagagaggcaattgcaacaggagtaaatgttatcatggttactggaaagagtcgggcttccactattagaaccttcaagcttcttgatttccgcgaaaaaggtgattttatttcagagacttcacctggtgtatttttgcagggttcacttatctatggaagggatggcaaaaaagttcatagagcagaattggatttagatgtctgcaaggaggcattgctgtactccttgaagcatagaattcctcttgttgcgtactgtgaggaacaatgtctaacattgtttgaacacccatttgttgaattgttgcacactgtacataatgaaaacaaggtaaaagtgatgcattcaattgaggaccttttggaatattcatctattcagaaattacttctttttgatagtaccaaagaggattcatctgtcctaaggcagcatttttcagaactgagcagagggaaagcacatgttatcaaaatgcattcaaatacaattgatattgttcccctcaatacttcaaaaggtggtggtttaagaattctacttgatcatcttggaataacaaaagattgcgatcttgattctattggagactataccagatggctaagcaataaatgattcaactgacatgattactgggtcgttcttaagaaaaaaatgtggaatcgtaggcgcgccaaaggaacaaaactattgctctgaaggttgcaaaaattgtatgtttgtagcaccatctcttttagttggcaattcatgtgtttttatatttcgaaaaggattgggtggtgaatgtcagcttagatatttccttcagatcattttgttgagatacatgtgaagagaattgaatgggccacatccttgtgcaactggagcttaccatgtgacatttgcttttgtccaaagtcatctgcaacaccatttttaactctacatagatttttttgtagttttgttttgtgtagcatagcattgataaatgttgctaaataaacgagttaatggtttctccacgttgttgatatttgttcgaatgaaactaatgctgaagtataatttatggtcaggaattcaatggatgcattgtgatgacgataactgtattttctgccatgttgggctttgtttattatgactcaccgttactcattacatccatttgattgatcgatctttttatttatcatgaaatgaagcacataagaaatcaggttgattgtagaaacaaatattgttcagattttcatgcataaagcacacacgaagcacagctcgtcaatggaaagtggaggcttgtcaccctagttttccctttgttacagatcaatatgtgttgcaactctcttgttctggtgggcatatgatttagtgctgatgttcaaattgctggtgttgctagttcctggcattactctagcaaatgaaccatttgagggcctctttgctatcatcttgttgcacggccttgatacaatgattgtccgttggttcatgtctaatcctactgaatagcttttgcttgctctcatcctcttactgtatgaaactttctttgcaaggtcttgaacacttgtagcatcagatatagacgtgaatgattgggccttcccttggtagtaattggacagccctttcctgtggaaatcgtgttaattgaacatgagttggaatgctttgcatctgaagtgaaatttatagaacgaggataactcatacaggggaccctcggcgtccagatgcaacgtgctcgaagatgctgaggatggctcagagcgatggccaggtggggaagaagttgcatcatcagacacgttggaagctgatgagcacaaggacccactggacgcgcccgagaaggaattgtaagactcggagctttcgtcacctggtttattgcaaatctccttgtgacacgagggtactccatgaggtgctaagttgtaaggctctgccattcaatgttttgacatcaaagggacgcagcttatgtggatatatataggagaaaaagggagagctatccaagtggttggataagcgtcttgtttagtcggagaaattttgtgaactcacggccggagagcgagtgatagttgcccttactccatgtgatcttgatagattagtacattaatatttcttcatttcttgtgctattttattacttatgaactccgtctcttcgttgttgacatgaagcaagaaatggacatctgtcacttatttggataaatcaatgataacttagctgatggggagcatgcggaacaacgcccttcgggctgagacagacaagcatgttacctccggccaagaaaaagagagttatcccagcggattaggaaggataaggtagattatggcggcaagaaggtgctttctgttagcctgg

SEQ ID NO: 10441 - DNA, 3719 bp, Zea Mays
ttttgttcctcgtcgagctcctcgctccgcagccaatcatcctcagccaaaatttctagaacctcgcgcagtcgcccgcaccacgccaatctgctgctgctctcgatggtgcgcctccatcagctcctctctcgcacgcttgcatctcaccaaatcctcgcttctgccacctccagcgtccgctccaccccgcggctgcttctccctctccggttgccgccgcctgctcctcctccccatggccgtactctgcttcccatcatcgtagccgcgtcgcgtcaatacgcctcgtcgaccttcgggaggcgagggcgctcgacgcggccgccgatgttgctgaggcgcaagagagccaggagtccgacgcggaagggccctggcgagctccgcgtgcaaattggcatagaggaggcccttcccgacgaccctggaatcctgagcattgcagaaactcttcggacggatgttgggaaggcagtgaagctggccctcaacgaccttgaaggctcggattacatgaccagagatccttctatatgcaatgtggacaagtatgctagcattgaggtctctgtgttgctttgtgatgatgatttcatcaggaagctcaacaaagaatggagggatgaggatcatgctactgatgttctgtcaatgtctcagcatatcccagagcttgatattcccattctgcagttgggtgacatagtaatttctgttgacacagctcgacggcaagcagaagaaaggggacacacacttgttgatgagataagaatcctcatggtgcatgggctattgcatttattgggctttgaccatgaagtcagcaaggtggctgaagaagagatggagaaggaagaagaacatattttaaatactcttgaatggagaggaaagggattaattaagagtgcttatgatattgctactgttatggaacatttacaaaattctgttgaggctgatagcaatatagagaaagtgatcctacaagagaaacatcaacccaaactaagccatatcatctgtgatatagatggtactatcatggattatgaaggtggtctgcatgaaaaatcaataggatctttgagagaggcaattgcaacaggagtaaatgttatcatggttactggaaagggttcacttatctatggaagggatggcaaaaaagttcatagagcagaattggatttagatgtctgcaaggaggcattgctgtactccttgaagcatagaattcctcttgttgcgtactgtgaggaacaatgtctaacattgtttgaacacccatttgttgaattgttgcacactgtacataatgaaaacaaggtaaaagtgatgcattcaattgaggaccttttggaatattcatctattcagaaattacttctttttgatagtaccaaagaggattcatctgtcctaaggcagcatttttcagaactgagcagagggaaagcacatgttatcaaaatgcattcaaatacaattgatattgttcccctcaatacttcaaaaggtggtggtttaagaattctacttgatcatcttggaataacaaaagattgcgatcttgattctattggagactataccagatggctaagcaataaatgattcaactgacatgattactgggtcgttcttaagaaaaaaatgtggaatcgtaggcgcgccaaaggaacaaaactattgctctgaaggttgcaaaaattgtatgtttgtagcaccatctcttttagttggcaattcatgtgtttttatatttcgaaaaggattgggtggtgaatgtcagcttagatatttccttcaggtaatgtgtacatagattcaaagtatgtaacttcagcggaaactagcctttaatttcaaataccatgaattttttgttcgtcttctgaacagatcattttgttgagatacatgtgaagagaattgaatgggccacatccttgtgcaactggagcttaccatgtgacatttgcttttgtccaaagtcatctgcaacaccatttttaactctacatagatttttttgtagttttgttttgtgtagcatagcattgataaatgttgctaaataaacgagttaatggtttctccacgttgttgatatttgttcgaatgaaactaatgctgaagtataatttatggtcaggaattcaatggatgcattgtgatgacgataactgtattttctgccatgttgggctttgtttattatgactcaccgttactcattacatccatttgattgatcgatctttttatttatcatgaaatgaagcacataagaaatcaggttgattgtagaaacaaatattgttcagattttcatgcataaagcacacacgaagcacagctcgtcaatggaaagtggaggcttgtcaccctagttttccctttgttacagatcaatatgtgttgcaactctcttgttctggtgggcatatgatttagtgctgatgttcaaattgctggtgttgctagttcctggcattactctagcaaatgaaccatttgagggcctctttgctatcatcttgttgcacggccttgatacaatgattgtccgttggttcatgtctaatcctactgaatagcttttgcttgctctcatcctcttactgtatgaaactttctttgcaaggtcttgaacacttgtagcatcagatatagacgtgaatgattgggccttcccttggtagtaattggacagccctttcctgtggaaatcgtgttaattgaacatgagttggaatgctttgcatctgaagtgaaatttatagaagtaatgttgactatccatcttttataatcatgacattgtgttatatatccactcagtattttttcctttcagcaaatatacatatgaagttgaactctgctgcatgcttatcatagatcttgtgcaaaagggaacctctactagttatcacagagcagtatcaagttttgttgagctgaaagtgaatttgcaagctttttataacaaataacagatcattccattgtatgcgaggataactcatacaggggaccctcggcgtccagatgcaacgtgctcgaagatgctgaggatggctcagagcgatggccaggtggggaagaagttgcatcatcagacacgttggaagctgatgagcacaaggacccactggacgcgcccgagaaggaattgtaagactcggagctttcgtcacctggtttattgcaaatctccttgtgacacgagggtactccatgaggtgctaagttgtaaggctctgccattcaatgttttgacatcaaagggacgcagcttatgtggatatatataggagaaaaagggagagctatccaagtggttggataagcgtcttgtttagtcggagaaattttgtgaactcacggccggagagcgagtgatagttgcccttactccatgtgatcttgatagattagtacattaatatttcttcatttcttgtgctattttattacttatgaactccgtctcttcgttgttgacatgaagcaagaaatggacatctgtcacttatttggataaatcaatgataacttagctgatggggagcatgcggaacaacgcccttcgggctgagacagacaagcatgttacctccggccaagaaaaagagagttatcccagcggattaggaaggataaggtagattatggcggcaagaaggtgctttctgttagcctgg

SEQ ID NO: 10442 - DNA, 613 bp, Zea Mays
ttccaggctctgccaccacctctcccaatgggcggccacagtttcttcctccgacaattcgtcacgcccatgccgccctcccctccgaccacctaacttcgctccgcccatggccgtcgtcgcccatgccggcctcccacggcctcgcctctttctccctttctccttccacggaagccccatctattcatcatgcctgtcattggctctgccttcggttgctgtagattatgaccatgggaacccatggtgtcgccctgacactcctcacaacggtgcttctcgaggccaccatcccagtgtcagcagtggatggccttgcgtgggtcgtgcaagaagccacgagttcctcatcaagatcagatgcaattattggtcttggtgaagcagaggaccgggtaggattgttgggtacacttgccaccttgcctacacactgagaaagtgtccatattaatgaaggcactcctcttgaggatcagaaggtcaagaacatgtaccactgaaggaacatgaaggatgctatgatgagttcagagaggtctaggccatcatctcccagtcaactaaggttgtcgacgatcgttgtcgtcaatgatgtaattatttagct

SEQ ID NO: 10443 - DNA, 2066 bp, Zea Mays
cgctcgcgcccgccctcgttcccctcacccagcctttcgcacaaacaacccatccgctccatctgcgagcaagctctagcgatctagcagcatgcaggccctatgacgctcgccatcctcatccgggagcgtggccatgcctccgcccgcctcttcccccacccccggtgccccttccacacaccccccgcaccgctgtcctgcccctctcccctcgcacacccactcccttctaccatctccatgcttggcgccctcaccacctccccgaccgcctctgagctcatcgccttcccccatagcccgaacgagatatttgcgtccgacccgcccatcgacgtggacgccatcatggagaacgagctacggaagaaggacggcggtgcggatgtggaacatctcagatctgtcactctatctccggcgacctgggtcgggcgaggcacttcttttatgtgatgcctgagtggaacttggtatcctggaacaaaatgttgggcgcgtatgcctgtggcaggatgctcaccgaggcgcgggacctgttcgacgcaatgcttgccaggaacagcgccaccttccgataattattagctcgcctcccctcccattttctcagtacaatctactccatgttgttgctgtatgatcagacaaaattcttctatcaggttcgcccgatgagaagaaaggaaaaaaagtactctgaattctgctttctcacgctcgctgttcatcgattcccgagccgattagcagagagtctgctgtttcttctctctgaatttggatggagagactgagctccgaattcagtttcgacacggacgcgggatgatgaatcagttggtcttttttcttgtgctgctgttgggttttcttagattgaggtggtggcacgcccaaagttcttccttccctcactctgcccaaccacgtagtatctcggttcctttgaattctctctctgtttctagcgttggggccctcggggttggatttatgacctggatggatgaattctctgaattcccccttcctctttggatgtttctaccattggaagaaagccaagctctgttccctttactcctgccccctttttttatgtggttctacttgtgctgtgttgcaattacttattactgcaccccaagtgcgttttcgaccaaggaaatcttacgtcttttcatcttcttacttattactgcaccccaagtggtccactccacatgatggccatgtctgcgttgtttgaggctatattattactcattctaaaggatggtcaaggtggtgatgaaaggaaggtatcagaagtccaaaagcacttagtgcccagccgacagcgatgaggagcatgccgcagggcaccgagcaagcgaaaaaagatgggccagctgtctgtgctcacgaggatgcacatcttctgacgttagttaagcctgacaagcacggggatgaacatcgaatggaggcccctctcttgtcctacaagtgtgaggtcgatgacaaggggttttggacgaaactgaagactctatccactagtttatcaaggagctgatggcaccaccaccatatctacgggtgaagcaaggccacaatactataatcctgatcagttaactggcgttaaggatttgtaatgttttcactgcccgttggtttaggcttcatgagacagtcaaactatcgaactgcactatatgagacaaccaaacacttcgatagtttggtcaacgaagaacatgtttacaagatgcacaatgtagggttcaacattaatttaggtgatcattttcgacatataagtggtcccatggaattgtatctcaccagataaattgttgtggagtcgtacactgttctatttcaaatgccgccattcccaaaacatatattcttggaggccctggcagcggtacaaggtgtcaacataattgcttatggttaagcattatatatttactctttagaaattatttgtgcgattccatttcaatctatttgggtagacatatttatatcattctgatttgtcgtcactattatactcacgccgcccg

SEQ ID NO: 10444 - DNA, 2376 bp, Zea Mays
gtaataaaaatacaaaacaacttaagactacgtatgaatggctcaaaataatcattagtcacaaagctgaaaatacaccgtgacctaacttttttaattgtggtctcacagtttgatgtatatagtgcaaaatttctttcaatctttgcttacttcaacttctttctataaagtggacataatctaactttccaggcacatgccctagaagatgagatcttttcttcattgcatgaattcttgagaacctttatttgaattctagtgttaatttcttttcaattgattttctccctgctgatatacatgcttataaagaaaaataaaattatttctttttcacttatatatgtttaaccttttcatgagagcagctttatatattcacgatttcttgttgggttgccaacgttatgtttatattgaccaactttattaggacactgcattctggtatttggcacttaacagttccactttgcaggaagaaaggttcagattgtgagacaaaggatatatgtaccatatcactgctcctctatcaagcatcagttctcattatgtatatagttttaccattatgacatccattttccttatcaaatgaatatccattttatccctaggaagaatgggataactgttagtattaattaggtatgtgatattcgtgaaaggcactgtgactttactacatgaatatgctcaaatcactttaatataaaacccttcatataacacatggtaacagaactgttacttatatttcctctaaccattctagacgatttaccctacaatctttcagttccttcattaatacttttcttttcaattcatgcctgtgttcttatacaacacacaaatgactacttatgttttatagctccgtctagtttagaatcgtagaatttcctgcccgtgcaagcattagattgttttttggattggttaactaacagttatcgataattatttgttgtagtcactgttgttttcttttttcctttttttacttgattcaaggactgctagtggccgaagggcactgcctcctccttttgcttttacgtgctgcaagaccattgttatgtatttcatgtttattattacttcgaatacggctagaatacaatgttttaacaaggtatggtgatggattactctcggttgttgattaatcttgtagcacgtcctttactaaatattgtgtttaaatggcgaaggatgatggagatacaatgaacacgaaagtcattattatttttagccttggcgctatatgtttgttagcagaggttacatgattcttctttcggaataggcggaaaaatgagagccttcactgttgtttatttagtagaggattcccatggacatgtggttgtccattacacagatgttgatacaaatgttcagctcctttttaggtaccgttgctcatgttgcagcccgaggttgtagctacacaggaacacaaattcagcttttgagcttgcaagaacggatgttggctgtgtttttgcaaatcagggtgacaataatgttgaaagaatccagcgttcgaagtatttccaagctcttcttcagaagtctaaagcaaatgtttctgaacaacggaatgcaacatgtcaagagttctcagttcaatgggctccatgcgtcgatgaaagccaagctgaaatggaaaatgagaagctaagcatcagggcttcaaagttaatgatgcaaacgaagttgacatcattgtatagcagtaagtccttgaagacaaatggcgtacccaacaaaaatatgttcaaatcagagaactcatctaaagtgtgtgccggtgttgaaaatagaacaagtcaaaatagtaacaggcggcatgcttacctggacgttgaggaggatgagaaatcccatgggcaattgcagaatgcaaagtggaaacatacagggttcagaagtcctatatttgaggttgcaaattctccatcaagtaatgatgaagctgatgctcctgccaatgagtttacgactgccaagagaatgatgatcttggttaaatgagatagttcttcaaacacgatccaaactcagagattctcagttcgcgccaaagtgaggcaatcggggatcaggacagggtcaacacaagcactgttagtcggcgcgtctagccaaaccaatgccgagctaggcgtacaatggtgccgtcccccttagcacggcggatgcgacggtgcgcctcacgcaggtttgaatgcgcgacgacgcaatcatggggtcgggtcacacggatccggctgctcgcattgcacctaggatttcaccctagagatgccggcgacgatgtgctgagaagaaaggtggagatttaatagtatcatg

SEQ ID NO: 10445 - DNA, 3018 bp, Zea Mays
cgtagtccatagtactccatttgcaaattgcattgccacacctcggctcatccccacctcacctcggcctcacttcacaagttcacatcacgaaacaggagcgtcataaagacatgggcgtcgcagggtagcctcagacggtcagaccagtgacgcagcggcagcggcagcgggcatggggtcctgagtgaccgactgcgaaggagatggctggagcgcgacggccccggagccattaatggggtgctcatcctcctccccctcctcgcctcctccccgccgggtcgcggacgcggtcggctccgccttttaaccggcctgtccgggagcggggcgccggaaccctagtgctgctggtggcacgcggcgcgccccatgggcatcgatctcaacatggtggacggcgagggccacgagcgccgcccgccgccggtgacgtgccgggagctgtggcacgcgtgcgcggggcccgtggtcgcgctaccgcgccggggcagcctggtcgtgtacctgccgcagggccacctggccgcggcgggcggcggggacgtcgctgcggacctgccgccgcacgtggtgtgccgcgtcgcggatgtcgagctatgcgcggatgcggcgacggacgaggtgtgcgcgcggctggcgctggttgcggagggcgaggcattcgggaggaatctgggcggtggtggagttgaaggggacgatggcatggaagatttcgatgctgaaaggaagtccgggatgctgcacatgttctgcaaaacgcttacggcctctgacacaagcacgcatggagggttctctgttcctcgccgtgctgctgaggactgtttcccgcctctggattataatcagctcaggccttctcaagagctggttgccaaggatttgcatggagccaagtggaagtttcgtcatatatataggggtcagcctcgtaggcatctcttgactactggatggagttcatttgtcaataaaaagaaactggtttcaggggatgctgtgttatttctccgaggtgatgacggtgaactaaggctgggtgtgcggagggctattcagcttaaaaatgaggccctttttgaagatttcaatagtgacagcacaaagcggcattctttgacggctgtagctgattccttgaagaacagaagtgtttttcacatttcttacaatccaagagctactgcttcagaatatattattccatacgctaagttcctgaagagcctcaatcatccggtctgtattggagcaaggatcaactttcagtgccataatgaagatgcgatctggagtggttgttcgcattagtgaaatagatcccatgaaatggcctggctcgaagtggagaagcctgctggtaagatgggaggacggtgctgaatgtaatggccaagatagagtatctccatgggagatcgagatagctggtggttctgtctctgtttctcattctctttctgcatctagttctaaaagaaccaagttgtgtcctcagggaaatttggacgttccagcaatgtggaatggttgtactgactccatggaaactggaaagttacccagggtcttgcaaggtcaagaattgatgagttttaggacttgtcatgttccgtgtgctcctcaaactgctgaggctgcaaaacttcaatcttctgatgctagtaggttccttagtaatgcacatggctgcgcattgggtggtccaacaagcagactcgcagtgcatagctctggttttacctaccaatgtgtaggcttcaatgaatctattggattctcagaggtcttgcaaggtcaagaaatttctcgggcggttcctaagttccaaggaatgatgtcggaagcttgttcactgaaagacagatatgggctgcatagttatatgcgtgccccagttgctgttaatggattatcagctacaactcaagaatgttctctcgcactatctactccgccaggagcacaagtgccctctctctaccctggtaatgttgttaaccgaactgtggttccacaacttggactggcaaggaagtttggtggtggaggtacaaatggccagcagtctggcccatttgataggccgagggaactttggaccaggccacagcatgaaacacctgaccaaatgaacttggatcagtttgagactagaagaccttcagtgcctgtagatgctgctaagcttgggtctggtggaggggaggttcgcaaaactagctgcagactttttggtttctccttgactgaaaagatcttgccagcagatgatgatgacgtcaaggaagtgagctatgagactgagtgccagaacccacggatgctggacctgttcgggtacaactgctcaacaccgagtgccgctcttccagctctgtgtgctgccgccccctttggaatgtgatgctgcttcgaatctttcgataactttgctccatgtactcttagaagttttactttcccagtaccccagtgtagtcataagctgcttttgacatcattccctttggtctgcctcaagttaagcagtcatttgcacaagtaaacgaaggttcgttggtgaaccactcctcgacatgcctcaccctgtcacccaaactattgtggttagtctcaggatacccagagacaccacattgtaacttatgtcgatgatccttcagaactgttgtgcgatgaagctaacaatttgctctaaaagtactttgcttgctctaaaagtaccggctatgtatatttaaatcagcacctgtatgagtttttttagccctcacaagccctggttgcagtcgactaggccgtgtgattgtattagtatgctatctttttaaactgtcgcttatgagtctttattctagtgcattgtgtgaatactctgttcatcgcatgcaagtcttgtcttctgtttctgttggcttggtaggagatactctgattttataacatgtcagatttttattggtcaattcaactttgaccatcaatatacaaggaatttggtgaata

SEQ ID NO: 10446 - DNA, 1779 bp, Zea Mays
caagggcggtctgctcagtacattttgtaaaagaaatgtcaacgttaggttcttaatgagacaagcctttggtggttcaatcagacacggcacattactccaaatgcagtagtgtcttctcctgataagaatgtaacaatcgccaaaagatgcacagtttttccagttgaatttgttgttaggggatttgttacaggaagcactgatacatctttatggacagtttataataagggtgtaagaaattattgtggaaatgttcttcctgacggtatggtaaagaatgagaagctatcttcaaatatattgacaccaactactaaagctgcagaccatgatgtccctgtcactccagatgagataatcgagtcagggttgatgtcgaaggaagattttcatgaggcaggaagcaaagccttaagcttgtttgcatatggacagaaagtggccttagagaatggattaattctggttgacactaagtatgagtttggaaaaacacctgatggaacaattgtgttgattgatgaggttcatactcctgactctagcagatattggattgctaattcatacgaagatagattcaaatctggccttgaacctgaaaatgttgataaggagtttttaaggctttggttcaagaacaactgcaacccatatgaagacgcggttctgccagaagctccagaagagttggtttgtgagctggcctggcgatacattttcctgtttgaaacaatcacgaagacaaaattcgagatcctagaagcgcaggaaccaattcatgaaaggatatcaaggaatgtcgctcaagccttacgggacctatgattgctgatagaggatctggggcagagtttgagtgcatttctggaaccaattcatgaaaccatctgatagggttttgggtgcatttctggcactaatattcccgtgcgaatagcaagtagtctgcgcagatgccatatatccgtcctgtgagggttgccattgcgtcttgatgaagcagaactatccaccacatttcttcatgatctgtgatataatgtggtaataaactcaaccgccatgctccgctggtgagatttgccgtgtttggagcagggggggagacaaactgagaaatttaacaagcatgagaccgacagatgctgtattcatacaggccttcctcagatttctttgtgttagtgtaacgttgtcaggtggtttgagtcgggcagccatcacacgctgtcttctgaaacgaaaaggataaatttgcaaataacaagttcattatgttctagcgtaattgggcttttcctctaagagcaactccaagaggccaaatcgttttgtaaaagtaaatttgggtattgctagaagaaaaacaactccaatagactctataaatgactcctccccattcctccaaatttgggcttcagtttgggcttttcctccaagttatggttgccactaagttttgtttcgcacttcagtttcattcagatcgtatgactgacttgaggcaaactggtttcatcgagcgtgaagaggtgtgtatagatttgttagtgcataatctgaacaaattttcttcagtgatttgcacatctgcgtcaacattttgtattcaaactgttggagacttctgcgaaaagggagcttccgtcgatcaatgtgctctctatgtggtttccaacttcttttgggggcattattatgcctttagctgcagacctccagatgatcaattgagctctaaaacatttatatcgggcggctatgagc

SEQ ID NO: 10447 - DNA, 1485 bp, Zea Mays
gtgcctttgtttctcggaggtgctgcttttctaaaataaatatcacagctttagtgatcagtgattattgactaggttacctgtaaccaccacagaatctgcagtgatctctcttggtagctctagctctggcttcctgcaaccctacttacttataaggtgtatatatttgtttatctgttctagtgatggctgatgtcgacgagtaccgttgcttcattgggaacctgtcctggtcaacgactgatgaaagcctcaaggatgcgttcagcaaattcggcaacctcactgaggcaaaggtggttcttgacaaattttcaggacgttctcgtggtttcggctttgtaacttttgatgagaagcaagccatggaggatgctattgagggaatgaatggactggacttggacgggaggaacatcactgttgataaagctcagccacaaggacctggtagagaccgtaatggtgaccgtgattatgaccgcgagcgtggatctcgttatgaacgtggtcgtgactatggtggtgggcgtgcaccgcgaggtggtggtggtggtggtggtggtggtgactgcttcaagtgtgggaaacctggtcattttgctagagagtgcccatctggggatggtgggagaggggacagatatggtgggagagatgacaggtatggtggcggtggcggtggcggtggcggtcgttatggttctgaccgtggtggtgaccgatactctggccgtagccgagatggcggcagctatgggggtggcgatcgctacagccgtgaccgatcaggtccttactgatggccttagttcttgattgagaagtatgtgccatccaggcttctttttggttatttgttcttgttgtggattggttgatactgtggttctggatttggttacttgcgtcctaagatcattttagtctggccagttgatccacgaatgcaaagagattatcctttggttccattctatgtgcctttagcattggagggcctctatttatggttgcttgatgaactggttatgtttgcttcgccatgttggtggggtgttccttgagctgtcccgtgttccttgtgacttgtgagaacaccagaggttatgcttgcctgagtggatgtgatgctacctggttgctgttcctttgacaatgcaccaatgtcctatcgcagcttatatactctggttccagattaattactggtgcccctttgagaggagttatgatgatgttattattcatcagcagcattctaattgcccttgatttagtgtagcctttttttcttagttcaccgaatctcaggatgcaaacgttaggttacttttactgttcgtactaaccaattgagcttttgtactaaaaaaagtatgttacattaagctgctccaggttccgttttctcccggctttgaacatgttgatttgtactgaaagtgctcctctctgtttgtgctgtatgtttatcatttg

SEQ ID NO: 10448 - DNA, 2948 bp, Zea Mays
cccgcgcctgttcacctcgcaggccgcgagcccgcgcctgttcgcttcgctccgagccccctccaggcccaagcccgcccatctcccgaccacacacgcgcctattccttcccgccccgccgcgcgccgccacctctacggctccccggcggccatgctgaccgggcgggagagcctggtccgcctcatcggccggcgccgccgctcccctctccccgcttcgctcgtcgccgccctatccttaccctccccttccccctccacctccctcgcccaggcagacgatgggggtggctcgggagaagcggccgggggtgaggctggttcgacgtcgggaggaagccgcgtcgttggcatgggcgcggagtgggtggtctgccccgtctgcggcgattcgatccgagggtcggactactgcgtcaacactcacctcgatatgtgccttacaaggggaaccaaaaggaagttaacacagagcacccttcttaatttccaattcagtaaaaaggtttctgccgagcctacaataaacaatttgaacaatgagtccgagacagaaaatatgaaacagattgatgaaggtttgtcgagtgatcaagcattcttcgcattcgatagtgagattgggagttcaaaggctggcactactatttcatcgcctacctgggaacttccaacggtggcaacctcttgcagttttgatgaatgcgcagtcatggattctagcaccgttgtagtagttgacactgttatagttggccggaggttccatgagaacattgaattaagagaagatgcagacattacctttatgagagatcctcagaatgctaaggaccctgatgctataaaggtgctacatgcagggtctgaatgtgaggagatgcttggatacttgcctcgagatcttgctaaagttttggctcctctagtggacaagcatcatgttgaatgcgagggatctgtggttggtctgcatgaacagcagtttggcaatgttcccatccagattactatccagaaatgtaaatctgacaatcaaagaaacaatgatccaaattgttgccaatccttatgggaaaatttcgttagcattgtcaaaagagaaaatttccggcgacctcacagtgcaagatatcagacaaattttaatttgatgatagctgatgttatggttaaccatgcacatgtttttagtgatatagaaaaatcatttttagcttcttttaagtcgttatcagatgatgggcaacggcttttcattaggatctacactcgaaaagggccatggttccggaagggcagcatctcatatcaagagatttcagatctggagcatgcagtcatggagttggagttggcaggttatattgacatgctttcttgcaccattgatccttttgaatatgatatgaaggagattcttgatgtgttaagtgttcctgaaatgaaggaaattctcaaggagcttcctaaggataacacaatctgcacacgtcgacatgagcttgttagcacccttctgtcttcataccgtaatggtacctgtgcatcactaccaaaacggatcctaaaatggactggaacctgtataagaatttcgaagatggcagatgaacttctgtggcgtatccagaggctcttttttctaaatggtgatcaagatctttcttcatttctattagtggaatttggtatagtgaagtttccagactatgtttgcagcatctcccatcgcatttttcaagaaagaaatgatctacttgagtacgaagacgtatgaagatgcagtcaggattctaaagacactacttagcacagttgcttgtgatagacggcgaggatattgggcattgaggctatccattgatttggagcatatgggtcgtccaaatgagagcctatccacagctgaaggaggggcaactgatccatgggtccgtgctggttcaaagttcgctctgcaaaggagagttctgcgtttaagcaaacctccacgacgctggaaagttcccagttacgctgattatgttaagagaaatataagagaggtaagcattgaaggaaggccattgaattgcgagacaggagcaaagaatgtattttacggttacgatggggaactttgtggggtagaacagttggctttacaatattatgctgatgaaggtggtggttggcaaggtacccattcggaaggtagcatttggatgactatctttggccttctaatgtgggatgtgatgttttcagacatacaagatgttttccagtctaaattccagacagccccccttgatctgggaacagacgatttttacaaatctagagagaacattgcagaatctcagttgaagaggatacgggacggaatggccgaagagatgctaatcagctcatgggagctacatcaggggacatcctgccagggtgttaactgggcccgttattcgttaactgatctacgggctgttgttgcatgcgttggtggccaccgtttggcatcgctcctccgccatctagccgttgattacaggagctggtcgagtggaatgcccgatctgctgctatggcgtttccttgatgaaagaggtggaggtgaggctaaacttgtggaggtcaaaggacccagggaccagctgtcagagcaacagcgtgcatggattcttgttctcatggattttggatttgacgtggaagtttgcaaagtaagcccggtcaccaagcggagatagttcgcttgctaaatttattctgattattacgatgcaaaatgtatttggttgattagatagaagggcaaatctgtaacgcataagcaatggcattgttgtcgtgttgcactgaagtaacagtcaagctctacttgacatgctatctataactttgagagggaaggatgcatttaattgtctgaatcggcacaagttagaagaggaaattctgat

SEQ ID NO: 10449 - DNA, 3321 bp, Zea Mays
cgagcccgcgcctgttcgcttcgctccgagccccctccaggcccaagcccgcccatctcccgaccacacacgcgcctattccttcccgccccgccgcgcgccgccacctctacggctccccggcggccatgctgaccgggcgggagagcctggtccgcctcatcggccggcgccgccgctcccctctccccgcttcgctcgtcgccgccctatccttaccctccccttccccctccacctccctcgcccaggcagacgatgggggtggctcgggagaagcggccgggggtgaggctggttcgacgtcgggaggaagccgcgtcgttggcatgggcgcggagtgggtggtctgccccgtctgcggcgattcgatccgagggtcggactactgcgtcaacactcacctcgatatgtgccttacaaggggaaccaaaaggaagttaacacagagcacccttcttaatttccaattcagtaaaaaggtttctgccgagcctacaataaacaatttgaacaatgagtccgagacagaaaatatgaaacagattgatgaaggtttgtcgagtgatcaagcattcttcgcattcgatagtgagattgggagttcaaaggctggcactactatttcatcgcctacctgtatgaatgactcacttggcacttctgagactattacttcctatgcaccttcaaatactgtcttatcagatgcaaaggatgctgtaaatgatggcgcaggggaacttccaacggtggcaacctcttgcagttttgatgaatgcgcagtcatggattctagcaccgttgtagtagttgacactgttatagttggccggaggttccatgagaacattgaattaagagaagatgcagacattacctttatgagagatcctcagaatgctaaggaccctgatgctataaaggtgctacatgcagggtctgaatgtgaggagatgcttggatacttgcctcgagatcttgctaaagttttggctcctctagtggacaagcatcatgttgaatgcgagggatctgtggttggtctgcatgaacagcagtttggcaatgttcccatccagattactatccagaaatgtaaatctgacaatcaaagaaacaatgatccaaattgttgccaatccttatgggaaaatttcgttagcattgtcaaaagagaaaatttccggcgacctcacagtgcaagatatcagacaaattttaatttgatgatagctgatgttatggttaaccatgcacatgtttttagtgatatagaaaaatcatttttagcttcttttaagtcgttatcagatgatgggcaacggcttttcattaggatctacactcgaaaagggccatggttccggaagggcagcatctcatatcaagagatttcagatctggagcatgcagtcatggagttggagttggcaggttatattgacatgctttcttgcaccattgatccttttgaatatgatatgaaggagattcttgatgtgttaagtgttcctgaaatgaaggaaattctcaaggagcttcctaaggataacacaatctgcacacgtcgacatgagcttgttagcacccttctgtcttcataccgtaatggtacctgtgcatcactaccaaaacggatcctaaaatggactggaacctgtataagaatttcgaagatggcagatgaacttctgtggcgtatccagaggctcttttttctaaatggtgatcaagatctttcttcatttctattagtggaatttggtatagtgaagtttccagactatgtttgcagcatctcccatcgcatttttcaagaaagaaatgatctacttgagtacgaagacgtaagattttgaccccttttcaaaaagaacagtgagccactcattgatcatgtttaatatcttacattgcaaacaggctattcgagttgctcaggtgatggatgaatcccttgataataataaaatggacttggtgacaagatgcatcgatttatctgagaatcgattatgcattatgccaaaacgagaaaacacaattacacctgaacgtctccgatcattcttttctcgcttttcagcgtcctgggtctattcgaaaatactcacattaggtgtctctgtttatgaaagagaccgcaggtatgaagatgcagtcaggattctaaagacactacttagcacagttgcttgtgatagacggcgaggatattgggcattgaggctatccattgatttggagcatatgggtcgtccaaatgagagcctatccacagctgaaggaggggcaactgatccatgggtccgtgctggttcaaagttcgctctgcaaaggagagttctgcgtttaagcaaacctccacgacgctggaaagttcccagttacgctgattatgttaagagaaatataagagaggtaagcattgaaggaaggccattgaattgcgagacaggagcaaagaatgtattttacggttacgatggggaactttgtggggtagaacagttggctttacaatattatgctgatgaaggtggtggttggcaaggtacccattcggaaggtagcatttggatgactatctttggccttctaatgtgggatgtgatgttttcagacatacaagatgttttccagtctaaattccagacagccccccttgatctgggaacagacgatttttacaaatctagagagaacattgcagaatctcagttgaagaggatacgggacggaatggccgaagagatgctaatcagctcatgggagctacatcaggggacatcctgccagggtgttaactgggcccgttattcgttaactgatctacgggctgttgttgcatgcgttggtggccaccgtttggcatcgctcctccgccatctagccgttgattacaggagctggtcgagtggaatgcccgatctgctgctatggcgtttccttgatgaaagaggtggaggtgaggctaaacttgtggaggtcaaaggacccagggaccagctgtcagagcaacagcgtgcatggattcttgttctcatggattttggatttgacgtggaagtttgcaaagtaagcccggtcaccaagcggagatagttcgcttgctaaatttattctgattattacgatgcaaaatgtatttggttgattagatagaagggcaaatctgtaacgcataagcaatggcattgttgtcgtgttgcactgaagtaacagtcaagctctacttgacatgctatctataactttgagagggaaggatgcatttaattgtctgaatcggcacaagttagaagaggaaattctgat

SEQ ID NO: 10450 - DNA, 1501 bp, Zea Mays
tagcagccccctgcagggaagcatttcaactgaactcatcaattccttcatcatccatggaggccatgcccaggccaagtgtagctccctcgttgcagttgcaggcccgtccgtgcccgaggtggccgcgccggaagcactgcccaccgtcctccgtggcaagccggagggttgcttgctcggcctcggcggccgacgccgacgtggtcgacctcttcgacgccgctaagctaactgtggacaagttcgtgacgagcggcatggtggtggggctcggctccggccctgcgtccgccctggccatccagtacctcggcacgcgcctccggcggggctctctcgcgggcatcaccgcagtgacctcccaggtccgtgctcagtgcgagcgaggcagacaaggcagggatacgggctaacagctaccaggaaggcacccagcgatcgaggagggcacgctggccgcagtcatcgggcggcggaagaccgagagcggagagccctctttcatggcggagaaggcgatggctaaatcagctcacaagcttgccttcatcactggaaacgacaagtacgtgacgacgggcgtcgagggttctattccggtcctgattaaaagtgccattttcaggggaactggatagacactgctgaagagatcgacgatttgtttctaggagacgcagaggtttggaggaggccgtcgtttggaactgctggtccacttgggggtgaccacccactggttaccaaggagggccatcacgtgctcgatgttatcttcacaacaccaatccaagatcttggtcaggttgcagagaagttggacaaagttgatggcgttgtggatcacgggattatttgcagcaaccaaccatacgctgtcattgcatccaagggggaagtgcaggtcctggacgagaaatcttcggtgatacagtagcggtgaaacctttttggctgctctgcagattgttgcgcttttcggaacaggagtctactaccagctagctggaaaaaaaatgccatgagttaatcatgtacaaccagagctcttgttcaccactggacaattcagccggcatcagttgaagtctgtgtttcgcataaacttttttgaactggtactcagttaaccagattcgatgaatgtgaggcagagctacagcttcaactactcttctagtgtttcaggagttcgtctcttttcatatgattggttgcccgcggcatctcatctcctatatgtttggttgcttgtgtttggcgggtgattaaattagcacatgccttcataacgtttattagtgtttggaaagataaaagtaaccgcgcataggcgctggaatatatggattagatatgggccgtcggatgaaagatcgaggttgcctcgagagccaatgaaccgttagccgttgcataggaattttgtaggatttgtaagctgtagccttagcaaaatttactgcatgtccatttcgaacaatgaattaaaccctat

SEQ ID NO: 10451 - DNA, 2901 bp, Zea Mays
gtggagatggctgatcggtggctcagtggagtggagagaaggatttaaagagatgcatgatgatggtcttgctggtggtgcaacatatactatggaatcgggaactgcctcacagagagttgatgttaatgttatgtatgaatcagaagattcaaaccgacagaaaggcaacattaggtccatgacactagttggaaccagtggatcaaaaataatttcttctgtcagtgcggaagaaagcactactactccttcagcagatatctctgaaacagagaatgtatcctctgatttgcctcccagtagtttaaggaaacacaagatttcaaaacatggacctaggtacagggagcattctcctggcaaaaggcagaaggttttcacttctgacatttcttttgaaggcaatataatgaataaactttccattccggagattcgtgacacaagactagagtccagagaatctggtggtgataaactacgaattcttgacgagtccactaagaagacttcaaggaaagatatgtgtggggaaagcccagctactaccatggaaaatgtgggaagacagagtaataaagtgtcttcaacaaagaatttcttggagtccactctttcttgttggagtgccttagagcgagatctatacttgaagggcatagagatatttggaaagaacagctgtctcatcgccagaaacttactatctggtcttaagacctgcatagaagtggcaaactacatgtataacaatggtgcagcgatggcgaagagacctctcttgaataaatccatctcaggcgactttgcagaaaatgaacaagactacatggagcaagacatggctgccagaacaagaatctatcgtcggaggggccgcaatcgaaagctgaaatatacttggaaatctgcagggcatccaactgttagaaaaagaactgatgacgggaagcaatgttacacacaatatagcccatgtgcgtgccagcaaatgtgtggtaaagattgcccctgtgcggacaagggaacttgctgtgagaagtactgtgggtgttcgaagagctgcaaaaacaagtttagaggctgtcattgtgcaaaaagccaatgcagaagcagacagtgcccctgttttgcagccagtcgtgaatgtgatccagatgtttgtaggaattgctgggtgagctgtggagatggttcactaggtgagccacttgcaagaggtgatggttatcagtgtggaaatatgaagctccttttgaaacaacagcaaaggattttgttaggaagatctgatgttgcaggttggggtgcattcattaagaatcctgtaaataaaaatgattatcttggagaatatactggtgaattgatctctcacaaggaagcagacaaacgcggcaaaatttatgaccgggcaaactcatcttttctgttcgatttaaatgaccagtatgtgttggatgcttatcgcaagggggacaaattgaagttcgcaaatcactcatctaaccccaactgctatgcaaaggtgatgctggtggctggcgaccatcgggttggtatatatgcgaaggagcatattgaggctagcgaggaactcttttatgattatcgttatggacctgaccaggctccagcttgggctaggagacccgaaggatcaaagaaggacgaggcatccgtctctcaccgtcgagcacacaaagtggctcgatagctgaagagtcgctccggatgatacaatatgcagtaaacttaatacttaatacatgattcagtcctagttcattggtagataaacatgctatatactatccattagtaaataaactctcattcatcgagttggagaataaatgcgtataaacatatgtggacctcaggtcgggaaggtggcaaccttgttagtttgagcaccaacaggttctcaaacttgagtggctattgctagagtatcaaataatggctgcgactatagccttgtttgtatattttcttggtgagatgaaataatttgtcaaacactcaaatgtacactttattcctgaaagtatttgatgattcattagtagtgttactagagagcctgatagtagggtatttgcatgtcacattattggctgcagacttccgagacaaacgtgattggctgattgtgcacttgcgccctcttttcaaactaaattaacatttacaaggcaagactaataaatatcccgacccaacaaaaaaaaagagcgggcaaataattcagtcgctaacttgttacatccttttcttgcggcgacagtagatggtagaataacagttcattccatgtatctgggactccaggaaggcaccagtggctgcagtcctgctggacgctcgacgcggttaaacctaccgtcttccggccatatacagatgggtgaccatctatcctgaccccagacagattagtaacgttcagaactgtcacaggagtcttcatttgcttcgtgacctgttccaagatcaagtttctctcaggcaccggcctagcacgggtgtcattgaggggcagcatgctctccctgcagtgtccccctgaattccactccccaccactgaaattgacaacaactagttacatagacctgcttgcgcagagatagcaacagctgcagcagcagctctaatgacactcgtgttagattgattaatcaaagaccaaacctgaaatgtgacggggatgagcttcggaagaacactcgagttagctgtggattgatgtgactgtcgacccaggatgcccaggtggttagtgctctttggaaagcggtagaggcatcgagatggggatggacatgatctccctcttgataatagttcactctgcagagtatatgtaataaccagatctttactaacatgatt

SEQ ID NO: 10452 - DNA, 1336 bp, Zea Mays
gcgaggtcttgttaaatgtgaatgttgccatgtatcaagatcctcgggatgcctgctcagcaatcgctgctgagtcatacaaactatggcttgagcatgaaaacaggacagatgatataacaataatcattgtgcatattcgagacatggaaaatgcagggagtgacaaagcggactatggtagcatcggagcatcaatagctgggcagacaatacagtcagagatacctgtatttgtacaaccagaagcaagtaacatgaacagatctgctgctaccggaatgcgatcaccgtcttttggctctccaactgaacggagcctctcatgtgttgctccttctcctacggatcctttgttgatacatggcagagtatcagatgcttccaagcctgggcaaagtgagcagcgagctgcatcacaaccaccggtacaaacttggcatcaaatagacggggttactactgagctggagcggtctatgcagcaaagcatccttccaacctcctgctgaaagtagaggtgaatcttcaaaatccttgctgatgaatgagaaattgcaaacaggctcacataagttcgcacattctattgcagaatgcgagttgaatgacaaaaagaggcctcgagataacccaccgccatcttggagctactaaccgtaccatggatgcgatgtttgccagcagcaaatctcgtgctgttgctcgtgttttggtagagcacctgctgctgccgacgatgcgaggttcctgatcctgtgtgggatcatctaaccatgggctgagtggaattgagttattctccgtttcatttgtactttgtttacttttcacaagatatagattaattctaagttgatgcctgtcgaggtatcagtatcatttgagacgcaactgtgcattgtcgtccttccacagaattaggatctggaattgaaatgcgagtgccgtacagaacagatcagctgggtggcttttcagatgcaaagaagaatattggatttagcctgtaagctgacctgagagctctgtcaaccctttaaaagtgtgctacgcatatacgataccgtcagcgagctctgccaagaaacaaaggggcctgtttggttcagcttttttctaaccagtttttctgaaaatctggttgtggggagaatctggctgtggggagaatctgagtatcattactattacgtgtgaagtaagataaatttgtttatagtgctcatgatctagaaagtgacgaattcctactattacaacgactctaccgattatgtgtttatgttgattttggatgattttttgtcccaacgaattttatagaagctggctg

SEQ ID NO: 10453 - DNA, 2371 bp, Zea Mays
cgaacaacccgtgcgccacggcgcggcctcgggcccctcttcaatgcgcgcagcgtgccgtattgcgcctttctctctcgcatttggcgtttgaatcattccattttccagtctgcactctccagtctcctccacttcttctccccgtcccatttcttaactccccgagcccccaaaatcacgcacccagagaggggagaggcggagtgacgggggagaggcggaggccacgccccaaacccaaaccctagccacacgcgacgccgatgggatgcgcgcagggcaagtgctgcctgccgcggcacccgaggaggggctccgccgccgtcggcgggcgcggcggcgccacgcttggccgcgccgcggtgcccggggccgggctggtgctggagtacgccgcgttggccgtggcggggctctacccagactccccggccagggagtcccaggacacgcacctcgtcgccacgcgcttcgcgggggatcctgacctccacctcttcgccgtcttcgacggccacggcgctgccggagcctcctgcgccgggttcgcgcgggacgcgctcccgcgcctcctcctcgcctcgctcgccgcgggcccagccgccgcgttccgggacgccatgctggccgccaacgccgagatgcatgcggcgcccggcgtcgacgactccatgagcgggaccaccgccgtggccgccctcgtcgccggcggcgcgctccacgttgccaacgtcggcgactcgcgcgccgtcgccggtgtctggcgcgccggccggctcgtcgccgaggacctctcctgggaccagaccccgttccgcgccgacgagcgcgcgcgcgtcaaagcctgtggcgcccgcgtcatgtccgtcgagcaggtggagggcatgcgcgatcccgaggacgtgggctggacgcccaacgagggggacccgccacgcgtctgggcgcgcgacgcactctacccaggcaccgccttcacccgcagcctcggggacctcgccgccgaggccgtcggggtcatcgccgagccggaggtgaagagcgtcgagatcactccatcgcacctcttcttcgttgtcgccagcgatggcgtgttcgagttcctctccagccaggaagttgttgacagggttgccatgtatcaagatcctcgggatgcctgctcagcaatcgctgctgagtcatacaaactatggcttgagcatgaaaacaggacagatgatataacaataatcattgtgcatattcgagacatggaaaatgcagggagtgacaaagcggactatggtagcatcggagcatcaatagctgggcagacaatacagtcagagatacctgtatttgtacaaccagaagcaagtaacatgaacagatctgctgctaccggaatgcgatcaccgtcttttggctctccaactgaacggagcctctcatgtgttgctccttctcctacggatcctttgttgatacatggcagagtatcagatgcttccaagcctgggcaaagtgagcagcgagctgcatcacaaccaccggtacaaacttggcatcaaatagacggggttactactgagctggagcggtctatgcagcaaagcatccttccaacctcctgctgaaagtagagaatgcgagttgaatgacaaaaagaggcctcgagataacccaccgccatcttggagctactaaccgtaccatggatgcgatgtttgccagcagcaaatctcgtgctgttgctcgtgttttggtagagcacctgctgctgccgacgatgcgaggttcctgatcctgtgtgggatcatctaaccatgggctgagtggaattgagttattctccgtttcatttgtactttgtttacttttcacaagatatagattaattctaagttgatgcctgtcgaggtatcagtatcatttgagacgcaactgtgcattgtcgtccttccacagaattaggatctggaattgaaatgcgagtgccgtacagaacagatcagctgggtggcttttcagatgcaaagaagaatattggatttagcctgtaagctgacctgagagctctgtcaaccctttaaaagtgtgctacgcatatacgataccgtcagcgagctctgccaagaaacaaaggggcctgtttggttcagcttttttctaaccagtttttctgaaaatctggttgtggggagaatctggctgtggggagaatctgagtatcattactattacgtgtgaagtaagataaatttgtttatagtgctcatgatctagaaagtgacgaattcctactattacaacgactctaccgattatgtgtttatgttgattttggatgattttttgtcccaacgaattttatagaagctggctg

SEQ ID NO: 10454 - DNA, 2394 bp, Zea Mays
ctgccgtattcacttttcactcgttcgtccatccttccacgccccccacagaaccgtctccccagcggagcccggcgcctcacggtcgcaatttattgcttgcgcaccgcctcgccgctttggcgtggggcgtttgcctgtgtggcgcttcgcaggtgccgtggcttgccgcttccttcgccgtgctcactagtcaccagagagggaggaggctctggcgctctgcttctgctgccgcttcttcttcttctcctgctgctgctcttacggagataagcagggggggccgggccggggcagggggaggtgacagctgagctgactagctgagtgaagcatggggatggacgccggcggcggcaagctgccgtacagctacgccggccagcaggacggagggaagctggtgaagagcgtcagccgcgtggagccgcgcaggttcggcctgggcctcgtggcgggcttcctcctcgtcacctgcgcctacttctccaccgccaagttcgacgccatccagatcgccatgaccagccgacccgtctccagcaatgcgggcggcgtcggggtcggctcgctggaggtgggcggcgtcgtcgccgccgccgacacctacaacgcctccaggcagggattagatttgggcaagaaaggcccgggcgcgacgtccatggccgacgagggaagcgaggccgaggcgctcgagaaagacggcggcaaggcttcttcaccttcggggccaggttcttggtcaggcgttcctgccgctctccttcctcccgtgtcgtcagaggaagccgcgaacagcacgctggaatcaggcggtcttgaggacgaggagctacaggtgcaggatgcagttgccagtggttccaagaggagcaaagactctgccgccgccgccgccgccacacgcagcgccaatgtcagctcaccctctgtggttcactctcaccatgccatcctccctgctcccgcgcagcggattccagaggttaagcaagcagactcggagacgacgccggcgcgggagcgggagtggaagccgctgtgcgacgtcacctcgaaccggcgcatcgactggtgcgagctggacggcgacgtccgcgtggtcggcgccaacgccagcgtgacgctggtggcgccgccgggcgcggacaaccggaccttccgcgcggagtcgtggcgcatcaagccgtacccgcgcaaggcggaccgcgggtacacgggcaactacttccacgcgttcacggacgtgatcctgccgctgttcctgacggcgcggcggtacgcgggcgaggtgcggctgctggtggccgacctccagccgtggtgggtgggcaagttcctgcccgtgttcaggagcatctccaagtacgagctggtggacctggaccgcgacccgcgcgtgcgctgcttccgccacgtccaggtggggctcaccagccacgccgacttcagcatcgacccgcgccgcgcgcccaacggctactccatgctggacttcacccggttcatgcgcgccgcctacgggctcccgcgcggcgacgtcgtcgcggcggcgccggcgaggcggccgaggctgctggtggtggcgcgcgcgcggacgcggcggttcgtcaacacggaggagatcgtgcgcggcgccgaggccgtcgggttcgaggcggtggtgtcggaagggacgcacgaggtggcgcccttcgcggagctggccaacggctgcgacgccatcatgggcgtgcacggcgccgggctgaccaacatggtgttcctgcccacgggcggggtggtgatccaggtggtgccgctgggagggctggagttcgtggccggatacttccgaggcccgtccgtggacatggggctgcgctacctcgagtaccggatcgagccggaggagagcacgctggtggaccagtacccgcgcgaccaccccatcttcacggaccccaacgggatcaagagcaagggctgggagtccctcaaggacgcctacctcgacaagcaggacgtgaggctggacatggagaggttccggccgacgctccaggaggccatcgcgcacctcaggaaggccaaggccaaggccaatggcgacggaaacaactaggcatcgccgtgcgtatgtagcgtgttcattcgtcctcttattaatctactcttctttttcttctttccttttcgggttatgtcggtgtatgtagcgtgcagaaatcgagcaaatgtatgatatgtggcagggaaagaagctagagcgaataatatattctctctcttgtcatccagttttcgattgaatggcgtatgccaagtgatcaggtgaaggtcgacccggaaatttggttttgccacaataatgggaagattggcgaggccaaatatattagttttggg

SEQ ID NO: 10455 - DNA, 1306 bp, Zea Mays
ccaacttccgggcaggcatctgcatccaaagggcgctcgattctctagctagctaggatctagcaacacaaacccgtctgtccatatattatgggttggtaacaattaattagactgaagaagatcatctaacgaggatggacgcaaagaaaccatacatgctggctattactacagtagcaatctacaccggcatgtacgtggtctcaaaggctgccttcaaccagggaatgaacagcttcgtcttcgtcttctaccgccaggctgctgcatcgcttctcctcctgcccatcgcacttgttctagaaaggcatgaatctgtgcaatgcaagtgtgacgctcacgtcagcaaccgtggcgtcggcaacaggaaactctactcccgttatcaccttctgcctggcactgctactgaggatggaggtggtgaagttaaggagcgtctctggcatagccaaggtcaccggcgtagcactgtgcctggccggagcgttggtcatcgccctgtacacggggccgtcgctcagcccagtcaaccgccatcaccgtgcctctggcggcgcccatggcttcaaagctccaacccgtggggggacatgggttacaggcacgttcctgatgcttctgtccaacgtcacatggtccctgtggacggttctgcagggcgcgctgctaaaggaataccccaacaagctcctcgtcacgacctcccagtgcttgttcagcaccgcgcagtcgttcgtcgtcgcagcggtggccgagagggacttctcgaaatgggcgctcaagcttgacgtcagcttgatcgctgttgcttacaccataaaaggacctgtcttccttgctgtctggaacccactctgctttgtgctaaccatattctgttcctccttcttcctcggcgagaatgttcacctcggcagcattgtgggtggaatcctcttggtctgtggcctttatagcgtgttatggggtaaaaccttggaggttcatcagactgtggaatctggtgataatacggtcggtgaagtgcaaaatggacaagaagagaagaatcatcaacagaaggtgctggagaagggacgccaagaggaagcatcaatgacagcacccggtgtagtgtgatcgattgcttgattccataaagctagcaatctatggttcatttatgtcatgtctgtggttcttgtacaaattgcctgtgagtcacaataattgtttcaagatctttaaattgttacatgttttaaaggccaaaataaataaaatttaggtgataggcaaaagtaggatgatttttccaact

SEQ ID NO: 10456 - DNA, 1424 bp, Zea Mays
atacacctcgtcagcctgccggtcgttgctacttagagggtgtaccaacttccgggcaggcatctgcatccaaagggcgctcgattctctagctagctaggatctagcaacacaaacccgtctgtccatatattatgggttggtaacaattaattagactgaagaagatcatctaacgaggatggacgcaaagaaaccatacatgctggctattactacagtagcaatctacaccggcatgtacgtggtctcaaaggctgccttcaaccagggaatgaacagcttcgtcttcgtcttctaccgccaggctgctgcatcgcttctcctcctgcccatcgcacttgttctagaaaggaaaaatgtgcgatccatgtcctctgggttgatcctgaagttgttcttgcttgccctaatctggaacacgttaggcatgaatctgtgcaatgcaagtgtgacgctcacgtcagcaaccgtggcgtcggcaacaggaaactctactcccgttatcaccttctgcctggcactgctactgaggatggaggtggtgaagttaaggagcgtctctggcatagccaaggtcaccggcgtagcactgtgcctggccggagcgttggtcatcgccctgtacacggggccgtcgctcagcccagtcaaccgccatcaccgtgcctctggcggcgcccatggcttcaaagctccaacccgtggggggacatgggttacaggcacgttcctgatgcttctgtccaacgtcacatggtccctgtggacggttctgcagggcgcgctgctaaaggaataccccaacaagctcctcgtcacgacctcccagtgcttgttcagcaccgcgcagtcgttcgtcgtcgcagcggtggccgagagggacttctcgaaatgggcgctcaagcttgacgtcagcttgatcgctgttgcttacaccataaaaggacctgtcttccttgctgtctggaacccactctgctttgtgctaaccatattctgttcctccttcttcctcggcgagaatgttcacctcggcagcattgtgggtggaatcctcttggtctgtggcctttatagcgtgttatggggtaaaaccttggaggttcatcagactgtggaatctggtgataatacggtcggtgaagtgcaaaatggacaagaagagaagaatcatcaacagaaggtgctggagaagggacgccaagaggaagcatcaatgacagcacccggtgtagtgtgatcgattgcttgattccataaagctagcaatctatggttcatttatgtcatgtctgtggttcttgtacaaattgcctgtgagtcacaataattgtttcaagatctttaaattgttacatgttttaaaggccaaaataaataaaatttaggtgataggcaaaagtaggatgatttttccaact

SEQ ID NO: 10457 - DNA, 2337 bp, Zea Mays
cggccggcgcctgcacggcgcccgcggctccgcgcgctcgtcctacttgccatccgtcactggacgggccacgcgactgcgatccctgccacacgagcgcaacgcgccatgggtccggcgtgccagtgagagcgggagaagctcggacatctccgtggagggacatcttctccagcgattcagcgcgggatcctgctggactggcctgatccctccgtgctggtgtcggcgagcatgcaaggaaggatgcgaggcgcgcggcggagcgcgcgcggggaatcgtcccggaaggcggcgggccgcgaggtggagccattcacgctgtgcggcgagatgtcccatctcaccagggccacgtcagagccgtgccgcagggctcgcggcgccgccttcgcccgccgggcgaggcccttctcggcgtacgagctggtgtcggcgcgggaggccggccgcgcgggcggcgccgggttctccgcggccgatcgagcctacctcggcaggcagcacatccccaccaaggggccgtggggcgtcgacgacgtggaaagcgaggcctacgtctcgcagttctccgccgatggctcgttgctcatcgcggggtttcggggaagccgcatcagagtctacgacgccgagaaagggtggaagatccacaaggatataagctgcagaagtgtgcactggacggtttcagatattgctctctcacctgaccaacgattccttgcctatgcaagtctgacacctattgttcacattgtgaatgttcagaatgctggaaaggaatcacatgctaatattactgaaattcatgagggattggatttaaccggtggtgatgaggatgaggactttggaatattttctgttaaattctccaaagatggtaaagaagttgttgttgggaacaatgaaaagtcaatatatgtttatgacctttcagcaaataaagtgtcagcccgcatccgtgctcataaagctgatgtcaatgctgttaccttcgctgatgaaactggaaacgtgttgtactctggaagtgatgatagtctctgtaaggtgtgggacaggcgttgcctttcaggggaaaagtcagcaggtattttgacaggtcatttagatggagttacatttatcgatagccgtggtgatgggcgttatttcatctccaattgcaaggatcagagaatcaaactttgggacatcaggaaaatgtcttccgtcgtgagatctcgcccagtgagtctagtggactgggactataggtggatgccatttccatcagaagctcataatcttaagcatccaggtgatcagtctgtggccacatacagaggccattcagttctgcgaacacttatccgttgctatttctcccctgtgcacaggtcaggaacagcagatatttttatttatgtcaccagcatactgaaattttcctttgaaatactttcaaaaggttacatttgttagtggaaagttgaccgttaacttgagtaggaggccttgcagttgtgctacctgcttctaagcttgtaattagtgatatataatgaatatttggtctaatttttgtatttatctatgtaattaaggcattgcttcgccttacgctttagcgcttaaaaggtaaaaaggaggtcgataattaagatcatacatctaaaacaattatcagtgatgacatgaataatttccatgttcagttcatatcgttgtgctttctgtttcagcacgggtcagaggtacatatacacgggatccagtgacaagtctgtacatatttatgacgtggtaaccggggaggctgtcaagaggctttcgtggcatggctccatcatcagagactgcacctggcatccatactacccaacgctcgtcagctcctcctgggacggcttcgttgcccggtgggaggcctcgggcgacgacgacgaccattcggtgctcgtcgccgacgagatgagaggaagcccttactaccggagatacggcgatcccttggtgatgtagagatgtctgcaaagtggttaacaccaaatggtagtgagcatgtactttgctttgttgtttgggaattacaactgagcagcatgtacagtgccgtttggctcatgtggttgtatagccttacgataaataatatgtagggatacagaaagaacacatgagatcgaagcgactttataaatcctatggaatttatagaaacagacaagatcctctttccttgtttttaaaaactttataaatactttttcgaattttgattggattggaatacaccgttgttggattcagaaattatccattcatctcactcactatgggacaatgtac

SEQ ID NO: 10458 - DNA, 2646 bp, Zea Mays
cggccggcgcctgcacggcgcccgcggctccgcgcgctcgtcctacttgccatccgtcactggacgggccacgcgactgcgatccctgccacacgagcgcaacgcgccatgggtccggcgtgccagtgagagcgggagaagctcggacatctccgtggagggacatcttctccagcgattcagcgcgggatcctgctggactggcctgatccctccgtgctggtgtcggcgagcatgcaaggaaggatgcgaggcgcgcggcggagcgcgcgcggggaatcgtcccggaaggcggcgggccgcgaggtggagccattcacgctgtgcggcgagatgtcccatctcaccagggccacgtcagagccgtgccgcagggctcgcggcgccgccttcgcccgccgggcgaggcccttctcggcgtacgagctggtgtcggcgcgggaggccggccgcgcgggcggcgccgggttctccgcggccgatcgagcctacctcggcaggcagcacatccccaccaaggggccgtggggcgtcgacgacgtggaaagcgaggcctacgtctcgcagttctccgccgatggctcgttgctcatcgcggggtttcggggaagccgcatcagagtctacgacgccgagaaagggtggaagatccacaaggatataagctgcagaagtgtgcactggacggtttcagatattgctctctcacctgaccaacgattccttgggaacatgcctgttttcatcgagtgcatctgatcactttgcaggcctatgcaagtctgacacctattgttcacattgtgaatgttcagaatgctggaaaggaatcacatgctaatattactgaaattcatgagggattggatttaaccggtggtgatgaggatgaggactttggaatattttctgttaaattctccaaagatggtaaagaagttgttgttgggaacaatgaaaagtcaatatatgtttatgacctttcagcaaataaagtgtcagcccgcatccgtgctcataaagctgatgtcaatgctgttaccttcgctgatgaaactggaaacgtgttgtactctggaagtgatgatagtctctgtaaggtgtgggacaggcgttgcctttcaggggaaaagtcagcaggtattttgacaggtcatttagatggagttacatttatcgatagccgtggtgatgggcgttatttcatctccaattgcaaggatcagagaatcaaactttgggacatcaggaaaatgtcttccgtcgtgagatcgtagggtcttgcattatagcaatttattatgtaggatattttttttactggaccctaagcttctctgaaatttgctataggacattaaaaattattaggacactacctagtgtcttctagattttttttgacagtgtcaggcagcaataaaaaaattggacaatgccttgagcaaaattatcctgctatgtacttttaagttccatttcctttttttgcgggtctagtttctattgttttgaatttgattctgttgttttcacagtcgcccagtgagtctagtggactgggactataggtggatgccatttccatcagaagctcataatcttaagcatccaggtgatcagtctgtggccacatacagaggccattcagttctgcgaacacttatccgttgctatttctcccctgtgcacaggtcaggaacagcagatatttttatttatgtcaccagcatactgaaattttcctttgaaatactttcaaaaggttacatttgttagtggaaagttgaccgttaacttgagtaggaggccttgcagttgtgctacctgcttctaagcttgtaattagtgatatataatgaatatttggtctaatttttgtatttatctatgtaattaaggcattgcttcgccttacgctttagcgcttaaaaggtaaaaaggaggtcgataattaagatcatacatctaaaacaattatcagtgatgacatgaataatttccatgttcagttcatatcgttgtgctttctgtttcagcacgggtcagaggtacatatacacgggatccagtgacaagtctgtacatatttatgacgtggtaaccggggaggctgtcaagaggctttcgtggcatggctccatcatcagagactgcacctggcatccatactacccaacgctcgtcagctcctcctgggacggcttcgttgcccggtgggaggcctcgggcgacgacgacgaccattcggtgctcgtcgccgacgagatgagaggaagcccttactaccggagatacggcgatcccttggtgatgtagagatgtctgcaaagtggttaacaccaaatggtagtgagcatgtactttgctttgttgtttgggaattacaactgagcagcatgtacagtgccgtttggctcatgtggttgtatagccttacgataaataatatgtagggatacagaaagaacacatgagatcgaagcgactttataaatcctatggaatttatagaaacagacaagatcctctttccttgtttttaaaaactttataaatactttttcgaattttgattggattggaatacaccgttgttggattcagaaattatccattcatctcactcactatgggacaatgtac

SEQ ID NO: 10459 - DNA, 4903 bp, Zea Mays
ggactcctggttgccggttcaccgtcggagcctgacgtcacgccacacgccacgcgcgggtaacacggccggcgcctgcacggcgcccgcggctccgcgcgctcgtcctacttgccatccgtcactggacgggccacgcgactgcgatccctgccacacgagcgcaacgcgccatgggtccggcgtgccagtgagagcgggagaagctcggacatctccggtatggttccactggtccaggggacaaaatctgctgccagtttctgcaattgcttgttttttttcgctgtgttttcagtggagggacatcttctccagcgattcagcgcgggatcctgctggactggcctgatccctccgtgctggtgtcggcgagcatgcaaggaaggatgcgaggcgcgcggcggagcgcgcgcggggaatcgtcccggaaggcggcgggccgcgaggtggagccattcacgctgtgcggcgagatgtcccatctcaccagggccacgtcagagccgtgccgcagggctcgcggcgccgccttcgcccgccgggcgaggcccttctcggcgtacgagctggtgtcggcgcgggaggccggccgcgcgggcggcgccgggttctccgcggccgatcgagcctacctcggcaggcagcacatccccaccaaggggccgtggggcgtcgacgacgtggaaagcgaggcctacgtctcgcagttctccgccgatggctcgttgctcatcgcggggtttcggggaagccgcatcagagtctacgacgccgagaaagggtggaagatccacaaggatataagctgcagaagtgtgcactggacggtttcagatattgctctctcacctgaccaacgattccttgcctatgcaagtctgacacctattgttcacattgtgaatgttcagaatgctggaaaggaatcacatgctaatattactgaaattcatgagggattggatttaaccggtggtgatgaggatgaggactttggaatattttctgttaaattctccaaagatggtaaagaagttgttgttgggaacaatgaaaagtcaatatatgtttatgacctttcagcaaataaagtgtcagcccgcatccgtgctcataaagtatgtaaccatctgattaacactacctttttcttgaaaaacgcaggagaacaatatcttatttgatatgcattgttatgtttgttttctacatcagatggaaaaaaataatagttagccgtgtctaattttatcaaccatgcacaaatgccaatatagacagctactctattccagtgcttcatcatagaagcatagaagtgtctggtggctcaagaatttcatagactaaattggatgtactctctaatgatgacatacaatgttagtgccattggaatctatacataggccgcgaccttagttgtccacgatcctcttggactagattagaaaccaactctaattagaggttagagataaaacagaacaagattgcatgcatccaattcatttagagttagagtcgattggaatattgtaactaagtaggattcctcttgtaataggcggctcccgcctgtacaaatatacaatcccaccgaccctagaggtcaaggcaagcaattaaagattgttgtgtttcttcaatggtattagagcaagtcgacattgacctcatcaacgacaagattccgtagcatcatccagctcagtagtactgacgactctcttaggtcaaagcattgttgtaaagctcaacaagaccaacttcgctctttgaattcatgagctctgaggtgcgcaactacaaggctccctagatggcatgattgtagcgtccgacaagatctccgtcaagcaagatggcaagatgattgacgatgtcaacccagagtacatccaatgggtcgcgcttcagcagcaagtccttagcttattcatgacattcataactcaagaaagtcatgggtcgggttgccatctacgagacaccccatgaggtgtggtcagaactgcaaaagacctacgcgtcgtagtcatgagcccggaccgcgaacacacggattgccctgaccacaagaaaatgtaatatgataatggctgaatacattaccaagatgaagtcttttgcatatgagctgacatttgcaaagacgaatgttgatgatgaagaacttgtacaaaccactcaacacctcaaagttctacaaatcatgtctctaatgcgcctgatcaccatgctgctgcagcatcgagcttttggtccctcaagcagcgagaaagcagtgcagtggaaccttcacatgacttgcatcatcagagtgctcggtttcatcaagacctgcaactccatcacctcaatgacgtcatgttcccattgtttacatagatcagcgtcctcagacaagattacaagatgaaaaaattactcatactgaatatggctattttatcatcactggtgaacctcaagaatgctatgaatgctaaatttgatacgcgatgagaaataacacttgacatctagttgttgctgatgagaccaagaatgttattaactgcaagtagagatgacaatggggccctgatttacgactccccgttgggaattcttccattaggggatgaggatggggatggggaagtttctccccccacggggatgtaaacgggaaaatttttccactcgacgggtaaatagagatggggacggggaagtattccccatccccgttccccgcggggaccgctaaacttgcacgtgaagatgttttcatataatagttaatgataaaaataaatatttaccttgccaagagattactcattgtacaaatgtgttcattttgatgtacacataattatttttttacatctgacaatatatatgtgacaatgttttgtgttaataataaaggacgtacatcctaattataatttaaggggggcacgaggatccccgtcagggatttattcccacggggacggggatgataagctattccccaacggggaattccctgttgccatcactaactgcaagtggctatatagaatcaaatggaagacagatataacactgaacaaatataaagcaggctggtggtaaatggttttaaggtagattatgtggagacattcagtcttctggtcaaatcatctactatcaggatcattatgggatagagccagtgtgggaggctctcgcatgagtgtgttctagggaaggataaaccgaggaaaccctttcatcagcaaatgttgtacaaccacagcttaatcatttaatagatttcctgtgagacaatttttttttctaattccatggtgtggttcgaacttgtgaaaagtacaaagctcatattgcttaatgatggaaaaaacacaaccatgcttgagttgggtgctataaattcatgatatggtttaatgtcataggactggactggcagatagaagtaaatcgatatttatctcttgtacgagttgtgctaggaaaatcatttttgtgatcatttactttccactgtttctctaaggctgatgtcaatgctgttaccttcgctgatgaaactggaaacgtgttgtactctggaagtgatgatagtctctgtaaggtgtgggacaggcgttgcctttcaggggaaaagtcagcaggtattttgacaggtcatttagatggagttacatttatcgatagccgtggtgatgggcgttatttcatctccaattgcaaggatcagagaatcaaactttgggacatcaggaaaatgtcttccgtcgtgagatctcgcccagtgagtctagtggactgggactataggtggatgccatttccatcagaagctcataatcttaagcatccaggtgatcagtctgtggccacatacagaggccattcagttctgcgaacacttatccgttgctatttctcccctgtgcacaggtcaggaacagcagatatttttatttatgtcaccagcatactgaaattttcctttgaaatactttcaaaaggttacatttgttagtggaaagttgaccgttaacttgagtaggaggccttgcagttgtgctacctgcttctaagcttgtaattagtgatatataatgaatatttggtctaatttttgtatttatctatgtaattaaggcattgcttcgccttacgctttagcgcttaaaaggtaaaaaggaggtcgataattaagatcatacatctaaaacaattatcagtgatgacatgaataatttccatgttcagttcatatcgttgtgctttctgtttcagcacgggtcagaggtacatatacacgggatccagtgacaagtctgtacatatttatgacgtggtaaccggggaggctgtcaagaggctttcgtggcatggctccatcatcagagactgcacctggcatccatactacccaacgctcgtcagctcctcctgggacggcttcgttgcccggtgggaggcctcgggcgacgacgacgaccattcggtgctcgtcgccgacgagatgagaggaagcccttactaccggagatacggcgatcccttggtgatgtagagatgtctgcaaagtggttaacaccaaatggtagtgagcatgtactttgctttgttgtttgggaattacaactgagcagcatgtacagtgccgtttggctcatgtggttgtatagccttacgataaataatatgtagggatacagaaagaacacatgagatcgaagcgactttataaatcctatggaatttatagaaacagacaagatcctctttccttgtttttaaaaactttataaatactttttcgaattttgattggattggaatacaccgttgttggattcagaaattatccattcatctcactcactatgggacaatgtac

SEQ ID NO: 10460 - DNA, 1051 bp, Zea Mays
ctttgcttcctccaccaccaccttttgtcggcgacgtaggcaaaacaagataaacatcaaccccaaccccaacgactccaactccaagtcaaagagagcagcaagagcacgtgccggccgccgatcaaatccaccgagcaatcgcgcgcggccgccgaggtgccaaggcggcggcggtcggtcggtctgcgatatacgatggcggcgccttactacggaggtcctccggcggcgccggcccccgtggcggtggtgtccccgcagttctgtgcgccgtacgtggtgcccctgacggtgaccaagaaggccatcagcctctccgacggcgacttcaccgtcaccgacgccaacggcgccaccgtgctgcaggtcaagggcgccgtcttcagtatccgccaccgccgcgtcctcctcgacgccgccggccagcccatcctcaccatgctggagaagatgggaggtgttcagaggggacagctcgaacgagagcgacctgctcttcaccgcgaagaaatcctcgatattccagctgaagacggagatggacatcttcctggcctccaacaccgcgcagcaggtgtgcgacttcaagatcaagggcagctacttcgagaggtcgtgcgccttctacctcggcaactccagcagcatgatcgcccagatgaaccgccagtttaccgtcaccaatgtgctgcttggaagggacacgtttggcgtcactgtgttcccgcacgttgactacgtgttcgtcgctgctcttgttgtgatactggatgagattcatagggaacggtccgactgaggaacataccacaccacaccaccaagcttctccaccgttgctcgaccatgctatgctatgtatcatcatcacaggttattcttgtcaattatatactttccatgtatgtatatgtaagtattaatgagttaatacactatctcctgatgtataagtttttcttcatccatttgaatatagacataaaaatcaaatgactattattttgggatgaaatgagtactatttagtgtcgattcaagccacaaa

SEQ ID NO: 10461 - DNA, 1288 bp, Zea Mays
atggccaccgcgccctgtttctctctcccctgcgctcagctcgtcgagctctccctctccctggttccgcgcgactccggcatcgagctcctccccgcgcgtgcagccaccgttctccctcagctcgccggcgatgctccggtttcctgctcccatctccctagccgcatcgctggcccttcggacctgaccatcgtttgccgctgaaccaaagttagattaattttcagtttccctcgcgtggctctttggagataagctcctcgccggctgtcgctcccaattttcagttcgccgacatcgtcgtgttccttgtttttcctcgtcggccgacctcgccacaacttagttcgtccgtcgtgctggtcgctatcccatgctgtgcctattagcttggaccctgcctagctcgccgtcgcgtcgtttgccgtcgatctcgcttggccctatatcgttaggctagtcgaccatagtcgttgctgcgcgcttgtccctgatgcccatcgtacagtatttgggtctcgccgattggctgctcttgcccgcagttaattccgcttcgcagctcacctgctgttgtggtgctgctatcccacgacactcgtaccggtgcatcgtcgcctggctgggagttgtcgcccctagttcgctttcgtccaaatcgccaccgcggatgcttgggtctctggtcgcgcgtctttctatctcgcgctcatctgatctgatgcctcagcaacaccgtggttgtccttcctcgcggtgttgttatttaccctgctattgtaatcgtgcctcatgcgctgctcgtctgaaatacctaagccaagtgaatatcctgcgcgactcatgttcggttcgtccaaattattcagtcgaggaagattccaagagttgtggattgaagagaaaagtggagcttcgttctatactcgtcagctgtttgttcgaagacctcaatcaaagactgtcatcgttctcgcaaataaaatagtgtatcgagtagataatggacaagaactgagtcgaccacaagatgctggaaagcgtatgtttctccacgagatgatgctgacggacaaaactgaagatgggcagacgaaacaagtatcggaacaaaagctgatcgccaagtggtcgtcgtctaacaaatactaacgtagtgtttattccaggcaagccccggtgcatgcaaccccttccttgtgtttttaaataatttttacacactttaagtctagcgaaatgtgcattaggtttatatgagttgcttggaaaccctttgatgcat

SEQ ID NO: 10462 - DNA, 1310 bp, Zea Mays
gattatgcctttctagcacctcctggccaccaaagaagcaaaaatcttccaggttcccacccacacggccacacccactgttctacatgctcatgcatcctcctaatgtaacctgaagctttaagaaaacaaagtgctcccggaagactccaagctgcagctaccggccttcctctcccccattccaattccgagaacaggggcggcggagtcaaccaggtacgatgtgctcggtagcgaggctggcgtttgtgcttgcactggccatagccgcctcgtcaattgaggttgcggagagcagagattttaatatctttgctcagggcagcttgcctgatgcaaccaagggatcgtctggtctagctgcaaccagtggaaagttgtgtcagttatgcgagcagtactcatccgaggcgctcctctatctcacacaaaacgagacccagactgagattcttagcattctacaccatgaatgtgccagccttgcccctctcaaacagcagtgcatcacgctggttgactactacgtaccccttttcttcttggaggtctccatggttacccctgagaagttctgcgagtcgatgcatctctgcaagaaggggatgaagattagcctacccacccgggagggtacttgtggtttgtgccaccatgttgttgttgaaattcttatcatgcttaaagaccccaacatgcagctggaagtaatcgacctactcaccaaaacatgcagcaaggcgcagaactatgaacatgcaagcggctggtcctcaagtatattccacttattctggtgaagggccagaaattccttgagacaacggatgtctgctctgtgatacatgcatgcaaagcaggcacacaagcatcaatggaagccatgcctctgtctgccatgttgtgaaggtgatgcgaatcagaataaggcttatttgcctaggagatcaaattggggagaaacgatgaaaagtcagatgactgttttaagctctcttcctctattgctgaaacactattgatcggtgaaaattcggctgtgtaaaaatcttgtgtaaatttgggggtatatccattgtttctctgaagtatacagcaactgcagctacatcaatctcttcggcattgggttgagaagttctaagcagtaattgcattttactgtatcatctatttgtttgtaactactgggagttattaattccttgtttctctgttgctctgtcaaattctctgtaacattagagttatactaaaacattaagtttgctttcgaaataataaaaacatttataatacagagatgg

SEQ ID NO: 10463 - DNA, 1764 bp, Zea Mays
gattatgcctttctagcacctcctggccaccaaagaagcaaaaatcttccaggttcccacccacacggccacacccactgttctacatgctcatgcatcctcctaatgtaacctgaagctttaagaaaacaaagtgctcccggaagactccaagctgcagctaccggccttcctctcccccattccaattccgagaacaggggcggcggagtcaaccaggtacgatgtgctcggtagcgaggctggcgtttgtgcttgcactggccatagccgcctcgtcaattgaggttgcggagagcagagattttaatatctttgctcagggcagcttgcctgatgcaaccaagggatcgtctggtctagctgcaaccagtggaaagttgtgtcagttatgcgagcagtactcatccgaggcgctcctctatctcacacaaaacgagacccagactgagattcttagcattctacaccatgaatgtgccagccttgcccctctcaaacagcagtgcatcacgctggttgactactacgtaccccttttcttcttggaggtctccatggttacccctgagaagttctgcgagtcgatgcatctctgcaagaaggggatgaagattagcctacccacccgggagggtacttgtggtttgtgccaccatgttgttgttgaaattcttatcatgcttaaagaccccaacatgcagctggaagtaatcgacctactcaccaaaacatgcagcaaggcgcagaactatgaacagtaggtgagctaagttcaagaaagggaacctcagatgtgctatgagtgcacggggctatattcaatggtatctgagaacaaaaaaaaacagcgagaattgagaaaccttgaactgattgagcacttcagaaagtgaatacttacaaactagaccaacctaggtgacattttattttatttaaatacaaaataggcatctaaatatttacatcaaagagaacttgaacctagattgtctaggcacgcatccatgcctcgaccaactgagctagttcggctttctaattttagctgtttattccaatctgcctaaagatatatgaagttaggctgttgctgatgcctgcaccctgcagaactgtatcttaagttaggttgttgctgatgcctgcaccctgcaggtttgtgcaaaatactccatatacagaacagggggtctctttctttgaaatctgatgtttgctacctctgttatcttctgttcataacattcttcttttcatccctcagtgcaagcggctggtcctcaagtatattccacttattctggtgaagggccagaaattccttgagacaacggatgtctgctctgtgatacatgcatgcaaagcaggcacacaagcatcaatggaagccatgcctctgtctgccatgttgtgaaggtgatgcgaatcagaataaggcttatttgcctaggagatcaaattggggagaaacgatgaaaagtcagatgactgttttaagctctcttcctctattgctgaaacactattgatcggtgaaaattcggctgtgtaaaaatcttgtgtaaatttgggggtatatccattgtttctctgaagtatacagcaactgcagctacatcaatctcttcggcattgggttgagaagttctaagcagtaattgcattttactgtatcatctatttgtttgtaaaagaagtgatcaagggcacaacttgccttcaacgagctcctgctcagctatctctacttgttgaagc

SEQ ID NO: 10464 - DNA, 1706 bp, Zea Mays
gttgctgagaggtgttgttgtgaatgctgtagctcctcgttcttattctgcctggaatcttcccctggtgaggcacgcggattaagacccgcaagcggaacattgcagctcctttggaccctgcatcattctctgatgcaattgtccagatttatctggataatggtggagatctggaactcgtcgccaaaagtattgagtcttccgacctcaacttctcacgttacggtgacaccttttttgaggtggtttttgttggaggacgcactcagcctggcactgtaaaacctgaagaaggagaccgccacccttattctatgttagattgtgtggcacagcgtgaaacaattttgcctttcgtactctatatccagaaaacattgcgcaggaggcctttcttaataaaaaatcttgaaaatgttatgcgcaaattcctccaatccttggagttctttgaggaaaatgagaggaagaaactcgccatattcacagcccttgcattttctcaaaagctgtcagggcttcctccggagacagtgttccagccattgctcaaggataatctggttgccaaagggatagtactttcattcataactgagtttttcaaggagtacctgaaggaaaacaccttggatgatttgattgcgcttttgaagaaaggaaaaatggaggacaatctgttggacttttttccatcagctaagagatcctctgaggctttatctgagcatttcatcaaagaaggtctgactagccttgttgagtacaatgaaaagaagatgtttgaagttaaacttaaagagataaagtcaacactgaccactatgatcaatgatgaggctgcaatacctgaagtgattgagactgtcaaacagcaagttaaggatgctaaatttcctgatctagaggtcattcgcatgttgtgggatgtgctcatggaggctgttcagtggtctgggaagaaccagcaacagaattctaatgcagcacttcggcaggtgaaagcatgggctgagcttttgaatgctttttgcacgagtggcagactcgaactggaacttatatacaaagtacagacacagtgctatgaggatgctaagctgatgaagctgtttcctgaaatcataagaacactgtatgaccaagatgtcctagctgaagatactgtcctgctttggttccgtaaaggttcaaaccagaagggcaggcaatctttcgtgaaagctctggagccgtttgtcaaatggctcgaggaggctgaggaggaagaataagtttttgatttggagaacggccgaatgctggcctaagtgttactttatatttctgaagttagaagtttgtggaggaattattgctgctgcctcttactgccgagaactttatgttatgatgtttagccacatggatcccggctgcagagtgctataatatgttgctgttaaaactttgtgtcgagcatttgttgaaacttttgttatcattactgaaaggatttataatgggacgtcagtttactgtcggtattgtacaattactggattattcataagctgcagaatgctacaaatgtcatttctggcaaatggaatattgaaatgttacgaatgtaaggactctccctgtctgccgtaatttagagcagcctaagtagggctcctttggaatccataggattctcaaaacgtaggattagaaaaaac

SEQ ID NO: 10465 - DNA, 1517 bp, Zea Mays
actgatcgagcgaaacgacactcaaagaatatatctaggtgcaacgactgataatttggatcggaggaaatatctaaacttgtagagtgctgtgaagggattaatgttatgaacgaaggtaaagaagagtcagaaaactgttgcgtggataagctggaggacatggaagtggggaattgtcccaccagatgctgcaaggatgcttcccatagttcagcctccaggaaaaaagtcgtgcctagcatttcagaaaaccaggcttgctgtgcaaccactttctgcaatgaaagatcttgggaaactaatgcatggcgtgctcggttagtaaaggcagtttgtcagaaagaatctattttgccaacgaacacagagaatccaattttaccttcttccataggaatttcatgtgatgcagtagagttctcaggcaaattggtaggttcccaaggcaagtttcaaagcctgggtgtaagtagtaatgctctagaaattcattctcatgacaattgccaagatccggttctgcacgaaagccataaggatgagcctgttattgctagaggtgagtcagcatctggtgttaatattgttgcaagatgtgagtcggtacctggagttgattccagcaattttgtgagaggcaaagaaaaagttatgtacaatgacagcaattgtggtaacaatacaagggagggtgatgacagcaatgagagcatcgagagctgtacaagtacaaaagccccaaagcgcaagcatgcgcagtgttgtgcagccacgatgccttcttctggaaacaaaagatttagaagagaagacaatgagagttcttgttcgggattattgcaaaaatgtggtacatctttcttcaactggatgtcatcactcacgaatgggttacccatgctagatggagccactgctgccgttccacttgaacagaagttttcagcaagtacaggagatggatctgcagcaccttcccagccacttcaaaacaaccgcagcgttcctatgcaattttttggcttcaattcgctcttccagtccctgtatactcgtaatgttatgataacttcaggagataattgtcgtcaaccagaaagcaactgtgctggacatgtgttcaatagactgaccctggaattaaatgatagcaattctatgttgaacaaagaaattggcatgggtagagaaactcttgatctggctactcagacttcagctgctgaaggatttcagatgatttctggtggctgtagaggaaatgttcagagtcaaattgatattttccaaatgagaccagaaagaaatatgaaactgcccagttccagtaagtttagctctagatctctagaagaaaaacaaaatcagtgcacagctgcctgctcaaatgatgcaacacaaaataaaggtggtttgagggaaagcttgtgggtaactcggcttttgccaaaagcatcagtagaattgatggagggcacaccatgcaatgtagagaatgctgttagtccacaggc

SEQ ID NO: 10466 - DNA, 1794 bp, Zea Mays
tctggcctcattcattggcctcaaccctcaagcatcggctgtgcggacatgctgcgctcctgcacctcctcggccgccgctcccagattcaccgcgccaggacgctcgacggaccgggtgcccgccccctggccgcccttcgcagcggtccccgcctgctgaaacccctcccgcccttagctgtaggcctcgcggctcggcgcggtcgaaagcagctggtgcgcgatcgagaagagtccgccggcttctctggtgcgggctgcggggtgcggtgtttctgaggtccgccgcgccgcgatgaggcgaatgcagcagtgagatgagatggtagtgatcctctactcccagagctaaacttgtagagtgctgtgaagggattaatgttatgaacgaaggtaaagaagagtcagaaaactgttgcgtggataagctggaggacatggaagtggggaattgtcccaccagatgctgcaaggatgcttcccatagttcagcctccaggaaaaaagtcgtgcctagcatttcagaaaaccaggcttgctgtgcaaccactttctgcaatgaaagatcttgggaaactaatgcatggcgtgctcggttagtaaaggcagtttgtcagaaagaatctattttgccaacgaacacagagaatccaattttaccttcttccataggaatttcatgtgatgcagtagagttctcaggcaaattggtaggttcccaaggcaagtttcaaagcctgggtgtaagtagtaatgctctagaaattcattctcatgacaattgccaagatccggttctgcacgaaagccataaggatgagcctgttattgctagaggtgagtcagcatctggtgttaatattgttgcaagatgtgagtcggtacctggagttgattccagcaattttgtgagaggcaaagaaaaagttatgtacaatgacagcaattgtggtaacaatacaagggagggtgatgacagcaatgagagcatcgagagctgtacaagtacaaaagccccaaagcgcaagcatgcgcagtgttgtgcagccacgatgccttcttctggaaacaaaagatttagaagagaagacaatgagagttcttgttcgggattattgcaaaaatgtggtacatctttcttcaactggatgtcatcactcacgaatgggttacccatgctagatggagccactgctgccgttccacttgaacagaagttttcagcaagtacaggagatggatctgcagcaccttcccagccacttcaaaacaaccgcagcgttcctatgcaattttttggcttcaattcgctcttccagtccctgtatactcgtaatgttatgataacttcaggagataattgtcgtcaaccagaaagcaactgtgctggacatgtgttcaatagactgaccctggaattaaatgatagcaattctatgttgaacaaagaaattggcatgggtagagaaactcttgatctggctactcagacttcagctgctgaaggatttcagatgatttctggtggctgtagaggaaatgttcagagtcaaattgatattttccaaatgagaccagaaagaaatatgaaactgcccagttccagtaagtttagctctagatctctagaagaaaaacaaaatcagtgcacagctgcctgctcaaatgatgcaacacaaaataaaggtggtttgagggaaagcttgtgggtaactcggcttttgccaaaagcatcagtagaattgatggagggcacaccatgcaatgtagagaatgctgttagtccacaggc

SEQ ID NO: 10467 - DNA, 1325 bp, Zea Mays
ttagaatgaccctttttgtttgtttttggaagtatgaccttgctcgtttgatcattgggagtgaaggaactttgggtgtaattacagaagtgactttacgactccaaaagcttccatctcattctgtagttgcaatgtgcaatttcaaaacaattaaggatgctgctgatgttgctattgcaacaatgctttctgggatacaggtttcaagagtggaattgttggacgaggttcagataaaggcaataaatatggcaaatggcaaaaatttgcctgaagtgccgaccttgatgtttgaattcatagggacagaagcatatgctctggaacaaactctcttggttcaaaaaattgccactgaacaccatggatcagattttgtttttgtcgaggagccagatgctaaagcggaactatggaagatcaggaaggaggcactttgggctggttttgctatgaaacctgatcatgaagctatgataacggatgtttgtgtccctctatccagacttgctgaatgcatatctacatcaaagcgattgcttgatgcgtcgccattgacttgccaagaggaccaacgaaaggaagcagagagactaaaccatttcatggtccatacagctctgtctatggaaggtacatgcacaggagagcatggtgttggcacagggaaaatgaagtacctggagaaggagttgggcatcgagtcactcaggacgatgaaaagaataaaggcggcgctggatcccaacaacatcatgaatccgggaaagctgatcccgcctcacgtctgcatatgaccgtcacctgactggaggatcgatccccccatggccatcagtgggcttgttggctcactcatcaaaagctttggttccgcgaggcgtgacgcggtgctctgctgacagttgcaataatgcgctgaactgctctgtgcctgtatggcatgcgttggaggcaaatgcacgtaggcgtcacatcaaaactataccggtaccaaaaaaaaaaaaaaaaaactgaactgcctcagggaagggatgggaaataatggagcaaacattcgtctcctgacgccgttttaacaggagaaccctttttacgatcaagtacagcttgacggggccacctagcggtggcgagacggcagcgttctgtactacgcaccacttccgttgccggccgagtcgtcggcacggcacccaccacctcaccaggcggccgcgccacgtccttaccccacgtccccactgtcgcttccggcgatctcgtccggccccgagccgttctcctcgcaaaacgatgctacttccggatcctgattccca

SEQ ID NO: 10468 - DNA, 2261 bp, Zea Mays
ctttaagctcaccggtcggtggctgggcgccttgccgccttgggttaatcacctgcaccgcaagtaacccaacactgtcttccaatgcaagtgactgccccgacccatcatgcgccaggcgaatcaaaccactacctgatttgtttaccccccgaaatttgccgtctcctcgtctcgctcctctccctgcgcagcccccagatccggcaccgcccgctcctcgatccccgcaccccacgcccgcaggccgggaccggcggggtcgcgcgccgggtaggaggaggagaagaggaagggtggtatggcggcgccgccggcgagggccagggccgactacgactaccttatcaagctgctcctcattggagacagcggtgttggcaagagttgcctcctgttgcggttctctgatggttccttcactacaagctttattaccacaattggtattgactttaagatacgaacgatagaattggatggcaagcgtataaagctacagatttgggatacggcgggccaagaacgcttccggactattaccaccgcgtactaccgaggagctatgggcatcttgctggtttatgatgtcaccgatgaatcttcttttaacaacatccgaaactggattcggaacattgaacaacacgcctctgataatgtcaacaagattttggttggcaacaaggccgatatggacgaaagcaagagggctgtacctactgcaaaaggacaagcacttgctgatgagtacgggatcaagttttttgaaacgttttggatccctggacctttgtttgggtttcaataaatttccctgtaaggacttgagctcctccagttctttcaaaagaaaaattgcatgacagttgtcaccttcagtgaacagtttctttaataaaaaaacagagtttgcagttgtttttgatctcacagatttctgtgtcttcagagtgcgaagacaaacctgaatgtggagcaagtgttttttctccatcgcacgtgacatcaagcagaggcttgcggagactgattcaaagccagaggtacaaataactgtgcataggtatgcttgtcgttccattattcatcgtgttcactgttctgaacaatgtaggacaaggcaatcaaaattaacaagccagaccagggttccgaggcaccagctgcccagcgatctgcttgctgcggctcataagcagatgcacgatggccatagcctttggttatttgacattatttatttcccgcttggctgttataggaaggatttgaagaagccacttatgatataccgatgtggttgtactcgtggttgcttccattctttgaagcaaccacctcttgctgttgacgtagctattgctattgctgggagctattgcactcttgcattggatccgttggaaaaactctcccctccctacagtgtgtaatgaatgaaatccatgtcgttgggtttgcatggaataacgtgtcgctcttgtgtgtgtgttttaagtgtcgccgttccttgataatcgaatttgttgggaccaagaatatatctacctggaatgtctgtatccacagaaagtctggatcttcgatttaggttaaaaggaaacgtatctggaaatagaccgctgcatgttgtaatgtttgaaaaaagagtaaataaaacttgtacagttgtatatactataattgtaggcagcttgtcaaagaggagggcagtccagtatcagcgatttccgttcgcagtgcgctgtgttgccgagcacggcgtcattccggcacttggcgcagttccccgacggcgccaggctcaagtccaaacagattccgctggcacagccagcgccgccaacgttggcttcctcaaccgacgtggcgtccccagagcggagctcacattcggactcggctgccagcgaagtcctgcggtgccgacgcatgtggccgcccagcgcctggccgaccgcgaactcgagcccgcagatggggcagccgtgcagcctcggccccgccgcgctctcgcgcggctcatccagcctcgttcggcgtagtagccccgggtcgccgacgccgtaggggtaagggtagggcttggggcgcctgtggctggcgcggtggccgcccagcgcctggaacgtcgggaacctcctcctgcacgtcttgcactcgaacacgcgcccgcgcgcgccgagccccgccgccgccgtcctcgcgccgccctgttgccgctgcgagaggagcatggggacggcgccggtctccat

SEQ ID NO: 10469 - DNA, 3916 bp, Zea Mays
tcaggatgcactttctacccttttctctctgtacattcgtgatcttggccctgctgttgaatttggagatgcacactggcttggaagacagggtattgcattagcgctccactctaccgctgatgttttggccgctaaagatcttcctgttgtcatgacatttctcatctcacgtgccttggctgatccaaatgttgatgttcgtggtagaatgattaatgctgggatccttattattgataggcatggaaaggaaaatgttcctttgctatttcctatttttgagagctacttgaataaaagggcatcagacgaggaaacatatgatcttgtgagggaaggtgttgttattttcactggtgctctggccaaacatctatcaaaggatgatcccaaagttcatagtgtcattgagaagttgttagatgtccttaacaccccatcggaggcagttcaacgtgctgtctcagattgtttgtccccacttatggtatccaaacaggaagagggtcaaactcttgtttctagactcttggatcggatgatgaaatgtgaaaaatatgaatgtctgcgaaatctcgtgaaggagctttacttgggtttgagtgcctgtgtgagaagctcggcaaactatttgagcctgcgtgaagctgccgagtgtgctgctcgggcaatgatgtctcagctcactggtcctggtgtgaagcttgtccttccttcacttcttaagggtctagaagataaagcatggcgtactaagcaaagcagcgttcaacttcttggtgccatggcatattgcgctcctcaacagctatctcagtgtcttccaaagattgttccaaagttaacagaggtactaacagacacacatcctaaagtccaagcgtctggacagacagctctccaggaggttggaagtgtcataaagaatcctgaaatttctgcactagtccctattcttctgtcagctctgatggatccaaatgcccacactaaacactctcttgacatccttcttcagactacttttattaactccatagacgcaccatcgcttgcactgcttgtgcctattgtgcatagaggactgagggagagaggtgttgagactaaaaagaaagctgctcaaatagttggaaacatgtcttctttagttacagaaccaaaggatatgatcccatacattagtttgctcctaccagaagttaagaaggttctagtggatcctatacctgaagtgagggcagtggctgctcgagctctggggtctcttataagtggaatgggtgaagaaatcttcccagatcttgtgccatggttattagatactctgaaatcagataatagtaatgttgaacgatctggtgcggcccagggattgagtgaggtttgttttccttttttttgctttgagtgccttcctcttttgtagtatggcatttcttccatgtttgattatattcaatttccaggttttagctgctcttggccaagattattttgaccatattcttcctgacatcatccggaactgttcccaccaaaaggcttccgttcgtgatggacatcttacacttttccggtatttgccaaggtccttgggtggtgttttccagaattatctgcaggctgttcttcctgctatattagatgggcttgctgatgagaacgaatctgttcgtgatgctgcactttctgctggtcatgtctttgtggagcattatgcaactacgtcattacctctgttgcttcctgctattgaggatgggatcttcagtgataattggcgtatccgacaaagttccgttgaacttcttggggatctcttatttaaggtcgctggaacttctgggaaggcaatccttgaaggtggaagtgatgatgaaggtgctagtacagaggctcaggggcgtgctattattgaagtacttggaagggagaaacgcaatgaagttcttgccgccatttatatggttcgttctgatgtcagcttgactgtccggcaggctgcgttacatgtctggaagacgattgtagcaaatactccaagaactctgaaagagataatgccagtacttatggacacacttatttcgtctcttgcatcatcttcctccgaaagacgtcaggttgctggaagatcacttggtgagcttgtaaggaagcttggtgaaagagttttgccctcaattattccaatcctgtcacagggactcaaagacccaagtgctagcagaagacaaggagtttgcattggtttgagtgaggttatgggcagtgctggaaaacaccagctattaagttttatggatgaacttattcctaccattcgtactgctctatgtgacagcacccaagaggtccgtgaatctgctgggttagcgtttagtactctgtacaagagtgctggactgcaagccattgatgagattgtcccgacattgctacgggctttggaagatgatgatacatctgcaacagcccttgatggtctaaagcagattttaagtgtccgaacagcagctgttttaccccatatattgcccaaattagtccagccccctctctcttcatttaatgcacatgcattaggtgctctagcagaggttgctgggccaggtttgaattcacatattagaactgttctcccagcattgattcttgctatggatgatgaagatgtggatgtaaaaaactcagccaggaaagctgctgaaactgttctgttggttattgatgaggaaggagttgaaactttgatacctgagcttctaagaggaatcactgacagtcaggcatcaatgaggcggggctcagcctacctaattggtttcctctttaaaaacactaaactatatttggctgatgaggcttctgatatgatgtcaaccctaataattttgttgagtgatacagacaaggctactgtatcagctgctttagaagcattttcaagagttgttgcatctgttccaaaggaacagctcccaacacacataaaactagtgcgcgatgctgtctctacagccagagataaagagcgtagaaggcgaaagggtgtgcctattcttctgcctggcttatgtctttctaaagcactgcaaccttttcttcctatatttcagcagggtttaattagtgggtcggccgaaacaaaggagcaggcggctgaaggtctaggagagttaattgatgtaacaagcgagaagactcttaaggaagttgtagtgccaattacaggacctcttatccgcatccttggtgatcggtttccatggcaagttaagtcagcaatcctatcaaccctgacaatcatcatcatgaaaggtggaattgcacttaagcccttccttccacaacttcaaactacattcgtgaaatgtctacaggataacaataagtctgtccggacgagggctgcagctgctctcggaaagcttagtgctcttagcacacgggtggatcctttagttagcgatcttctgtccatgttgcagtcaggagatgaatctgtaaaagaaagtgtgctttctgcactcaaaggtgttatcaaacatgctggcaaaagtgtcagtgctccaataaggtcacggggatgtgctcttcttgaagatctgctgcaggctgaagctgatgatatccgcagttgtgctgcaaaagtgattggcacattgtctcagtacatggatgacagagagattccagatttggtgcaaatccttttggaagtgggcacctcatcggactggtgtaccaggcatggtgctttgttagcattatcatccatatcaatgcattctccatcaaaattatgtgatttggcatcctttccatctctggttgatcttctgaaagattctcttaaagacgacaagttccctgttcgtgaagttgctacaagaactctggaaggaga

SEQ ID NO: 10470 - DNA, 1497 bp, Zea Mays
caaggatgaatcggaggacgaaagggatatagctagttcgttgggatcccgatggcttctcctggcttcacgcacggccatcctatttgtgacaataaggcccttttccaagagcttgtatcgccggatcaacaggttcttggccgagctgctgtggctccagcttgtctgggtggtggactggtgggcaggcgttaaggtacaactacatgcggatgaggaaacttaccgatcaatgggtaaagagcatgcactcgtcatatcaaatcatcgaagtgatattgattggcttattggatggatattggcccagcgctcagggtgccttggaagtacgctcgctgtcatgaagaagtcatccaagttccttccagtcattggctggtcaatgtggtttgcagagtacctctttttggagaggagctgggccaaggatgaaaagacactaaagtggggtctccaaaggttgaaagacttccctagaccattttggctagctctttttgttgagggtactcgctttactccagcaaagcttctcgcagctcaggagtatgcggcttcccagggcttaccagctcctagaaatgtacttattccacgtaccaagggatttgtatctgccgtaagtattatgcgagattttgttccagccatttacgatacaactgtaatagttcctaaagattcccctcaaccaacaatgctgcggattttgaaagggcaatcatcagtgatacatgtccgcatgaaacgtcatgcaatgagtgagatgccaaaatcagatgatgacgtttcaaaatggtgtaaagacatttttgtggcaaaggatgccttactggacaaacatttggcaacaggcactttcgatgaggagattagacctatcggccgcccagtgaaatcattgctggtgaccctgttttggtcgtgcctcctgttgtttggtgccatcgagttcttcaagtggacgcagctcctatcgacatggagaggagtggcattcactgccgcagggatggcgctcgtgacagggctcatgcacgtcttcatcatgttctcccaggctgagcggtcgagctcagccaaggcggcacggaaccgggtcaagaaggaatgaaaacggagggtggaaatgtgattctgggctctatttatgggcagctttcaaaatgactcgattcatattaatgtatacagcaccaaattccagacagaaacaggatgctctgctcctcttgtatttgtgtgcaggaaagaattttagggagttcatttttgcccccctcttttgggcagaggaactgtaggacatgaacttgatgttggtacatttgccctgtagacattctggaagcctttcagtagttcatttatcagtaaagcttgcatctttcatccatgtagttgtgcaccttgtctgtcactcatcacaatgttgttgtgttctaactgttctgtgatgaaaagcaagggatacagtatgttcaataaagc

SEQ ID NO: 10471 - DNA, 2050 bp, Zea Mays
cgcgatctcgctcgtgatattccagccccgccgccgccgtccccgcccccatccgtgacaccccaccatcaccgccgcgccacgcgcgacaactccatcccccgtccgcacccctaccccgagcatcgcagcgcctcccgcacgaggtcgttgcgcttgtcgatctgatggcggcccatggcaaaggagcaggtagaaaatggccgatgccgaggatatccagcccctcgtctgcgacaacggaactggcatggtcaaggctgggttcgctggcgacgacgccccgagggccgtcttccccagcatcgtggggcgcccgcgccacattggtgtcatggtcgggatggggcagaaggacgcctacgtcggtgacgaggtgcagtccaagaggggtatcctgaccctcaagtacctcagcttacacatcacattattccccacattacagcaatcagtgcaacaatcagagcatttatttaggttctgcaaaccgatcatgacaaaaccaaaggtagctttgaagccgcagactctgtctccacaacctgaagcccaagcacctcatgatcctcaaacaccagagcaacaacaaagcgggactggtgtaggcgtgtagctggtgagccgggtagtgaaggaggtgtgtaccaggcctccagtgagcaaatgggcatggtgccggatgcatctgcggccggtggcaggaaggtcgagctggatggggacatgcgatggacatcacagaacagaagacgaaatgaatcgcaaggggaaactaacatgcgagagaggaggagctagccacaaccaaagagcttggttcaatacttcaatggctagaataatgaacgatatgaagatcaggtagcattatatatgtcaataagaagcagaggagagaagcagcccacatcgcaggagacaaggacttcacttgtttggccagttcaggacttcaggatgttgtcgatgatgtccatgctatattccctcgcttcatgcttaacaatgagggagagactaagtgagcaggggctgaaggccgttggtgctgtcagaatgtttttttggagttttggtggatgatgctcagtgactgcaatgcaaaggatccttctgttttgtatattgaatgagattacatcactgtttttttcttagcgatatgttgagctcatgtgctcgtttatgttagtcgatctctggctcttgtagtaacttggaaagcttgctgctttttttaagggcatacatgcctgtgatgtgtggtcatgatcatttttttctcctgttattttagttgtcgtatcataaatgccatgtttgcattggtgttccaacatgtcaatattattgaataaatgtttgcattggcggcagcggggacgacgctaagtcgagcaatggcgaagcggcccgtggtggcagtaacggtggagagaagcagggggatgaatccaacggtggcgggatacttagcgctgtggcttccaggattggcgtggtcgtgtccagcgccaacggggaccgcagcggcagcgctgaggatggtgccaagacgagcgctggcgacgctggtcacggtagcaagggcgaggagaaggggcgtggtgtgaacggtggtagaatagtcgagcagatcatttccaatctgccctcagatgatcaggcgcctgatgccgatgaagcttccttgctcatcgccattatcgaagattagctccatgttccgaaggctctctaggtcgtcctcaacgccaggatcaaatcatcagctgagccggagactgaaaacaataaagaaaagcaagcagctggtcatagtaaacatcatgtagcgaggcttagcagattgcttttttttcccgttagaatcagtccacatgtcctcgacacgggctagatttgttctaggattatttttccagtagtaagccatgtatccatggacagtccacagcgcgacgtctaatgtaacatcatcaaggttcttttgactatcccataagaaaccattccttaagacaaccgatattgtgagttgataacc

SEQ ID NO: 10472 - DNA, 2275 bp, Zea Mays
cgcgtgttctgcctcccgcgatctcgctcgtgatattccagccccgccgccgccgtccccgcccccatccgtgacaccccaccatcaccgccgcgccacgcgcgacaactccatcccccgtccgcacccctaccccgagcatcgcagcgcctcccgcacgaggtcgttgcgcttgtcgatctgatggcggcccatggcaaaggagcaggcggtgatggcagccacagcagaaagccgacgctcggcgtgattcccacccgtcgcgagccaagaggttcgaggtcatttttgagccaagaggttcgcggccacgggagcaaccctacagaaccatcaccaccaccgctctctcttcctctgctcttctctgcctgcctgagctcaccgcacctcgcctcctcaccgcggatcctccgttaatccggtagaaaatggccgatgccgaggatatccagcccctcgtctgcgacaacggaactggcatggtcaaggctgggttcgctggcgacgacgccccgagggccgtcttccccagcatcgtggggcgcccgcgccacattggtgtcatggtcgggatggggcagaaggacgcctacgtcggtgacgaggttctgcaaaccgatcatgacaaaaccaaagagcaacaacaaagcgggactggtgtaggcgtgtagctggtgagccgggtagtgaaggaggtgtgtaccaggcctccagtgagcaaatgggcatggtgccggatgcatctgcggccggtggcaggaaggtcgagctggatggggacatgcgatggacatcacaggttggcccctccagtgatccatctcaaacactagccaggccataggaaaaacgttgaatcaaagcaaacttgatgcttaccgaaagcatgttcgatgagttactcagattcatggcccaggaattgaatctacacggtttaataactatttgcatggctctaaatgcttaattagaagacgaaatgaatcgcaaggggaaactaacatgcgagagaggaggagctagccacaaccaaagagcttggttcaatacttcaatggctagaataatgaacgatatgaagatcaggtagcattatatatgtcaataagaagcagaggagagaagcagcccacatcgcaggagacaaggacttcacttgtttggccagttcaggacttcaggatgttgtcgatgatgtccatgctatattccctcgcttcatgcttaacaatgagggagagactaagtgaggggctgaaggccgttggtgctgtcagaatgtttttttggagttttggtggatgatgctcagtgactgcaatgcaaaggatccttctgttttgtatattgaatgagattacatcactgtttttttcttagcgatatgttgagctcatgtgctcgtttatgttagtcgatctctggctcttgtagtaacttggaaagcttgctgctttttttaagggcatacatgcctgtgatgtgtggtcatgatcatttttttctcctgttattttagttgtcgtatcataaatgccatgtttgcattggtgttccaacatgtcaatattattgaataaatgtttgcattggcggcagcggggacgacgctaagtcgagcaatggcgaagcggcccgtggtggcagtaacggtggagagaagcagggggatgaatccaacggtggcgggatacttagcgctgtggcttccaggattggcgtggtcgtgtccagcgccaacggggaccgcagcggcagcgctgaggatggtgccaagacgagcgctggcgacgctggtcacggtagcaagggcgaggagaaggggcgtggtgtgaacggtggtagaatagtcgagcagatcatttccaatctgccctcagatgatcaggcgcctgatgccgatgaagcttccttgctcatcgccattatcgaagattagctccatgttccgaaggctctctaggtcgtcctcaacgccaggatcaaatcatcagctgagccggagactgaaaacaataaagaaaagcaagcagctggtcatagtaaacatcatgtagcgaggcttagcagattgcttttttttcccgttagaatcagtccacatgtcctcgacacgggctagatttgttctaggattatttttccagtagtaagccatgtatccatggacagtccacagcgcgacgtctaatgtaacatcatcaaggttcttttgactatcccataagaaaccattccttaagacaaccgatattgtgagttgataacc

SEQ ID NO: 10473 - DNA, 2381 bp, Zea Mays
cgcgatctcgctcgtgatattccagccccgccgccgccgtccccgcccccatccgtgacaccccaccatcaccgccgcgccacgcgcgacaactccatcccccgtccgcacccctaccccgagcatcgcagcgcctcccgcacgaggtcgttgcgcttgtcgatctgatggcggcccatggcaaaggagcaggcggtgatggcagccacagcagaaagccgacgctcggcgtgattcccacccgtcgcgagccaagaggttcgaggtcatttttgagccaagaggttcgcggccacgggagcaaccctacagaaccatcaccaccaccgctctctcttcctctgctcttctctgcctgcctgagctcaccgcacctcgcctcctcaccgcggatcctccgttaatccggtagaaaatggccgatgccgaggatatccagcccctcgtctgcgacaacggaactggcatggtcaaggctgggttcgctggcgacgacgccccgagggccgtcttccccagcatcgtggggcgcccgcgccacattggtgtcatggtcgggatggggcagaaggacgcctacgtcggtgacgaggttctgcaaaccgatcatgacaaaaccaaaggtagctttgaagccgcagactctgtctccacaacctgaagcccaagcacctcatgatcctcaaacaccagagcaacaacaaagcgggactggtgtaggcgtgtagctggtgagccgggtagtgaaggaggtgtgtaccaggcctccagtgagcaaatgggcatggtgccggatgcatctgcggccggtggcaggaaggtcgagctggatggggacatgcgatggacatcacaggccataggaaaaacgttgaatcaaagcaaacttgatgcttaccgaaagcatgttcgatgagttactcagattcatggcccaggaattgaatctacacggtttaataactatttgcatggctctaaatgcttaattaggtttgctcatcgttcctcagtgctacttcatcttgattttctgctgagtatacaagggatgaatgaggctgctcatggtggacagaacagaagacgaaatgaatcgcaaggggaaactaacatgcgagagaggaggagctagccacaaccaaagagcttggttcaatacttcaatggctagaataatgaacgatatgaagatcaggtagcattatatatgtcaataagaagcagaggagagaagcagcccacatcgcaggagacaaggacttcacttgtttggccagttcaggacttcaggatgttgtcgatgatgtccatgctatattccctcgcttcatgcttaacaatgagggagagactaagtgaggggctgaaggccgttggtgctgtcagaatgtttttttggagttttggtggatgatgctcagtgactgcaatgcaaaggatccttctgttttgtatattgaatgagattacatcactgtttttttcttagcgatatgttgagctcatgtgctcgtttatgttagtcgatctctggctcttgtagtaacttggaaagcttgctgctttttttaagggcatacatgcctgtgatgtgtggtcatgatcatttttttctcctgttattttagttgtcgtatcataaatgccatgtttgcattggtgttccaacatgtcaatattattgaataaatgtttgcattggcggcagcggggacgacgctaagtcgagcaatggcgaagcggcccgtggtggcagtaacggtggagagaagcagggggatgaatccaacggtggcgggatacttagcgctgtggcttccaggattggcgtggtcgtgtccagcgccaacggggaccgcagcggcagcgctgaggatggtgccaagacgagcgctggcgacgctggtcacggtagcaagggcgaggagaaggggcgtggtgtgaacggtggtagaatagtcgagcagatcatttccaatctgccctcagatgatcaggcgcctgatgccgatgaagcttccttgctcatcgccattatcgaagattagctccatgttccgaaggctctctaggtcgtcctcaacgccaggatcaaatcatcagctgagccggagactgaaaacaataaagaaaagcaagcagctggtcatagtaaacatcatgtagcgaggcttagcagattgcttttttttcccgttagaatcagtccacatgtcctcgacacgggctagatttgttctaggattatttttccagtagtaagccatgtatccatggacagtccacagcgcgacgtctaatgtaacatcatcaaggttcttttgactatcccataagaaaccattccttaagacaaccgatattgtgagttgataacc

SEQ ID NO: 10474 - DNA, 2439 bp, Zea Mays
ccgcgatctcgctcgtgatattccagccccgccgccgccgtccccgcccccatccgtgacaccccaccatcaccgccgcgccacgcgcgacaactccatcccccgtccgcacccctaccccgagcatcgcagcgcctcccgcacgaggtcgttgcgcttgtcgatctgatggcggcccatggcaaaggagcaggcggtgatggcagccacagcagaaagccgacgctcggcgtgattcccacccgtcgcgagccaagaggttcgaggtcatttttgagccaagaggttcgcggccacgggagcaaccctacagaaccatcaccaccaccgctctctcttcctctgctcttctctgcctgcctgagctcaccgcacctcgcctcctcaccgcggatcctccgttaatccggtagaaaatggccgatgccgaggatatccagcccctcgtctgcgacaacggaactggcatggtcaaggctgggttcgctggcgacgacgccccgagggccgtcttccccagcatcgtggggcgcccgcgccacattggtgtcatggtcgggatggggcagaaggacgcctacgtcggtgacgaggtgcagtccaagaggggtatcctgaccctcaagtacctcagcttacacatcacattattccccacattacagcaatcagtgcaacaatcagagcatttatttaggttctgcaaaccgatcatgacaaaaccaaaggtagctttgaagccgcagactctgtctccacaacctgaagcccaagcacctcatgatcctcaaacaccagagcaacaacaaagcgggactggtgtaggcgtgtagctggtgagccgggtagtgaaggaggtgtgtaccaggcctccagtgagcaaatgggcatggtgccggatgcatctgcggccggtggcaggaaggtcgagctggatggggacatgcgatggacatcacaggttggcccctccagtgatccatctcaaacactagccaggccataggaaaaacgttgaatcaaagcaaacttgatgcttaccgaaagcatgttcgatgagttactcagattcatggcccaggaattgaatctacacggtttaataactatttgcatggctctaaatgcttaattagaacagaagacgaaatgaatcgcaaggggaaactaacatgcgagagaggaggagctagccacaaccaaagagcttggttcaatacttcaatggctagaataatgaacgatatgaagatcaggtagcattatatatgtcaataagaagcagaggagagaagcagcccacatcgcaggagacaaggacttcacttgtttggccagttcaggacttcaggatgttgtcgatgatgtccatgctatattccctcgcttcatgcttaacaatgagggagagactaagtgaggggctgaaggccgttggtgctgtcagaatgtttttttggagttttggtggatgatgctcagtgactgcaatgcaaaggatccttctgttttgtatattgaatgagattacatcactgtttttttcttagcgatatgttgagctcatgtgctcgtttatgttagtcgatctctggctcttgtagtaacttggaaagcttgctgctttttttaagggcatacatgcctgtgatgtgtggtcatgatcatttttttctcctgttattttagttgtcgtatcataaatgccatgtttgcattggtgttccaacatgtcaatattattgaataaatgtttgcattggcggcagcggggacgacgctaagtcgagcaatggcgaagcggcccgtggtggcagtaacggtggagagaagcagggggatgaatccaacggtggcgggatacttagcgctgtggcttccaggattggcgtggtcgtgtccagcgccaacggggaccgcagcggcagcgctgaggatggtgccaagacgagcgctggcgacgctggtcacggtagcaagggcgaggagaaggggcgtggtgtgaacggtggtagaatagtcgagcagatcatttccaatctgccctcagatgatcaggcgcctgatgccgatgaagcttccttgctcatcgccattatcgaagattagctccatgttccgaaggctctctaggtcgtcctcaacgccaggatcaaatcatcagctgagccggagactgaaaacaataaagaaaagcaagcagctggtcatagtaaacatcatgtagcgaggcttagcagattgcttttttttcccgttagaatcagtccacatgtcctcgacacgggctagatttgttctaggattatttttccagtagtaagccatgtatccatggacagtccacagcgcgacgtctaatgtaacatcatcaaggttcttttgactatcccataagaaaccattccttaagacaaccgatattgtgagttgataacc

SEQ ID NO: 10475 - DNA, 1185 bp, Zea Mays
  misc_feature (1184)..(1185): n is a, c, g, or t
agcagctggggtggagctgtaacagttcgccacggctaggctcctctcccctctcagctctcagctgcccctcctgcatgccgatcgcctccaagctcgtctacttccagcgccgccccgcgccggcgccgcctgacgacccgggtcccgagcctcccgacccccgccgcccccgccgccgccgccgcagcggctccctctcctcctctcaccagaagccggagcatgatgttccagggcaccaaagggatcacgctgctgcagccaagcctccggggccagtcggaaaggcagcagggcttcttcacacggcctccagcgcagggcttcaccaccgcagcacgtcggggtcggaccacggccggcttcccgacgccgtgcagcaggccagggaacggctccttcagaggctcggcagcgtggacctggtcctggcggcgggacgaaggtcctcgcacaagacatggccgctgcagacactctgggctggagctggaggactcgctcgccccgtcgttgacgcctcttcgggcggcggtcaaaccagctgcttccagttccagttccagcccggtgaacgtgaacccatccctgtgttccccaaaccggcggcctccgcggtacaggaagcagaagacgggcgagccgcgcccgcggacgcagcttctgactgctccatatgcctggagaggtgcggcgccggcggcgggctcacgcagctgcgctgcgggcacgtcttccactccgcctgcctgcagcgctggctgcggtcccgcgccgactgcccctactgccgggccaccgtgcgagctcgctcctaacagcaggaaggaaggaaggatggatgaatgaatggaaagtgtggaactggatgacgatggttttattaaccgtgtgtcgctgctcacctcttgttgtaaccactccactagtatgggttttttttcttttcttcttcctttgcccgttgaggtagactggtagtactgagctttgcggcttcagcgattcagtgtgatatatgtgtgtatgttgtgtctaatctaatgtacgcaggaaaattagatctgtatcgttaaaaagatctcaactttagaagaagatagataacactgaaagagtcagctttctgtgaactagatatttaattttgcaaacagaagttgagtgttagggggtgtttnn

SEQ ID NO: 10476 - DNA, 1808 bp, Zea Mays
  misc_feature (1807)..(1808): n is a, c, g, or t
aaaagaaagcagctggggtggagctgtaacagttcgccacggctaggctcctctcccctctcagctctcagctgcccctcctgcatgccgatcgcctccaagctcgtctacttccagcgccgccccgcgccggcgccgcctgacgacccgggtcccgagcctcccgacccccgccgcccccgccgccgccgccgcagcggctccctctcctcctctcaccagaagccgtaaattaaagccgcggccttttgcgttttccccgagtgaagaaaccggagggttttcttcttgattccaaaactccggtcttccagcagactgcagatcgtatccgtaacggagaaaaaaggttggtgttttcttggtggagcagagctgccgatggatgcagatgtctagtgtactgtactgtacacccttatggttgaggagtccatcagtaattcggtttcgatgaaggcctaggcctagcctcctcgttcttcaggagcatcgaggagtccaccagcgtcctggaatattcggcaccgcttgaatgagaagttagctcatagtccatctcgaactaggcagagtattattgtagcgaacctagcaggcaaaaaaaaaaaacagaggatatcctaagttagaaagcatggatgaatccctggcatggatgattgcagcctctcaaaatattagtcaaaagaaaagagagtgtaaaaacgatgtgggcttgtacaattggtataaacttgaatgggcaaatttgtgttatcatgtgtgtgtgttgatgtgttcccttcaattcatctacatttgcgaacaaagcttggcagtagtttagctactgaatctagctgcacaggagcatgatgttccagggcaccaaagggatcacgctgctgcagccaagcctccggggccagtcggaaaggcagcagggcttcttcacacggcctccagcgcagggcttcaccaccgcagcacgtcggggtcggaccacggccggcttcccgacgccgtgcagcaggccagggaacggctccttcagaggctcggcagcgtggacctggtcctggcggcgggacgaaggcacaagacatggccgctgcagacactctgggctggagctggaggactcgctcgccccgtcgttgacgcctcttcgggcggcggtcaaaccagctgcttccagttccagttccagcccggtgaacgtgaacccatccctgtgttccccaaaccggcggcctccgcggtacaggaagcagaagacgggcgagccgcgcccgcggacgcagcttctgactgctccatatgcctggagaggtgcggcgccggcggcgggctcacgcagctgcgctgcgggcacgtcttccactccgcctgcctgcagcgctggctgcggtcccgcgccgactgcccctactgccgggccaccgtgcgagctcgctcctaacagcaggaaggaaggaaggatggatgaatgaatggaaagtgtggaactggatgacgatggttttattaaccgtgtgtcgctgctcacctcttgttgtaaccactccactagtatgggttttttttcttttcttcttcctttgcccgttgaggtagactggtagtactgagctttgcggcttcagcgattcagtgtgatatatgtgtgtatgttgtgtctaatctaatgtacgcaggaaaattagatctgtatcgttaaaaagatctcaactttagaagaagatagataacactgaaagagtcagctttctgtgaactagatatttaattttgcaaacagaagttgagtgttagggggtgtttnn

SEQ ID NO: 10477 - DNA, 3054 bp, Zea Mays
atgtccaacgtgaccgtgtgcgtgcggttccgaccgctgagccacaaggagaggaaggccaacggcgacaacgtctgcttcaagaggctggactcggagtcttttgttctcaaggatgagagggaagaggatgtcgtattcagtttcgacaaggtgttctatgaagatgcccaacagtctgacgtctacaacttccttgcagtccccattgtttcagatgccatcaatggaataaatgggactataattacttacggtcagaccggggcaggaaagacgtacagcatggaggtggagatatatttggaaaaggtgagggaccttcttgacttgtccaaagacaacctgcagatcaaggaaagtaaaacccaaggaatttacatttctggagcaacagagatatctatcctcaacagttcagatgccttggagaacctttctcaaggaattgccaacagagctgttggggaaacacaaatgaacctggctagcagtagaagtcactgcttatacattttctcagtacaatatggatgcacttcagatgagagggtaacaacagggaagattatacttgttgacttggctggttctgagaaagttgagaaaactggtgctgaaggacgggttcttgatgaggcaaagacaatcaacaaatccctctcagctctaggaaatgtcatcaatgccttaacgactggtaaacagaatcatgtgcctttccgtgactcaaaacttacgcgcattcttcaagattcgttgggtggcaactcaagagcggcattgctgtgttgctgttctccgagcccatcgaatgcagcagagagtctgtccacgcttcgctttggaaccaggacaaagctcataaaggctcctccgaaattgattcctgagtcagtggataacaccaagaagcccgccgtcgagactcatgatcaagatgatctgcgggacaggatactgagcaagctaaggttgagcctgaaggaggaggatgtggatttgttagaagaactgttcgtgcaggaaggcatcatcttcgatgccagttccgtcgtggacatcgactcggtgttccgggacactgcaagcgaggagatctcgttgctgatgcaagccgtcgaggagctcaaagaaactgtggaagaggcgttgcagctcacggacgagaacgaaaagctaagacgtagcctccaagtcgcacaggagatgaccactcaggcccagctcgccgccgccgccgccgtcgctggagctgcccggagccgtactctgcttgatttcgtgccggcagtcctcttccggccatttggaaaactaaaaatattcgtcggttcatctactgggcaggatgcacacgtggctccgcatccaaccgttcctgggtcgcacagcccatcccgccgcgccgtctccctctcgccccaaacccctctcctcctctctttctctatccacctttccaccgtcaccatggccaccgccactacgtccgcctatcattgcaacgccgtcctccaccttcccagacctccgcagttccgccggctcctgccccctctcccctccctcgtcacccgcagagccgcgagcgtcgggctgggggtcgcccgtctcggttcgagggcgagggcaagggcaagttccgtaccgccaccgccaccattttttgaaaccgtggaggaggaggaggaggaggaggaggagcgtgggtggtcggatgcggaggcgggattcagtgacgaggcagaggatgagcaggagtggtcgggcggcaacggcgcggcgcgcggggaggacctgggcgcggacgccggcgaggaccttagcgggtgggcgcggcagtggccgcgcccgcgggagctgttcgtgtgcaacctcccgcgccgctgcgacgtccaggacctgctcgagctcttcacgccccacggcaccgtcctctccgtcgagatctcacgcgatgccgagtccggaattagccgaggaacggcttctgtgacgatgcgatctctagcagaagctcgggcagccatcgacgctctggatggattcgacatggatgggcgtgaggttttcgtgaagctagcgtccgacgtcatttccaacaggaaaaacgtgaacctggcccacataacgcccacgaaggaccacatcttcgagaccccgcacaaggtctacgtcggcaacctcgcgtggtctgttcagccgcaagacctgagagagctctttacccagtgcggaaccgttgttagcacgaggctgctgacggaccgcaaagggggcaggaaccgagtctatgggttcctctcgttttcttccgcccaagagcttgaggaagcgttaaagctcgacagaacggtcttcttcggacgggatatcgtagtgaaggaagcccatgtagagcgccagacgcgctgagccgctgagtgttacccttgagaactgcactttttttgtctgcctcgttgactgactaagctcatgctccaggcacaagctacacagctgacgaagaagcaattgagcggttcatcgcgaaagagttaaaaaaaaaaacggtagtgtaaattagtaccattgctgcaactttgtcagcgccgccgtggatgctggtgtgagaaattctaggacgaactgagaactggtattgtagtggtaatacatgttgttttagcttcttataataccctccatacagtaatagtgctccttcaccacacgtttctaatgtctcgaatttttgtttgtgaaagggattctaattgagttggtcagattgtagaagacccggctctggttgtggtttgctgcacttctaaggctatctctagcaatctattcatctccatctctcatttcaaactttactattttaaacttgcaatatatagtgtaaaacaatgttttgcatgattatatgtacaatttagttatagtctaataccctaatatcttcaagtacacaaaggtcctgtgagttgttagatggcttgagtagaagtccggtattggtggtagtcgttctctgtagtttcctgtacatagacgtggcag

SEQ ID NO: 10478 - DNA, 3282 bp, Zea Mays
cgcgcgcgtcgtctctcctctctcgtgccgacacctgcgcgaccgctgccccgccgccgctctacgctgggtaccgaggtctccgcagggcgcttcgcggcgacgagcaccaccaccaggatgtccaacgtgaccgtgtgcgtgcggttccgaccgctgagccacaaggagaggaaggccaacggcgacaacgtctgcttcaagaggctggactcggagtcttttgttctcaaggatgagagggaagaggatgtcgtattcagtttcgacaaggtgttctatgaagatgcccaacagtctgacgtctacaacttccttgcagtccccattgtttcagatgccatcaatggaataaatgggactataattacttacggtcagaccggggcaggaaagacgtacagcatggagggcccaagcatattgcattgcaatgaacagaaaactggactagtacagcgagttgtggatgagctttttatatgtttaggatcatcagcaagcacgtggactgtgaagttgtcaatggtggagatatatttggaaaaggtgagggaccttcttgacttgtccaaagacaacctgcagatcaaggaaagtaaaacccaaggaatttacatttctggagcaacagagatatctatcctcaacagttcagatgccttggagaacctttctcaaggaattgccaacagagctgttggggaaacacaaatgaacctggctagcagtagaagtcactgcttatacattttctcagtacaatatggatgcacttcagatgagagggtaacaacagggaagattatacttgttgacttggctggttctgagaaagttgagaaaactggtgctgaaggacgggttcttgatgaggcaaagacaatcaacaaatccctctcagctctaggaaatgtcatcaatgccttaacgactggtaaacagaatcatgtgcctttccgtgactcaaaacttacgcgcattcttcaagattcgttgggtggcaactcaagagcggcattgctgtgttgctgttctccgagcccatcgaatgcagcagagagtctgtccacgcttcgctttggaaccaggacaaagctcataaaggctcctccgaaattgattcctgagtcagtggataacaccaagaagcccgccgtcgagactcatgatcaagatgatctgcgggacaggatactgagcaagctaaggttgagcctgaaggaggaggatgtggatttgttagaagaactgttcgtgcaggaaggcatcatcttcgatgccagttccgtcgtggacatcgactcggtgttccgggacactgcaagcgaggagatctcgttgctgatgcaagccgtcgaggagctcaaagaaactgtggaagagctcacggacgagaacgaaaagctaagacgtagcctccaagtcgcacaggagatgaccactcaggcccagctcgccgccgccgccgccgtcgctggagctgcccggagccgtactctgcttgatttcgtgccggcagtcctcttccggccatttggaaaactaaaaatattcgtcggttcatctactgggcaggatgcacacgtggctccgcatccaaccgttcctgggtcgcacagcccatcccgccgcgccgtctccctctcgccccaaacccctctcctcctctctttctctatccacctttccaccgtcaccatggccaccgccactacgtccgcctatcattgcaacgccgtcctccaccttcccagacctccgcagttccgccggctcctgccccctctcccctccctcgtcacccgcagagccgcgagcgtcgggctgggggtcgcccgtctcggttcgagggcgagggcaagggcaagttccgtaccgccaccgccaccattttttgaaaccgtggaggaggaggaggaggaggaggaggagcgtgggtggtcggatgcggaggcgggattcagtgacgaggcagaggatgagcaggagtggtcgggcggcaacggcgcggcgcgcggggaggacctgggcgcggacgccggcgaggaccttagcgggtgggcgcggcagtggccgcgcccgcgggagctgttcgtgtgcaacctcccgcgccgctgcgacgtccaggacctgctcgagctcttcacgccccacggcaccgtcctctccgtcgagatctcacgcgatgccgagtccggaattagccgaggaacggcttctgtgacgatgcgatctctagcagaagctcgggcagccatcgacgctctggatggattcgacatggatgggcgtgaggttttcgtgaagctagcgtccgacgtcatttccaacaggaaaaacgtgaacctggcccacataacgcccacgaaggaccacatcttcgagaccccgcacaaggtctacgtcggcaacctcgcgtggtctgttcagccgcaagacctgagagagctctttacccagtgcggaaccgttgttagcacgaggctgctgacggaccgcaaagggggcaggaaccgagtctatgggttcctctcgttttcttccgcccaagagcttgaggaagcgttaaagctcgacagaacggtcttcttcggacgggatatcgtagtgaaggaagcccatgtagagcgccagacgcgctgagccgctgagtgttacccttgagaactgcactttttttgtctgcctcgttgactgactaagctcatgctccaggcacaagctacacagctgacgaagaagcaattgagcggttcatcgcgaaagagttaaaaaaaaaaacggtagtgtaaattagtaccattgctgcaactttgtcagcgccgccgtggatgctggtgtgagaaattctaggacgaactgagaactggtattgtagtggtaatacatgttgttttagcttcttataataccctccatacagtaatagtgctccttcaccacacgtttctaatgtctcgaatttttgtttgtgaaagggattctaattgagttggtcagattgtagaagacccggctctggttgtggtttgctgcacttctaaggctatctctagcaatctattcatctccatctctcatttcaaactttactattttaaacttgcaatatatagtgtaaaacaatgttttgcatgattatatgtacaatttagttatagtctaataccctaatatcttcaagtacacaaaggtcctgtgagttgttagatggcttgagtagaagtccggtattggtggtagtcgttctctgtagtttcctgtacatagacgtggcag

SEQ ID NO: 10479 - DNA, 2369 bp, Zea Mays
cacggttctaccactgtctcctctccgtgacgcacgcccgagatcctctccgcgacacacgcctccctctcctctgccccaccctcctccccacgccatcggcgccgccatcatcggatccggcccaagatgcctccgccccacgcgcccgagtcgtcgaggcacactccttcccgcctccgtcgtccacgcatatctccgcctcacctcggcgcccgagtcgtcgcacgcgttcgcggtggtgtccatcccggcaccggcctcacgcaccgtctacagctcccaactctgctcctctcagttctccctccgcatttcgccttctctcccttcctctccaagcagcgtcctcctcgcctagatccgtacaagcggcaaataacctctccggcggcgagacagatggagtcgacctccggcgaggatgctccgaagcacaacccgattccgtccgcgctcgtctccaacctacagtccgtgctcaccgcccgccgcttgtccgcagccgaggtcagcaccgccgccacagctagcgaggttgaggccttggcttaggaagcagaggcgttcgctgcccccacgggagatgggacgctggcgaggcccatcgtgctactgacctatgccggggggatccggtcggcgggtctcgcggcgctcgtcgacgccctcgttgccgccgaccgctgcgacgtccacgtgtgtgcccccgaatcgtacgtgctgcgacttagaaaaccaaaccacagcgggaccagtgctcggatagggtccgacgacgatgcaagcaaggagtggcgcgcggccgacggggcgcagatcggctcctgcacgtgcagcgcagccgcgtgacagtgaagcagggaggccgcgataggtggcgcagggagggtgcgacggaggcaaagtgcaagcacctggggacttcagaaagaaagagtacaagtctactactgcagaaagcaaggagaatgccaatagaagcagatttcatgtatggatcggataaaatcttgagcaaaatgggagaaggtttgggttttctgcaatctgtcgtctcctcttctgctgggtatctccattattattctaatgaagagggctacgagttggattttcgtaggtacatttgagcgtgttttggaatgctgggatcgtgaaacacgtgaatatgttgccataaaagttgtacacagtatccacaagtactgtgatgctgcaatgattgagatagatgtgctcaatcgccttgtagaaaatgaaaaatatagatttctgtgagtatctcagagacctaattgcttaaagtataaccctattctgtttttgacttgacagttcctcttcaatttgtcagctgtgtttaaattcagagatggcttgactatcgtaatcatatatgcatggatgtgttactttatgtttgtttgtgtttaatatagaaggctcccttgccttcgttcgatcatgtggtatttgaaagtgatgtctctataaatgaagtaaggcagggcaatgcttatgttactgttgtcagttattagatttttaaaccaagcatatgtcaatgtgtcctgtttcaatagggtcttattataggacgtgatgccactgaattaggatgtttgttcttttgctacctttgttaaacaacatcagatcattcgtattgtatccttcctcggattgcttcttttgttctactacaaatatgctcaacatggcaggcaggggtcaagcctggacccactgtcaagtgtgtgcttggacatgactttgtcctgcactttctagtgtaaatctcattgtaatgtgtacttacttttctctgttggattttctctgtatacttacttggatttaatcctgtaggctacacttggggaatcaaagaaaagtgaaagtgccatgtcaaagttgatgaccagaagcttgctattggaaccctctctattgaaaaatacccctagatagaaattgatttggttttcaataaagagtgtgagctgtcacacacatcgaaaactacacgtgtatttttctttggttacaaggttgagcaaccaatcgaggaagatgaataatggatcttgattctgaagatgaagagaaggagctaaacattccagtaatcaaggaaaatggcaaaggtgatgggaaggaggaccagagaagtgaagagaaggcagttgctgcagcttcaaaatcaagtcttgggcttgaaaaaaagcaaggatgagtatgagtctgatgattctaatgagggagaaggtgaaaccggagaatgagcagatgcggctgttcatggacaacagcatcaagaaacctgcaacatgcaacctgattttaagaaatttgccacctgcaac

SEQ ID NO: 10480 - DNA, 2389 bp, Zea Mays
gttctaccactgtctcctctccgtgacgcacgcccgagatcctctccgcgacacacgcctccctctcctctgccccaccctcctccccacgccatcggcgccgccatcatcggatccggcccaagatgcctccgccccacgcgcccgagtcgtcgaggcacactccttcccgcctccgtcgtccacgcatatctccgcctcacctcggcgcccgagtcgtcgcacgcgttcgcggtggtgtccatcccggcaccggcctcacgcaccgtctacagctcccaactctgctcctctcagttctccctccgcatttcgccttctctcccttcctctccaagcagcgtcctcctcgcctagatccgtacaagcggcaaataacctctccggcggcgagacagatggagtcgacctccggcgaggatgctccgaagcacaacccgattccgtccgcgctcgtctccaacctacagtccgtgctcaccgcccgccgcttgtccgcagccgaggtcagcaccgccgccacagctagcgaggttgaggccttggcttaggaagcagaggcgttcgctgcccccacgggagatgggacgctggcgaggcccatcgtgctactgacctatgccggggggatccggtcggcgggtctcgcggcgctcgtcgacgccctcgttgccgccgaccgctgcgacgtccacgtgtgtgcccccgaatcgtacgtgctgcgacttagaaaaccaaaccacagcgggaccagtgctcggatagggtccgacgacgatgcaagcaaggagtggcgcgcggccgacggggcgcagatcggctcctgcacgtgcagcgcagccgcgtgacagtgaagcagggaggccgcgataggtggcgcagggagggtgcgacggaggcaaagtgcaagcacctggggacttcagaaagaaagagtacaagtctactactgcagaaagcaaggagaatgccaatagaagcagatttcatgtatggatcggggatatttatacaattggctatgtatacggtctgcccaggcgcccaacaatgaatgatgtggtgaaggaacttgagatcatcagatagaatgaaggggcacaattgttaaactcagcgtctttatcagttgaacaatttggaaacaaaaagagaagagatccttatgcatttgtctatggatgatggaagcaacaacaacacttttgactacaacagtgggagttcaattaagttgttcacccaagtagataattgtctccactctttcaacaagttattggagttattatatatgtctgctccatatgaatgccttttcattttagtatcacatctgaaattaccaaccttttatactggcagtgtgataagcattgaataaaagtttttttatatgttgaatattcaacaatatatgtataattttatatatacataaatataatattctcatacgcgtggttgctccgttggtatattgttgaaaggttgttttttacggtacatgtgctgaaatggccatgctttgatctgcctataggttgaaccatataagctttctctcagactcgattatgctgcttacatgatccatttagctgtctttggatttttgggataaaatcttgagcaaaatgggagaaggtttgggttttctgcaatctgtcgtctcctcttctgctgggtatctccattattattctaatgaagagggctacgagttggattttcgtaggtacatttgagcgtgttttggaatgctgggatcgtgaaacacgtgaatatgttgccataaaagttgtacacagtatccacaagtactgtgatgctgcaatgattgagatagatgtgctcaatcgccttgtagaaaatgaaaaatatagatttctgctacacttggggaatcaaagaaaagtgaaagtgccatgtcaaagttgatgaccagaagcttgctattggaaccctctctattgaaaaatacccctagatagaaattgatttggttttcaataaagagtgtgagctgtcacacacatcgaaaactacacgtgtatttttctttggttacaaggttgagcaaccaatcgaggaagatgaataatggatcttgattctgaagatgaagagaaggagctaaacattccagtaatcaaggaaaatggcaaaggtgatgggaaggaggaccagagaagtgaagagaaggcagttgctgcagcttcaaaatcaagtcttgggcttgaaaaaaagcaaggatgagtatgagtctgatgattctaatgagggagaaggtgaaaccggagaatgagcagatgcggctgttcatggacaacagcatcaagaaacctgcaacatgcaacctgattttaagaaatttgccacctgcaac

SEQ ID NO: 10481 - DNA, 2533 bp, Zea Mays
gttctaccactgtctcctctccgtgacgcacgcccgagatcctctccgcgacacacgcctccctctcctctgccccaccctcctccccacgccatcggcgccgccatcatcggatccggcccaagatgcctccgccccacgcgcccgagtcgtcgaggcacactccttcccgcctccgtcgtccacgcatatctccgcctcacctcggcgcccgagtcgtcgcacgcgttcgcggtggtgtccatcccggcaccggcctcacgcaccgtctacagctcccaactctgctcctctcagttctccctccgcatttcgccttctctcccttcctctccaagcagcgtcctcctcgcctagatccgtacaagcggcaaataacctctccggcggcgagacagatggagtcgacctccggcgaggatgctccgaagcacaacccgattccgtccgcgctcgtctccaacctacagtccgtgctcaccgcccgccgcttgtccgcagccgaggtcagcaccgccgccacagctagcgaggttgaggccttggcttaggaagcagaggcgttcgctgcccccacgggagatgggacgctggcgaggcccatcgtgctactgacctatgccggggggatccggtcggcgggtctcgcggcgctcgtcgacgccctcgttgccgccgaccgctgcgacgtccacgtgtgtgcccccgaatcgtacgtgctgcgacttagaaaaccaaaccacagcgggaccagtgctcggatagggtccgacgacgatgcaagcaaggagtggcgcgcggccgacggggcgcagatcggctcctgcacgtgcagcgcagccgcgtgacagtgaagcagggaggccgcgataggtggcgcagggagggtgcgacggaggcaaagtgcaagcacctggggacttcagaaagaaagagtacaagtctactactgcagaaagcaaggagaatgccaatagaagcagatttcatgtatggatcgggcgcccaacaatgaatgatgtggtgaaggaacttgagatcatcagatagaatgaaggggcacaattgttaaactcagcgtctttatcagttgaacaatttggaaacaaaaagagaagagatccttatgcatttgtctatggatgatggaagcaacaacaacacttttgactacaacagtgggagttcaattaagttgttcacccaaataaaatcttgagcaaaatgggagaaggtttgggttttctgcaatctgtcgtctcctcttctgctgggtatctccattattattctaatgaagagggctacgagttggattttcgtaggtacatttgagcgtgttttggaatgctgggatcgtgaaacacgtgaatatgttgccataaaagttgtacacagtatccacaagtactgtgatgctgcaatgattgagatagatgtgctcaatcgccttgtagaaaatgaaaaatatagatttctgtgagtatctcagagacctaattgcttaaagtataaccctattctgtttttgacttgacagttcctcttcaatttgtcagctgtgtttaaattcagagatggcttgactatcgtaatcatatatgcatggatgtgttactttatgtttgtttgtgtttaatatagaaggctcccttgccttcgttcgatcatgtggtatttgaaagtgatgtctctataaatgaagtaagatcattcgtattgtatccttcctcggattgcttcttttgttctactacaaatatgctcaacatggcaggcaggggtatgctcctaaattttttattttgtgcattgtgaaatgattgttctaacaacatcaagtttgtgttcttcatataatctatctcaaattgctctgtgttttgctggtctcgaggtcaagcctggacccactgtcaagtgtgtgcttggacatgactttgtcctgcactttctagtgtaaatctcattgtaatgtgtacttacttttctctgttggattttctctgtatacttacttggatttaatcctgtaggctacacttggggaatcaaagaaaagtgaaagtgccatgtcaaagttgatgaccagaagcttgctattggaaccctctctattgaaaaatacccctagatagaaattgatttggttttcaataaagagtgtgagctgtcacacacatcgaaaactacacgtgtatttttctttggttacaaggttgagcaaccaatcgaggaagatgaataatggatcttgattctgaagatgaagagaaggagctaaacattccagtaatcaaggaaaatggcaaaggtgatgggaaggaggaccagagaagtgaagagaaggcagttgctgcagcttcaaaatcaagtcttgggcttgaaaaaaagcaaggatgagtatgagtctgatgattctaatgagggagaaggtgaaaccggagaatgagcagatgcggctgttcatggacaacagcatcaagaaacctgcaacatgcaacctgattttaagaaatttgccacctgcaac

SEQ ID NO: 10482 - DNA, 2716 bp, Zea Mays
taccactgtctcctctccgtgacgcacgcccgagatcctctccgcgacacacgcctccctctcctctgccccaccctcctccccacgccatcggcgccgccatcatcggatccggcccaagatgcctccgccccacgcgcccgagtcgtcgaggcacactccttcccgcctccgtcgtccacgcatatctccgcctcacctcggcgcccgagtcgtcgcacgcgttcgcggtggtgtccatcccggcaccggcctcacgcaccgtctacagctcccaactctgctcctctcagttctccctccgcatttcgccttctctcccttcctctccaagcagcgtcctcctcgcctagatccgtacaagcggcaaataacctctccggcggcgagacagatggagtcgacctccggcgaggatgctccgaagcacaacccgattccgtccgcgctcgtctccaacctacagtccgtgctcaccgcccgccgcttgtccgcagccgaggtcagcaccgccgccacagctagcgaggttgaggccttggcttaggaagcagaggcgttcgctgcccccacgggagatgggacgctggcgaggcccatcgtgctactgacctatgccggggggatccggtcggcgggtctcgcggcgctcgtcgacgccctcgttgccgccgaccgctgcgacgtccacgtgtgtgcccccgaatcgtacgtgctgcgacttagaaaaccaaaccacagcgggaccagtgctcggatagggtccgacgacgatgcaagcaaggagtggcgcgcggccgacggggcgcagatcggctcctgcacgtgcagcgcagccgcgtgacagtgaagcagggaggccgcgataggtggcgcagggagggtgcgacggaggcaaagtgcaagcacctggggacttcaggtaagtagaaaaccaacactgaatttgtcggttctctgttttgtgattgaccgattggtttgttgatctcagaaaattgtttcaccgttaagcaccaatttttgggtaggtcagtgttttgggatgattctcctatgcatcaatagtaaccttgtgcttggcaaagttatttgccctgataatgttgtaggtttagtgaaaagaaatatactgacatatccacctatccatcgatgcccaatggagattgacctctatcaagatttagttatgtgtctcagtagggcaatatttctgtgagttgtatactgtggattcctcatctgcatcatgaattgatcgcactatttatgccctatttttcaaaccatggtttctgtaattctttgcaccatggtatttttctcaaatgattttatctttcacaacccggactgaactcactgaagcagaaagaaagagtacaagtctactactgcagaaagcaaggagaatgccaatagaagcagatttcatgtatggatcgggtaatgacctttttgtgttctcctcaactcattatttagctacatatcttattaaatcttaatctttggtcattagctaccagcttgcactattattgtgaaaatccattaactttagtcattgaaatggttagactatcaccacgtaggtgatattagtggcattaagtgattaatctgtggcaaatcctattatcaactattttcttggctaatcattacaatatataatgaagaatactatggcttgaagggatatttatacaattggctatgtatacggtctgcccaggcgcccaacaatgaatgatgtggtgaaggaacttgagatcatcagatagaatgaaggggcacaattgttaaactcagcgtctttatcagttgaacaatttggaaacaaaaagagaagagatccttatgcatttgtctatggatgatggaagcaacaacaacacttttgactacaacagtgggagttcaattaagttgttcacccaaataaaatcttgagcaaaatgggagaaggtttgggttttctgcaatctgtcgtctcctcttctgctgggtatctccattattattctaatgaagagggctacgagttggattttcgtaggtacatttgagcgtgttttggaatgctgggatcgtgaaacacgtgaatatgttgccataaaagttgtacacagtatccacaagtactgtgatgctgcaatgattgagatagatgtgctcaatcgccttgtagaaaatgaaaaatatagatttctgctacacttggggaatcaaagaaaagtgaaagtgccatgtcaaagttgatgaccagaagcttgctattggaaccctctctattgaaaaatacccctagatagaaattgatttggttttcaataaagagtgtgagctgtcacacacatcgaaaactacacgtgtatttttctttggttacaaggttgagcaaccaatcgaggaagatgaataatggatcttgattctgaagatgaagagaaggagctaaacattccagtaatcaaggaaaatggcaaaggtgatgggaaggaggaccagagaagtgaagagaaggcagttgctgcagcttcaaaatcaagtcttgggcttgaaaaaaagcaaggatgagtatgagtctgatgattctaatgagggagaaggtgaaaccggagaatgagcagatgcggctgttcatggacaacagcatcaagaaacctgcaacatgcaacctgattttaagaaatttgccacctgcaac

SEQ ID NO: 10483 - DNA, 3544 bp, Zea Mays
gttctaccactgtctcctctccgtgacgcacgcccgagatcctctccgcgacacacgcctccctctcctctgccccaccctcctccccacgccatcggcgccgccatcatcggatccggcccaagatgcctccgccccacgcgcccgagtcgtcgaggcacactccttcccgcctccgtcgtccacgcatatctccgcctcacctcggcgcccgagtcgtcgcacgcgttcgcggtggtgtccatcccggcaccggcctcacgcaccgtctacagctcccaactctgctcctctcagttctccctccgcatttcgccttctctcccttcctctccaagcagcgtcctcctcgcctagatccgtacaagcggcaaataacctctccggcggcgagacagatggagtcgacctccggcgaggatgctccgaagcacaacccgattccgtccgcgctcgtctccaacctacagtccgtgctcaccgcccgccgcttgtccgcagccgaggtcagcaccgccgccacagctagcgaggttgaggccttggcttaggaagcagaggcgttcgctgcccccacgggagatgggacgctggcgaggcccatcgtgctactgacctatgccggggggatccggtcggcgggtctcgcggcgctcgtcgacgccctcgttgccgccgaccgctgcgacgtccacgtgtgtgcccccgaatcgtacgtgctgcgacttagaaaaccaaaccacagcgggaccagtgctcggatagggtccgacgacgatgcaagcaaggagtggcgcgcggccgacggggcgcagatcggctcctgcacgtgcagcgcagccgcgtgacagtgaagcagggaggccgcgataggtggcgcagggagggtgcgacggaggcaaagtgcaagcacctggggacttcagaaagaaagagtacaagtctactactgcagaaagcaaggagaatgccaatagaagcagatttcatgtatggatcggggatatttatacaattggctatgtatacggtctgcccaggcgcccaacaatgaatgatgtggtgaaggaacttgagatcatcagatagaatgaaggggcacaattgttaaactcagcgtctttatcagttgaacaatttggaaacaaaaagagaagagatccttatgcatttgtctatggatgatggaagcaacaacaacacttttgactacaacagtgggagttcaattaagttgttcacccaagtagataattgtctccactctttcaacaagttattggagttattatatatgtctgctccatatgaatgccttttcattttagtatcacatctgaaattaccaaccttttatactggcagtgtgataagcattgaataaaagtttttttatatgttgaatattcaacaatatatgtataattttatatatacataaatataatattctcatacgcgtggttgctccgttggtatattgttgaaaggttgttttttacggtacatgtgctgaaatggccatgctttgatctgcctataggttgaaccatataagctttctctcagactcgattatgctgcttacatgatccatttagctgtctttggatttttggggtaactctccaatatctcacatgaggttctttgtgatagctgttacttaatctgtggtgatctatgtaaatgtggcaacacttgcagttcctcgagcccttgtgcatggatatatcgtttagttgtgtctaataatttgtaattagtggcaacatctttttgttattttggttttatctgatttttattgttataagatctcgattgcaaactggcagttagtacacctttaggttttcctttgtcgtatcaagctaataatgtgtgaagcagggttcccattctgatctttagttttttgtgattttaatagcaataacctttttcgcaaaaaagtaacaaactttatgcagtatgcggttcgtatagttcccagtatccttttggacttagatttagttcgatatatggttatgtttattgacagaatgcttttagctttgcagataaaatcttgagcaaaatgggagaaggtttgggttttctgcaatctgtcgtctcctcttctgctgggtatctccattattattctaatgaagagggctacgagttggattttcgtaggtacatttgagcgtgttttggaatgctgggatcgtgaaacacgtgaatatgttgccataaaagttgtacacagtatccacaagtactgtgatgctgcaatgattgagatagatgtgctcaatcgccttgtagaaaatgaaaaatatagatttctgtgagtatctcagagacctaattgcttaaagtataaccctattctgtttttgacttgacagttcctcttcaatttgtcagctgtgtttaaattcagagatggcttgactatcgtaatcatatatgcatggatgtgttactttatgtttgtttgtgtttaatatagaaggctcccttgccttcgttcgatcatgtggtatttgaaagtgatgtctctataaatgaagtaaggcagggcaatgcttatgttactgttgtcagttattagatttttaaaccaagcatatgtcaatgtgtcctgtttcaatagggtcttattataggacgtgatgccactgaattaggatgtttgttcttttgctacctttgttaaacaacatcagatcattcgtattgtatccttcctcggattgcttcttttgttctactacaaatatgctcaacatggcaggcaggggtatgctcctaaattttttattttgtgcattgtgaaatgattgttctaacaacatcaagtttgtgttcttcatataatctatctcaaattgctctgtgttttgctggtctcgaggtcaagcctggacccactgtcaagtgtgtgcttggacatgactttgtcctgcactttctagtgtaaatctcattgtaatgtgtacttacttttctctgttggattttctctgtatacttacttggatttaatcctgtaggctacacttggggaatcaaagaaaagtgaaagtgccatgtcaaagttgatgaccagaagcttgctattggaaccctctctattgaaaaatacccctagatagaaattgatttggttttcaataaagagtgtgagctgtcacacacatcgaaaactacacgtgtatttttctttggttacaaggttgagcaaccaatcgaggaagatgaataatggatcttgattctgaagatgaagagaaggagctaaacattccagtaatcaaggaaaatggcaaaggtgatgggaaggaggaccagagaagtgaagagaaggcagttgctgcagcttcaaaatcaagtcttgggcttgaaaaaaagcaaggatgagtatgagtctgatgattctaatgagggagaaggtgaaaccggagaatgagcagatgcggctgttcatggacaacagcatcaagaaacctgcaacatgcaacctgattttaagaaatttgccacctgcaac

SEQ ID NO: 10484 - DNA, 1895 bp, Zea Mays
gagactgcgcgcctccctttccgagccgcttcctccctccgtcactcctcatgggtcatggcattggcagttgcgcactaggcagaacagagtggaaaatagaattaggcctaccctccgagagtcagatctgaggcgcgccacccgcgaccaccgcaccgcgtcgtcctcctcctcgctctagcgacgccttctggaagctttgggaggccgcgctacgctacgcgacgctacgctccggcgggcggtcgggatggggctgttcgaccggctgcccccgatggaccacatgcggtccgagaagatgtgcttcgtgcagctcatcatgcccgccgagagctcgcgcctcgccgtcacctacctcggcgagctcggcctactccagttcaaggacttgaatgaggataagagtcctttccagcgtatatttgtcaaccaggtaaagcgatgtgcagaaatgtcacgcaaactaaaatttttcagtgatcagatcaacagggcaggtttaagatcttctgttcgacctgcacttgaaccggatattgatctggaggagctagaggcaagattgggtgaacatgagcatgaactgcttgagatgaatacaaatagtgacaagctaaaacagacatacaatgagcttcttgaattcaagctggtcttgtcaaaggcaggtcacatccttgcttcttctcacagccatgcagcttcagctgagcatgagctagatgaaaacatatatgacaatggaatacatgagggaaatgcctatctgctcgaacaggtagagaaagctgtttttgtagttttcttttctggggaacaagcaaaagcaaagatactaaagatttgtgattcatttggagcaagttgctaccctgttcctgaggagatggtcaagcagagacaaattttcaatgaggtatcggctcgtctctctgacctggaagttactttggatgctggaatccagcacagaaacaaagctcttgagtcaataggatcacaattgtggaggtggacaatcatggttaaaaaggagaaagctgtatatgacacgctcaacatgttgaactttgatgtgacaaagaagtgccttgttggagaaggatggtgtcctatatttgctaaatctcagatcaaggattgtttgcagcgttccacaattcacagcaattcacaagttggtacaatatttcatgagatggacactattgaatcaccacctacatatttccgaactgataagtttaccaatgctttccaggaaattgttgatgcatatggcgttgcccgatatcaagaagctaatccggctgtatattctgttgtgacgttcccatttctttttgctgttatgtttggagattggggtcatggaatatgtctattactaggagctttggttcttatacttcgcgagaagagattttcctctcagaagcttggtagctttatggagttggcattcggcggacgatatgttattcttctgatggcaatattctcaatatactgtggccttatatacaatgagttcttctcagttccattccatatatttggcaaatctgcatatgaatgccgggacaaaagctgcagccttggagggagagaaagggtgaagaagggagttgggaagagagaagcgtcttttctgattttctcccagccgtcaaggaagatgaaaagacaggtagagatttgttgggggggggggtacctctattaatcatgggccagtccagtcaaacagactgttggaccacccgagcctaattaatcacgactaatcggctaccaggcgattaatcgttcggtcgttccatatcatcgcctaatcggacgatatggacgatcagttacactaatcgagtctaacaccctaatcgagc

SEQ ID NO: 10485 - DNA, 7457 bp, Zea Mays
cctatttcgacacgcagacaacgtcgttgcttttacctgctgtcacaagcaatatgaaatgcaaggggaaaaaaacataactgctaacacatttacatataccagagtagaatcgtagcataggtttcatacaaggttcaagaaaattcggtctatccatatgttacacagaacgattatgtttcacagctactcggcattctagctggctgtcgtcaaaagcaagctacaatacaatatgttagggtcccaatagtacaaccaaaggctcaaagtccatggagatcaacaagatgctccagctacacaagacaagcataaccgctgaggataagatagaagcaggcgaacatgtcctatacaatatcgcaagatacgcaaaagcacagagcttcgtcaaccaagactgaagatagaagtagataaacaagcatcaaatgcatattttccagcagcacaaaagaaaaagatcccttcttttgtgtctagatggcgtcctcactagatctgaggaaggcgaaaaaggcttttatgtaagttgcccagaaaataaacagctatgttgctggttgaatcgtgaaaataaaatggcagctagcttgaacgagtcatttcaataagcgacgtgcaatgaagcgatgaagctcgctaatgaacctatactggctacatatgcgatattctgagcaccaaataaactatatacatgacagactgctataccatgaagcattgatttctaagctgataacgtcatgcaaatcgtaagacaagtaaagttgaaagaaggacattagtctatgattcataagaagataaaaacagtttctctacagagcagttgtttttcacaactgagtctaaaactgaacacttcggtcacgcaaagcattgttgtcaaatcatgccacaaaacatgtcgctgccaaaaacacgtcgatgcccaaaacatgtcagcacgatagtatattgctatgcaggctgttgttggtaatcggtactcgaactatagactggtatgttgtggtaatgagtcgcgatccaaatgcttcttcacaaaatggtagggtactaaataaactttagttcaaaaataaatagaaatagggcccaatcctaatctgatatccttaaatcttatggtgtaaaatttagagcccattgtcaccctagttgtggttagtaggtcgttgacaaattataggtgtgctgtgcactgtgtggctgctatgcttttgttacgttgaaacgtatactattttgaataactgaatacctatactatcacaacttttaaaggacaaaacttgaggggaaattgaaaatggatttcagtaactgggtgaccaagaggttgcaacaggcaaaagcttccaaaaaaaatgttcaaagggcaaatgaatccctacatatgaatacttgcagaaaaccaacctttccagttggctgaatataacattattagtttattacacattctttacgaaggaactttgacagcttatgtttttattaaagaacatccatttcagtcagaattttaagggtcgtatacaatgatacaagacaagcaagcatgcagttctaatgtcctaaacatgatcaagcatatatcaaacatatgcagatacacaagctgaagtgaagaatttgactctggtcagatagtacagtcaggaagaaaccaaaatagattgcacatgttatgtacacatggaaaggcagaattaaagagcaacaagtccaaacgaagacaaaccgcaggagggtgcacgaagaagatggcattggtttatctgtgcctagattattgtacccattagatcgatgattcttttgacattggtcataagtcacaggaaacaaaccaaaccagaatcaacttacaaggctaccaatcgactctaactctaatgactgcaactctactaaagatcgtttacaatcagaatatcagatttcagatatttgacaaaatactccaactgatatatatatatatatatatatatatatatatatatatatatatatatatatcgccaaactgactaagatgctgaattcaatttgctatttatggagaatataataaccagctattgaaataggcgacctaaaacattaacgtatgacagatttgttttttgggaaaaagaagtgtaccttttgtccaaccaaatattaatgtacaaagaattttgggaggacaagagctgcattgagcaaatgccaaaaaaatgcacaggataaaaattcaaccacaaggtttatgtcaaaggtggctggcatggaaattgggactgtgtgacagcagtaaattgtggaaagagcaataaaccctttatttccgaaaagaacacagcggatgaagaagcgacaaaggaggcataagagaaagatgatgaagagggccactggtttattagttatctctgtgaattctgtaatagtaccccctcaggttagtatgtcccccaaactgtgttcccgtctctgtctagcaccttctaaacccaacccatattcattatatgtagcgaacattcaaaaaaagaagcatcaacctgagttcaaaaaataggggttgttgcaccaaaatacactttccgaagagaacacaggcatacactctatctattctacaagacaccatgagcacgaacaaaacataaatgaatctaaccagcaacattcgattcctggtacgatcgaagaaaatgcatgtatgagttcattcagacaacaccattaatcgctacaaacactgtctttatgaaaaactatgttcgcacagtttgacgaatataaatcaggacagctagacagattacaaatactggtgagagtgagacaaatgaacctttaaatagattatgtactgaccgtgtaaccgaaaatgtgctctccaatccttggtccctctgaagggatcaaaagctccacagcaagtatgatcttcagctgacgaacaggagacctgagcagcagtttgattcgaaaacgagtatcttaattaaaaccttccattaacagaattgcatttgtaatttggagcaggagttaggaaactctactttagttcaacgatactactttgctgacaagatttaaaaaaacacagcgcgaccatagaacagaagatctatagctaactaaatcagtgttctagttcagaaacctgattacctggtaaacctaccagattagaaacaggagagactgcccatgctgctttcatgtccaatttctaaatgattcggcaaaaactgttttgcaaaaactggcacactgctaggacaactgagaatcaggcaaaaccaatagcaggcgaacataaaaccatatttacagtttttttaaacttgcatggacaaagaagagaacgcacaccacaaagcgcacatgagatccacaacacagcaagcagcctacctttaaacgttgcacacgggaagagcaacacaagccttgcatgcctgcgccatcgccagggccgcagcggagcaacactacaacggtgcataggtagcacttgataagcagatctacaagtgtagtagcaagcgtttggtgcacaaatcagagttgagaaagaacggtacaataccttgcgcttgaagggggcgagtggatggtttccaggagggaaaatcaaccaccctggtaggtaggttgtagagctaggagggagggaagaggaaacccacggtccaagggcttatccgtggggcagcagctagaggacgacatgggtacacagcggccaaagtacaacgcactactgcggcagagggatggcgaggggcgtccaccgcgcgccccggccgatgggcagcatcacgtggcggagacctgcacaggcgctatgagagggggcggtccgaaatgaaagtacgacccgccacagatttttggcgcgcgacagatcccatggctgaagggagtacctatgagcaaaaccctacctcacccgacacgtggagcggtggacggctagatgcatggcgtggcggagagcaagtgtggcatggcggacgggacacccccgccgcgccggtccgccgacgtcaacgcccaaatcccgtagagaggaggtgtccctgctcttccgggtacggcgtgagcgcagttctcgcatgcgaactattcgtggtaggagagcggtaggtttttcccttttttggcagcacgcgctcgtgacgctgcgcgcttcgaccgtgcggtgttttttccttttttggcaacacgccgtcgcgagtcgcgacacttccgcgcttcgacgtgacacacatcaagacgagattggcgaagcatccctagaaatgctcccatgcctccattcgtgagtcccttttaataaacggtattgggattgggtagttatacaagagaaggtgaggttagaataagcctgcaagaagccaagtgtttgggatggcttgtgctttttttgactgagaagccaactaataagctgttccaaacagagccaatgttcctagcgtcctggacacttattacgtgtttggttggatgtataaggagggatggaagggggcggccatagtttctagtgtttggatgagagtcacgtgggggcgaggtaaacaccggagtaattttgatggtggcgtgatcccaacaaatcgaggggacggtgtcgccaccgcctaatcctactttgatctcaaaccaaacatataattagttcttataacaagatcaacaacatatctatacaagttatgtacaatagtatccataatttttggagcactatatagattaccaagaaccttctcctttacaaatagctcgcactagatctttaaattagtggaaccttctcttcacaaaagatgatgtatgcattctatttgcaataagccctaatatagacatatgcacaatgggacaccatagttctgatcttatttttgtagatattccaatagtgctttgtcttcaaccattccacaaagaacctgtcctaaaacccaccaaatatgtaatatctcacatcatattcctccaaagaaccttatgattctacctctgttttcaagtcgtccaactaatcgcgattagtcgggctagtcggttagtagagctcgattagcacaaccgactcgatcggagcacctaatcgccttggtcgtccgactagtcgacgattagggtcgattagttgctcgattagacgattctgcgtgactagggtttagtatccagattttttgattttgtgggcttttttggcgggcggcccggctacacggagatggaacgccagcgtcgtgccgtcgtctctactctctactaaaccgacggttagctctactttcctggcatctcaatctctttcctttccttctcttctctattttcctaccggctcctagacttctcattctagaatccatacttcaccagtacaccggctgaccgacgatcatctgtgcgcgctgcgcggttccagttccaagttccagacttcaccgacctagatttctcatctagacacgcacgcgcggttccagacacgcgcggttccagaaatccaggatatttcaccggcatgagatcatcttttggagaagtagtttcgaatgatatgtatgcttatttgaaaaggaacacaaggcttgtgctttctgttgaaagtgaggaaggaggacagaaagatggtgatgctactgaacctgaacaaaaggtacatgaaccaagttcagagacaaaacacaagcaagcgaagaagaaagcaactcaagccaccattagctcttttgttgtttcagctcatcccacccaaaagtccggcaagtcagtggctgccatgttttgcaagacgccagaagaagttgttgctgacaggcataaaaataaaaccactcagtcaactcttgaagcttgcacaaagaaaggaaaggaagccaagcaaattgttaacgaccatgtcgcagattttctatatgagaacaaaataccattgcacgtcgtcaattcaaggagctgggaggttatgttggagtcaattgggcaatttggtcctggatacagtggtccatcgtaccatgatgttagggtaccttggcttgatagggttgtcgatagggcaacaacattgaggtcgaagcatgaacaagcttggaaggaatatggctgcactgtttttgaatccagggaaattcttctccattagggagaaagacaagaagcaagctggaattctgagatctatgttcaatgatgtgatgtggaaaatgatcagtgatgaggaagaacaaactaaaataagtaatcaagcagatgactacgagaggtccgaaggggaagcattctcaaaacctagagcgataagagacagagagaaaaaaatcctatggtggggtgcctatggacaattggcatatgaactccaaagccttgcaaaaagaattataagcctatgttgctcagcatctggttgtgaaagaaactggagtgattttgcagcaatccatacaaaaaagagaaacagactggagcacaagagactaaataaattggcctatgtaagctacaacaggaagatggataataggttcacaaatataagagagctaggttccaagggaaagagaagcaatccactgttgcttgaagagtttacgtggcaaaattaatgggttgaagaagaatctgatggtgataacatttgggatgttgtggatgaagctctaggtgcaactcagggtcttcggggtcaaaatttgcctaggactgctgctgctggttcctcctctcaaactcagacacaaacctatgttagaaccagaaaacgacccagaaatgcaacagctacagctcaagacatacgtgaagaagatgacaattctcctgctgaagatgaacaagaacaagagacagcaagacaaatgaatgatgatgaagatgaaggcgaacaagaatcaggtggaaggggagctgcaggtgatgaatttcagttggatgaagatcttctttaggtaactgggtggtaatgggtgttgtgtggtatctgggactggtagtattagtaactagtaattgtttctttgctgttttcagtattgctgaattcatgtcatgtttaccctatccttcatatatattatatagttatataattatatactgttacagatatatgtacatgggcctggcccattaggacactagtactgtagctagggtttctgtaactgcagacattctcacatggtaccagagccttgactgttccagccgccgctgtcccatggctggccggccctctctcccctcctccggcgagctcttccctcctctccctctctcctacagggctgcgttggccgcgccctctcctcccgagcgcggcgcgactctggtcaggcaccccgcgccgccggcccccatggccggacatcccgcgccgccgcctccctccgccg

SEQ ID NO: 10486 - DNA, 2500 bp, Zea Mays
ccacgcagcggagaccagagcttctctacggcgagggagcgccgaggggcaaatccgtcagcgcgggcacatcgcgtcgcctttccggcccccacacctctctctctctctctctctcttcccggtcgacgagcggagagctagcggcggggcgcgcgctgctatttatcgagcacacgggagccacgccgcccgtccctgtctccatcttgccgtcgctcccacgccgccgttccctccgcctgcctcgaccgcctcgtgccgtgcgcgctaaggagggagggagggagggaaagtgaagcaggagggtggaccactgcgcgcgtgcggcgccttcctcctcgaatcaccgccgacagcttctgcagctagcgttatcacccccaccaccccggggctcggattaggatctgagctgaagctgccaggccaggcgatcgagccgatgtacggctcgccggtgtccaaggacctcaacctcccggcgcagccgccgccgatggcctcgtccgggctgctacgctacagatcggcgcccagcgcggtgctcggcggcctctgcgaggaccagctccagctccctgccgccgctccgagcgccgccgacaacgtcttctcaaggttcctgcccgaccaccacatccgggacgacaagccgtcgcctgcccacttcccgagtgcggccgacatggcctcccaccaccagcaggagcaaatgatgttccactcccagtcccagtcccagcaccagcaggagacgggtaggtccgggggcggcctctaccgcaccgtcagctctggcatggaagcgggcggcactggcgtcggcgccgccagcagcctgattcggcagagcagctcccccgccgggttcctggaccatttcggcatggacaacgggtacggggcgatgctgagggcgagcatgggcatggggttccaggacggtggtgccagtgactccctcgcgggcggcggcggcggtagcggcaggctcgggggccagctgagcttctcgtcgcggcaggggtcgctcatgtcccagatctcggagatggacagccaggaggatgtcgtcggagcgagcagccccgacgctggcggcggcggggacgccgcctacatgccggggtacccgatgagctccggcgggtgggacgactcgtcgtcggcgctcttgccggacagcctgcccgcgacgaataaacgcccgcgggactcgttggagcacggcggcgggctggcgcaccagttcagcctccccaagacgtcgtcgtcggaggtggccgccatcgagaagttcctccagttccaggacgccgtgccctgcaaggtccgcgccaagcgcgggtgcgccacgcacccgcgcagcatcgccgagcgggtgaggaggacgaagatcagcgagcggatcaggaagctgcaggagctcgtgcccgacatggacaagcaaaccaacacctccgacatgctggacttggccgtcgactacatcaaggatctccagaagcaggtcaaggtaacgagctccggcggccgccggtctgctttcctcctccagaacccaaattgcaaggtcagagagccagtgacgtccaaatcacggaggctggcctcatcttgccccgccggctgatcgacggcgagcgagggttacctacagttacaaacaacgatatgtcgttgactcttcctcacctagtactagtagtaggaggaggaggagtatctttatcgtcgtttatcatcccttgtgttcacgcgttgcaggcgttgaacgagagccgcgccagctgcacctgcccggcgagcaagcaccagcagcggttctccggctgaagcaccggccgggccggcagtccccatcggtccccggcggctgcgtagcacgctccagtacacagctagtgcagcaaagatggacccaccacaaggcctggagacagacctgactgagaccgagatagagaggaacaccgccatcgtctgcagtgcatgcgcgcgagcagcatgtacagcgccggagcgatcgaggctcgctggactgctggatcgagcagtgtggcatcatcaagtattcaagcgactgggaggaaggaagaaagaatcgagtcatgggaccgaggaggaagaacgaatgaattgtacagtgctgtttctttttttttttttgctgtaaacacttttgctacatctgtgctgctgctgctctccatatgccgttgcccattgttactacgttaagaatcacagtgagatatagatcgaggaaaacttcactactgttaccaccaccatcaccatgcaagctggcggcacagtgccatgcaaaattcactcgtgtgcactgcagaaacatgcataggaacgcctcgcatgtttacatttccaaacaaatgctacaaagatgctcaaagatcgatatgtattggttaaagaaattgcttttaggaatttgtaacagctacttttccaacagctataaattagaagttgatcc

SEQ ID NO: 10487 - DNA, 1217 bp, Zea Mays
ctctaaaaccccaaccgtcgacgttcactcctcaccccctgcggccctgctcttttgagcctcactcctcagtcttcacgccgccggggcagtgctaagatccaggacacgcgctgtcccgctagcaccacgcctccccttgtcatcgtcctcctcccacgtgctgctgtgggggtgcagacgggagacacatccggacctgattgatttcttcgttttgttctgctgatattgacaaaaataatggtgatcctcaaatgtgtgttacctacgttgcagagatatacagaaatctaatggcctcagagcttataagaagacctaggtcaaattacatggagactttgcaacaggacatcacagctagcatgcgaggtgttctaattgattggcttgttgagaactgtatccaaacgcacaagctgcaacttcttgggataactagtatgctgattgcctcgaaatatgaagagtattctgctcctagtgctgaagaattttgtaacataacggctggtacatatgcaaaggctgaggttctggaaatggagcaacaagtgcttaatgatctgggctttcatttatctgttccaacaacaaacacatttctcaggagattccttagagcagcacaggcttctcgtacagtaagatcagtacccaaaccacattgcaacgagtcctttcagtctatataggtggcagcatcttcgattttccttgcaaaatggacacttgaccaatctgaccatccttggaaccctactcttgagcactacacgtcttacaaaagcttcgatattagaacttgcgtgcgggctctacaggaactgcagcacaacaccagtaattgccccctcaacgccatccgtgagaagtatgggcagcagaagttcgagtgcgttgccaacctcaggtcaccggagctgctgcggtcgctcttcagttgatgtgctcccctgcactctgctgattcactcgccatttgctgcaacgatcctgacactgtataaaatatttcttcagtttctgttccatttccaaactttcttcagtttgaacatgcattctgtgacttgggtcaccgacaaaagaggcgcgacacactaatatatcaatttgtaactcaaagcatgtttcaccatttttttcataaaacatagaacagaaataaatgcacacactctgcccctacaccatgagtgcctttgaaaaac

SEQ ID NO: 10488 - DNA, 1354 bp, Zea Mays
ctctaaaaccccaaccgtcgacgttcactcctcaccccctgcggccctgctcttttgagcctcactcctcagtcttcacgccgccggggcagtgctaagatccaggacacgcgctgtcccgctagcaccacgcctccccttgtcatcgtcctcctcccacgtgctgctgtgggggtgcagacgggagacacatccggacctgattgatttcttcgttttgttctgctggggtctctaatggtttaaacattgtagatattgacaaaaataatggtgatcctcaaatgtgtgttacctacgttgcagagatatacagaaatctaatggcctcagaggtttcggacgaatataagcttgtggcagatacactttaccttacagtatatcttattgaccaatttctttctcagaactgtatccaaacgcacaagctgcaacttcttgggataactagtatgctgattgcctcgaaatatgaagagtattctgctcctagtgctgaagaattttgtaacataacggctggtacatatgcaaaggctgaggttctggaaatggagcaacaagtgcttaatgatctgggctttcatttatctgttccaacaacaaacacatttctcaggagattccttagagcagcacaggcttctcgtacagtaagatcagtacccaaaccacattgcaacgagtcctttcagtctatatgtattgtcctcaacactaagttggcaagctacatttccaggctcatctgaccactttgaattatctggcgagttatcttgccgagttgactttaatcagttacgatttcatgaaatttcttccctcagaggtggcagcatcttcgattttccttgcaaaatggacacttgaccaatctgaccatccttggaaccctactcttgagcactacacgtcttacaaaagcttcgatattagaacttgcgtgcgggctctacaggaactgcagcacaacaccagtaattgccccctcaacgccatccgtgagaagtatgggcagcagaagttcgagtgcgttgccaacctcaggtcaccggagctgctgcggtcgctcttcagttgatgtgctcccctgcactctgctgattcactcgccatttgctgcaacgatcctgacactgtataaaatatttcttcagtttctgttccatttccaaactttcttcagtttgaacatgcattctgtgacttgggtcaccgacaaaagaggcgcgacacactaatatatcaatttgtaactcaaagcatgtttcaccatttttttcataaaacatagaacagaaataaatgcacacactctgcccctacaccatgagtgcctttgaaaaac

SEQ ID NO: 10489 - DNA, 1670 bp, Zea Mays
ctctaaaaccccaaccgtcgacgttcactcctcaccccctgcggccctgctcttttgagcctcactcctcagtcttcacgccgccggggcagtgctaagatccaggacacgcgctgtcccgctagcaccacgcctccccttgtcatcgtcctcctcccacgtgctgctgtgggggtgcagacgggagacacatccggacctgattgatttcttcgttttgttctgctggtttacatggctgcaagaaagaaaaagcctttgcttattgcttgccaagcaaccagtgccagaataacaagatctcaggctgctgcaaatagtacaagatctgggctggctccttctgtaccagtacctctgaaaacggagcataaccatgcagcgaaaaaaaagatgaaaagggaagcttcagatgaaaatgcttctgctgatgctggagcttcagctcctctgcctaaaaggcgtacagttctcaagaatgtaactaacataagctgtgctaaaatttccaaaaggtgcactgctgtgactgggctgaaggggtctctaatggtttaaacattgtagatattgacaaaaataatggtgatcctcaaatgtgtgttacctacgttgcagagatatacagaaatctaatggcctcagagcttataagaagacctaggtcaaattacatggagactttgcaacaggacatcacagctagcatgcgaggtgttctaattgattggcttgttgaggtttcggacgaatataagcttgtggcagatacactttaccttacagtatatcttattgaccaatttctttctcagaactgtatccaaacgcacaagctgcaacttcttgggataactagtatgctgattgcctcgaaatatgaagagtattctgctcctagtgctgaagaattttgtaacataacggctggtacatatgcaaaggctgaggttctggaaatggagcaacaagtgcttaatgatctgggctttcatttatctgttccaacaacaaacacatttctcaggagattccttagagcagcacaggcttctcgtacagctcatctgaccactttgaattatctggcgagttatcttgccgagttgactttaatcagttacgatttcatgaaatttcttccctcagaggtggcagcatcttcgattttccttgcaaaatggacacttgaccaatctgaccatccttggaaccctactcttgagcactacacgtcttacaaaagcttcgatattagaacttgcgtgcgggctctacaggaactgcagcacaacaccagtaattgccccctcaacgccatccgtgagaagtatgggcagcagaagttcgagtgcgttgccaacctcaggtcaccggagctgctgcggtcgctcttcagttgatgtgctcccctgcactctgctgattcactcgccatttgctgcaacgatcctgacactgtataaaatatttcttcagtttctgttccatttccaaactttcttcagtttgaacatgcattctgtgacttgggtcaccgacaaaagaggcgcgacacactaatatatcaatttgtaactcaaagcatgtttcaccatttttttcataaaacatagaacagaaataaatgcacacactctgcccctacaccatgagtgcctttgaaaaac

SEQ ID NO: 10490 - DNA, 1866 bp, Zea Mays
ctctaaaaccccaaccgtcgacgttcactcctcaccccctgcggccctgctcttttgagcctcactcctcagtcttcacgccgccggggcagtgctaagatccaggacacgcgctgtcccgctagcaccacgcctccccttgtcatcgtcctcctcccacgtgctgctgtgggggtgcagacgggagacacatccggacctgattgatttcttcgttttgttctgctggtttacatggctgcaagaaagaaaaagcctttgcttattgcttgccaagcaaccagtgccagaataacaagatctcaggctgctgcaaatagtacaagatctgggctggctccttctgtaccagtacctctgaaaacggagcataaccatgcagcgaaaaaaaagatgaaaagggaagcttcagatgaaaatgcttctgctgatgctggagcttcagctcctctgcctaaaaggcgtacagttctcaagaatgtaactaacataagctgtgctaaaatttccaaaaggtgcactgctgtgactgggctgaagttgggtccctcccagaaggctgggcagagcataaacaagcaatgcacaaacaagatctccatgcttctccctctggctgttggagggagttcacttgtggatgattctaataatgctgaagaaacacaaatggtagaccttttggcacagaaagagaagcagattgttttgcttaaggaggctcagccattacagaatactgaacaaaacaaaggcggtgcttgtgatgaggcatctgttgaggaaagaaatgccatgaatgtacacgaaactgctgccttaaaggctggggtctctaatggtttaaacattgtagatattgacaaaaataatggtgatcctcaaatgtgtgttacctacgttgcagagatatacagaaatctaatggcctcagaggtttcggacgaatataagcttgtggcagatacactttaccttacagtatatcttattgaccaatttctttctcagaactgtatccaaacgcacaagctgcaacttcttgggataactagtatgctgattgcctcgaaatatgaagagtattctgctcctagtgctgaagaattttgtaacataacggctggtacatatgcaaaggctgaggttctggaaatggagcaacaagtgcttaatgatctgggctttcatttatctgttccaacaacaaacacatttctcaggagattccttagagcagcacaggcttctcgtacagctcatctgaccactttgaattatctggcgagttatcttgccgagttgactttaatcagttacgatttcatgaaatttcttccctcagaggtggcagcatcttcgattttccttgcaaaatggacacttgaccaatctgaccatccttggaaccctactcttgagcactacacgtcttacaaaagcttcgatattagaacttgcgtgcgggctctacaggaactgcagcacaacaccagtaattgccccctcaacgccatccgtgagaagtatgggcagcagaagttcgagtgcgttgccaacctcaggtcaccggagctgctgcggtcgctcttcagttgatgtgctcccctgcactctgctgattcactcgccatttgctgcaacgatcctgacactgtataaaatatttcttcagtttctgttccatttccaaactttcttcagtttgaacatgcattctgtgacttgggtcaccgacaaaagaggcgcgacacactaatatatcaatttgtaactcaaagcatgtttcaccatttttttcataaaacatagaacagaaataaatgcacacactctgcccctacaccatgagtgcctttgaaaaac

SEQ ID NO: 10491 - DNA, 2006 bp, Zea Mays
ctctaaaaccccaaccgtcgacgttcactcctcaccccctgcggccctgctcttttgagcctcactcctcagtcttcacgccgccggggcagtgctaagatccaggacacgcgctgtcccgctagcaccacgcctccccttgtcatcgtcctcctcccacgtgctgctgtgggggtgcagacgggagacacatccggacctgattgatttcttcgttttgttctgctggtttacatggctgcaagaaagaaaaagcctttgcttattgcttgccaagcaaccagtgccagaataacaagatctcaggctgctgcaaatagtacaagatctgggctggctccttctgtaccagtacctctgaaaacggagcataaccatgcagcgaaaaaaaagatgaaaagggaagcttcagatgaaaatgcttctgctgatgctggagcttcagctcctctgcctaaaaggcgtacagttctcaagaatgtaactaacataagctgtgctaaaatttccaaaaggtgcactgctgtgactgggctgaagttgggtccctcccagaaggctgggcagagcataaacaagcaatgcacaaacaagatctccatgcttctccctctggctgttggagggagttcacttgtggatgattctaataatgctgaagaaacacaaatggtagaccttttggcacagaaagagaagcagattgttttgcttaaggaggctcagccattacagaatactgaacaaaacaaaggcggtgcttgtgatgaggcatctgttgaggaaagaaatgccatgaatgtacacgaaactgctgccttaaaggctggggtctctaatggtttaaacattgtagatattgacaaaaataatggtgatcctcaaatgtgtgttacctacgttgcagagatatacagaaatctaatggcctcagaggctctcttttatgcttgtcttatgttcagcttataagaagacctaggtcaaattacatggagactttgcaacaggacatcacagctagcatgcgaggtgttctaattgattggcttgttgagaactgtatccaaacgcacaagctgcaacttcttgggataactagtatgctgattgcctcgaaatatgaagagtattctgctcctagtgctgaagaattttgtaacataacggctggtacatatgcaaaggctgaggttctggaaatggagcaacaagtgcttaatgatctgggctttcatttatctgttccaacaacaaacacatttctcaggagattccttagagcagcacaggcttctcgtacagtaagatcagtacccaaaccacattgcaacgagtcctttcagtctatatgtattgtcctcaacactaagttggcaagctacatttccaggctcatctgaccactttgaattatctggcgagttatcttgccgagttgactttaatcagttacgatttcatgaaatttcttccctcagaggtggcagcatcttcgattttccttgcaaaatggacacttgaccaatctgaccatccttgggtttaaccctactcttgagcactacacgtcttacaaaagcttcgatattagaacttgcgtgcgggctctacaggaactgcagcacaacaccagtaattgccccctcaacgccatccgtgagaagtatgggcagcagaagttcgagtgcgttgccaacctcaggtcaccggagctgctgcggtcgctcttcagttgatgtgctcccctgcactctgctgattcactcgccatttgctgcaacgatcctgacactgtataaaatatttcttcagtttctgttccatttccaaactttcttcagtttgaacatgcattctgtgacttgggtcaccgacaaaagaggcgcgacacactaatatatcaatttgtaactcaaagcatgtttcaccatttttttcataaaacatagaacagaaataaatgcacacactctgcccctacaccatgagtgcctttgaaaaac

SEQ ID NO: 10492 - DNA, 1647 bp, Zea Mays
ggttctccactacagcctgccatcggtctctcaggacataagcaatggctggcagaagtacagttccttggtgttctggagcacccaaatcttgtaaagctacttggatattgtgctgttgatagcgaaagaggggcacagagattgttggtctacgagtttatgcccaataagagcttggaagaccacttgttcaggcgagctaatcctcctctaccgtggaacagaaggcttcaggttatcttgggagctgcagaaggattggcgtacctgcatgaaggggaagttcaggtgatctaccgggacttcaaaacgtccaacattttactggacaaggacttcagagcaaagctatcagacttcggcctagccagggaggggccaactggagcaaacactcacgtctcgactgcggtacgtacgttacatccatcaatacgtaggcaatgcagtgtacctgctcgatctacgcgtagctgacgaacgacgagcctgggcttccattgtcaatggtgcattcactttctttctatgcgagcatgcacggcactgtcatgtgactgaactgaactattgcactacgtgccatgctaacgcagggcttgaagatagcatcaagcagtcaatgtgacgcagggtcgcgctacggttttgacagctctgtggcatgatgtattttcaggtcgtcgggacgcaagggtacgccgcaccggagtacatggacacggggcacctgacgacgaagagcgacgtgtggagcttcggtgtggtgctttacgagatcctgacggggcggcggtcgctggaccggaacaggccggcggcggagcagaagctgctggagtgggtggcccagttcccgccggacagccgcaactttcggatgatcatggaccccaggctccgcggcgagtactcggtgaaggccgcccgggagatcgccaagctggccgacagctgcctgctcaagaacgccaaggagcgccccaccatgagcgaggtggtcgaggtcctcggccgggccgtgcaggcgcacgccgagcctgacagcggggctcccggccccggcgccaaggggaagaagaccgacgctgccacaccgtcccggcggcggcgtgactgactgctacatgtcgtcatcggtaaaggcgcttaccgagtccattggttagtctagtcgtgagctgtgacagcacaaaaggagtgagtgttgtgcttggggccctacatataattttttttggacatacagcattacttagacgtacgtagagacgagctggcggattgaactttgtgtagctttcgaaagtgagcattttgaaaagaaaaaaaagagtagaggtctcaagggtttcgaaagggggcatttcaaaagattttgcgctggctctacaaaaggatctgttttagcatagccgagtgaaatcagagtgtcagacgcgagcgcacagatttttcaggaagcagctggcaagagcttcgtcaagcatgtattaacagaaaacataatttataaaaaaaaaatagcgcacaaatttgattgtattggatttcgctgggatcttgttgattgcataaattatttggtcttttacgagcactccgtcttgtgtgtgctattaggccattctcaataaaaattcc

SEQ ID NO: 10493 - DNA, 2820 bp, Zea Mays
gtacgagccgcgggccgtgtccacctttctgttcagccttgctgtcttgtcgcgcgctctcttcctctcccgcggccccgccccacagctctgctcccccgtccttccgacgttcacactgccttctcttctcagcccccacgtcgcgtcttacaagaggcatcgcagcctccgattccccgagaggcggcacgtcggcacggcacgctcttctcctagcgcgggtggtgtgggtaaccgcggcgcgagaagctgctcgatcttgcagctcgtgccgggcgccgggggtgtgcggtgcgggtgctgcggacatgagctgcctgtgctggttcaagcggaggtccaggaaagggcgatcgtcgtcgtcggggaagcgaggggcgtcgtcgacggcgacggtgtcggtgtcgggccccgcgaccgcgaccgcgaccacgaccacgacggcgtcggcggagagcacgagccggtcggacgactcgggcgcggtgcggccggtgagcaagtcggcgggctcgtcgcagtcgcagcggagcatctcgtcgctctacgaggagcggggccacggccagctgcgcgtgttcgactacgacgagctccagggcgccacggccgagttcggccgcgcgcagaagctcggcgagggcggcttcggcagcgtctacaagggcttcatccgcgccgccgacggcaagggggaccgcgtccccgtcgccgtcaagaagctcaaccagcgtggcatgcagggacataagcaatggctggcagaagtacagttccttggtgttctggagcacccaaatcttgtaaagctacttggatattgtgctgttgatagcgaaagaggggcacagagattgttggtctacgagtttatgcccaataagagcttggaagaccacttgttcaggcgagctaatcctcctctaccgtggaacagaaggcttcaggttatcttgggagctgcagaaggattggcgtacctgcatgaaggggaagttcaggtaatcaggtgttcttcaagcctgcactattggtcctgtgctttcaatttaccgccaaaggatagcctatcttccatggttttttttaaatgggaaagcatcctagctagcaaaagtcatcctgactactcgccgcaaagattccaggaagctaacttctttgacgtttccggaaagcacagctcaatgttcaaggctaggacatgcaggcgccgtagccaatttcaattgtagctgtgctgtctgtgccaaacatttcagcctgcctagcaccggttctccagctgactattgtgcgcagcatatgagagccgtcaagcaagatcaaaatatcacatattacttgtgttaagactacgccatgccattgtttcagaacgtgtgctacagcgctgttcttgtttgttttcaagtttttcgttcagaaaagctagaccttaattttctgcattttggttaggtgatctaccgggacttcaaaacgtccaacattttactggacaaggacttcagagcaaagctatcagacttcggcctagccagggaggggccaactggagcaaacactcacgtctcgactgcggtacgtacgttacatccatcaatacgtaggcaatgcagtgtacctgctcgatctacgcgtagctgacgaacgacgagcctgggcttccattgtcaatggtgcattcactttctttctatgcgagcatgcacggcactgtcatgtgactgaactgaactattgcactacgtgccatgctaacgcagggcttgaagatagcatcaagcagtcaatgtgacgcagggtcgcgctacggttttgacagctctgtggcatgatgtattttcaggtcgtcgggacgcaagggtacgccgcaccggagtacatggacacggggcacctgacgacgaagagcgacgtgtggagcttcggtgtggtgctttacgagatcctgacggggcggcggtcgctggaccggaacaggccggcggcggagcagaagctgctggagtgggtggcccagttcccgccggacagccgcaactttcggatgatcatggaccccaggctccgcggcgagtactcggtgaaggccgcccgggagatcgccaagctggccgacagctgcctgctcaagaacgccaaggagcgccccaccatgagcgaggtggtcgaggtcctcggccgggccgtgcaggcgcacgccgagcctgacagcggggctcccggccccggcgccaaggggaagaagaccgacgctgccacaccgtcccggcggcggcgtgactgactgctacatgtcgtcatcggtaaaggcgcttaccgagtccattggttagtctagtcgtgagctgtgacagcacaaaaggagtgagtgttgtgcttggggccctacatataattttttttggacatacagcattacttagacgtacgtagagacgagctggcggattgaactttgtgtagctttcgaaagtgagcattttgaaaagaaaaaaaagagtagaggtctcaagggtttcgaaagggggcatttcaaaagattttgcgctggctctacaaaaggatctgttttagcatagccgagtgaaatcagagtgtcagacgcgagcgcacagatttttcaggaagcagctggcaagagcttcgtcaagcatgtattaacagaaaacataatttataaaaaaaaaatagcgcacaaatttgattgtattggatttcgctgggatcttgttgattgcataaattatttggtcttttacgagcactccgtcttgtgtgtgctattaggccattctcaataaaaattcc

SEQ ID NO: 10494 - DNA, 1055 bp, Zea Mays
gcatcagctgcgctgctcaccaggaaggccatctcatccatccttcattgtattgtagtggcatcaccaggaacagcccagccgcaagaagacagacgacagcagcgagtggggatcggaagaaagaggaagcggagacgaaggtgagagagagaggcaaaagggcagccatgacgatgaagcagtcgaggttcaagaggatctgcgtcttctgtggcagcagccaggggaagaaggcgagctaccatgacgccgccgttgagctcggcaaccagctggttgcccggagcatcgacctggtgtacggcggcggcagcatcgggctcatgggcctcgtctcccaggccgtctacggcggcggacggcacgtcatcggggtcattcccaagacgctcatgacaccagagataagcggcgagacagtcggggaggtgcgggcggtggccgacatgcaccagaggaaggcggagatggcgcggcagtccgacgcattcgtcgccctgcctggtcgggctgctgaacgtggacggctactacaactcgctgctgaccttcatcgacaaggccgtggaggagggcttcatcaaccccagcgcccgccgcatcatcgtgctcgcgcccaccgcgcaggagctcatggacaagctcgaggagtacgagccttaccacgacagggtggcgtccacgctcaactgggagaccacgatggaccacctggcctactgacgcccacgctgccagagccgccagcaggcgactgggacgacatctctgatccatcgatgccattcaggaaacaagcttttagcttgccgtcagattggggcttttgtttcgtttttaactgcatgcagatcggttttatttggagtgccggagggagagagaaaaaaaaaacaggttgattattcggttcgcgtagcaggagtacgtagtacgtgcttgttttgtgtatatggtgccttgtgtttgcttcccaccaacggggatgattgatggcttgcagtgttgtctctgtaccagttcaaaaaaaaaaaacccgaccggtttcccct

SEQ ID NO: 10495 - DNA, 887 bp, Zea Mays
ctgcctaggttcaccccgattcaactccgacttcgcgagtcgtgtctcacctctatcgccatccgttccctactccacttcaatctgctattcctgctccactccgcttcaatccgccgcccctgctccagtaggaacgttccccaccccggcaaccccccacgctagctactccggagcaccggaacgcaccgtcgcccccgtcaagcaggttgcgccgcccgcccgtggtgccggcgctgtgctggaggcggtggagctggggccgtggggaagcttctcgctggggagagccgggacaagctagagcgacggacatgggtcaccagtaagccacggtcaggggcatttcagtcctacctagcagtggtgatggcaaaaatctaacataatgcaagaaaaaccttggaatgaatgtacaagccacttagggtgctgtattagagctgtaacaggatgggttcgttatgctgcgtggcggcacggcctcatggggctagcacagcaagccgggagtggtcctctattagccgtagcgacccaccctggcgtactggtgctggcttctccccacctctgtctagagggtgggagtacaggatcaactcggaagggctgtcttatggatcccatggtgatagtggggtcgctgtgaactatggatcatcactatcatcaaatagtaaaggggctagtaggagctgggagaggaatgagcttccacaagatcaccgctactctacatctgagggtgccatttcgtatctcaacagcccagatatcagcttccagaatcaccatattatgctaccgatgctgcaagattctagtgttgatgaatacatgagagttctggattgcagatgaagggtgggcctgatgcaatg

SEQ ID NO: 10496 - DNA, 1717 bp, Zea Mays
gacggctacggtggacttgtttgctctctttgactcggtgcctgcctcgggaaacgtggtcctggatgctcgtcggtggcgtatggagcgtcggaggagatcggcccgttccggatcaaaccaaacgggacaggcctgttcctcaacaagtactcatggaacagagaggcaaaccttctgttcctcgagtcgcccgcgggagtcggcttctcctacgccaacaccacctcggacctcaagacgtcgggcgacgagaggaccgctcaagacgcgctgcagttcctggtcagctggatgtcacggttcccgcagtaccggcaccgagatttctacatcgccggagaaagctacgcgggccactacgtcccccagttggcaaggaagatcgtcgagtacaacgaggcctcgcctcaccccttcatcaacctcaagggaatccttgtgggcaacgcggtgaccgacaactactacgacaacatcggcacggtcacctactggtggacgcacgccatgatctccgaccgcacctacaaggccatcctcaggtggtgcaacttcagcagcagcagcatctcgcgcccctgcaaccgcgccatgagctacgccatgaaccacgagttcggggacatcgaccagtacagcatctacacgccgtcgtgcgccgccgcggccagggccaacgccaccgtgctcaggttcaagaacaccctcgtccgccgccgccgctcctccggctacgacccctgcacggagacctacgccgagaggtactacaacaggatggacgtgcagagggcgatgcacgccaacaccacggggatcccctacagatggactgcctgcagtgatgtgctgatcaagacatggcaagattcagagttctccatgctgccgacgtacaagaagctgatgaaagcaggattgaggatatgggtgttcagcggcgacacagattcagtcgtcccggtgaccgcgacgaggttcgccatcagtcatcttggtctgaagatcaagacccgctggtatccatggtactcagctggacaggtacggaacttgccattgctgctgttgttgcttgtaacgtcttccgagtttggggcgcatgtgcaggtaggaggatggtctgaggtgtacgaagggctcacgtttgcgtcggtgagaggcgcagggcatgaggtgccgttgttccagcccaggagggcgttcaggatgttccggtcgttcttggccggggagccattgcccaagtcctgaaggttcctgacatgtgactgaggccatgcatgcctacctgatcatgtctagctacggtcctgacgggtgagaaggtgacgttccccaggtagagaatgacttgttgataggcgcgcagttcatagctgaggagtgattgattggtctcgggagaaggatgtagagaataataaggatggctatgttatgccatggaaacccatgagcattgcaatgattagcgaataattttcagtgatctcactctcaagtgcttatgttatgttatgttatgccatggaaacccatgagcaatgcgacgaataaatttgaaggatctcactcttgaaccaaatatgtttcatcgcaacgcagttttcacatcgtgattctttgcccctccaattagaaacgtagggtgttttaggattctcgctgttcaagttctttagcgtggctcgtcaacactggttgatgttac

SEQ ID NO: 10497 - DNA, 2091 bp, Zea Mays
cactaccactagcaatacctgagcgcgcggccctccgctcgctctccaccctccaggccggcagccatccggccggccacgataaatacgcagcagcagctcgcgtactgcgtacacaccgtcgcgagctagctagctgctagccacaccacacctttctctgcccacgcacaaaagccatggcgacgacgcggcctcgcggtgagggtggggcggcgagcggcgcgctggtcatggcgatcgtcgtcgtcgtcgccatcgtcctgctgctgctgccatatggagccggcgcggaggagtgcgaggacggcatgagcacccgggcgcgcgcgggcgaccgcgtggaggcgctgccggggcagccggcggtggcgttcgcgcagtactccgggtacgtggcggtggaccgggaccgcggccgcgcgctcttctactggctgaccgaggccgtcggcgacgacgcggccgccaagcccctcgtgctctggctcaacggaggtcctggatgctcgtcggtggcgtatggagcgtcggaggagatcggcccgttccggatcaaaccaaacgggacaggcctgttcctcaacaagtactcatggaacagagaggcaaaccttctgttcctcgagtcgcccgcgggagtcggcttctcctacgccaacaccacctcggacctcaagacgtcgggcgacgagaggaccgctcaagacgcgctgcagttcctggtcagctggatgtcacggttcccgcagtaccggcaccgagatttctacatcgccggagaaagctacgcgggccactacgtcccccagttggcaaggaagatcgtcgagtacaacgaggcctcgcctcaccccttcatcaacctcaagggaatccttgtgggcaacgcggtgaccgacaactactacgacaacatcggcacggtcacctactggtggacgcacgccatgatctccgaccgcacctacaaggccatcctcaggtggtgcaacttcagcagcagcagcatctcgcgcccctgcaaccgcgccatgagctacgccatgaaccacgagttcggggacatcgaccagtacagcatctacacgccgtcgtgcgccgccgcggccagggccaacgccaccgtgctcaggttcaagaacaccctcgtccgccgccgccgctcctccggctacgacccctgcacggagacctacgccgagaggtactacaacaggatggacgtgcagagggcgatgcacgccaacaccacggggatcccctacagatggactgcctgcagtgatgtgctgatcaagacatggcaagattcagagttctccatgctgccgacgtacaagaagctgatgaaagcaggattgaggatatgggtgttcagcggcgacacagattcagtcgtcccggtgaccgcgacgaggttcgccatcagtcatcttggtctgaagatcaagacccgctggtatccatggtactcagctggacaggtaggaggatggtctgaggtgtacgaagggctcacgtttgcgtcggtgagaggcgcagggcatgaggtgccgttgttccagcccaggagggcgttcaggatgttccggtcgttcttggccggggagccattgcccaagtcctgaaggttcctgacatgtgactgaggccatgcatgcctacctgatcatgtctagctacggtcctgacgggtgagaaggtgacgttccccaggtagagaatgacttgttgataggcgcgcagttcatagctgaggagtgattgattggtctcgggagaaggatgtagagaataataaggatggctatgttatgccatggaaacccatgagcattgcaatgattagcgaataattttcagtgatctcactctcaagtgcttatgttatgttatgttatgccatggaaacccatgagcaatgcgacgaataaatttgaaggatctcactcttgaaccaaatatgtttcatcgcaacgcagttttcacatcgtgattctttgcccctccaattagaaacgtagggtgttttaggattctcgctgttcaagttctttagcgtggctcgtcaacactggttgatgttac

SEQ ID NO: 10498 - DNA, 3015 bp, Zea Mays
gaaaggctcgcgtatgccttccccctcctccacctttttcccccgttcgagtgctcgagctccgaccaaatctcgcagcggtagcaatccccgagcggccgagcccgaagcgggatcagtggaggacgagtggacgacaccctcgattctgacctgcggtcggcgcgacttacagagaaccggagatgcagcagggcgacagcacggaggcgcaggtgacgtgggaggaccagcagaacatcaaccgcttcggtcgcctcaacaaccgcctccacgagctccaggacgagatcaaactcgcgaagatctgctgctgagggagatgcatataatctgagctgctcgtgaagtgtccagaagaggttcctttttttttcgtgcgtgtataatggaggaagtggaggaggcgaacagggaagccgtggagagctgccgcagggtgctagccttgctctcccatccgcatgaccccgcgcaggtcaggagcatagctctggggacggacgaagcatgcaccaagtttaggaaggtggtctccctgctcagcaatggagaagtaggaacaggagaagccggaccatcaggcacaagcgcaagcgcaagccatcctagagctaagcttgttagcagaagacagaatccagggttcttgactcagaaaggcttcctggacagtaacaccccggtcgtggtgctgaacagcgccgcccatccttctccgacctccgcgcaggtgcatccaagagccggagcattggatacggagggcgtgcaccccctcggagttggaggacctcccaagctggtccagcctttgtccgcgcattttcagttcggcaatgtgtcgtcgaggtatcagcagttaccgagtcatcatcatcgtcatcagcagcaggagaagctgcaggccgccgagatgttcaagagaagcaacagcgggataaacctgaagttcgagagcgccagcggcacgggtacaatgtcgtcggcgaggtccttcctgtcgtctctgagcatggatggcagcgtggtggctagcctggatggcaagctgccgtcgtcgtcgtcatcgttccgtttgatcggtgcgcctgcaatgagcgatccggcgaacgccgcgcagcaggccccgaggcggcggtgcacgggccgcgggaaggacgggactggcaagtgcgctttggcgggcaggtgccattgttcaaagagaagtaagaagttgcgggtgaagaggtcgattaaggttcctgccgttagtaacaagatcgctgatatacctccggatgagtactcgtggaggaagtatgggcagaagccgatcaagggttcccctcatcctaggggctactacaaatgcagcagtgtgaggggctgtccagctaggaagcacgtggaacggtgtgtggatgattcggcgatgctcatcgtgacatacgagggcgagcacaaccacaccggaatgccagctcagtcagcagcagcagcagcacaggtgtagccgtgtagtcgtagagaactcatcatcagttcatcactgcacccccgcctccccctccttgaggacgaagtggcaccaccaacatggcctctgttggtcaccaggtcgtcgagatgtctggtcctgcttgcgcccacaagatctgtagcgagaatggagtgtgggtgtacacaagactttctaatccatttgtgggggcagctggctgtcgctcaggattatttattgtggtcttgttgagaggtggaagggagaaagtaaaagtttggcgggaacgggatagccgtgtaaactacttgttcatagcacaatcgtcagcggcactgccttcgtttctctgctacggttcttttttgaaacgaaccaggcaggagagctgtcgattatatttataaagaagaagtggtccggatcgaactaatcaacaaaacaaacaataggcggttggattgggacatcaacacgctgacaccatacaacttaactcgccggttggattgagacatcaacacggcaccacactcaccgccgacacagagtgcccaaacaaacacaggcagcggcaaccccacacgagagcatataaaactgcttaaggtcatcgttgtcaagcaaggatgcagagcatccagcaactccgactttccaaagcagccgacagacgaaccaaacgaaaagcagacagacaaccctaagcgaaaggtctcaacaggtcatcgttgccgggctcaaggcacagagcagctccgacttccaatcttgaccctccgccctgccttcggtttttgcccgaccttcgaaacattctggaccacgaagaagggaggttcgcctcatgttatcgttgccgagccacatcccctgacatagcagctccgacttcacgttgcaaaaccccacctccacctgcgtaccaggcgtcgagaagcgaagcaacagttgaaggcaaagccgtggccgagacgaacttaagaagcgacgccttcaggaagggagtgacgccaccgtgacgccaccgtcgcctgtccgcgatggaccgggctttcacccaaggaagatagcgttggagatgcgatgccctcaacaggggaagcggcacccatgggcgtcaccatcgccgagactttcgcccaagagccccaagcatcgcgtctggccgaaacctcgagacacagcaagctgcctccgtcgtcgccgctgacccgtcgtcctgcataatgatgaagattttgggacatgccgccgccaccaccctgcgctagtccgagccactagccgacgctgctgcagacgagaggtcccgctccagcctctccaggccagaacggccagaggcggtggcaccagccacgaccgccgtcgacatagccggtcgcagtcataccagccaaagccacgttgtgtcggccacgccagccgcaaccgttgctggacgccagacgttgcccctcccacgcacaggtgcgcgcccctgcctcgcgggcaccggatccggcccgggcctagccggatctggg

SEQ ID NO: 10499 - DNA, 3031 bp, Zea Mays
cggtcgtcggcccacctagttccttatccgtcgtctcctacgcctccatccacactccacagccacgccacagtcgttgcccaccacccagagcacgcggcggcttgtcgccgtgcgcgccgccaccatcaccacacgaggcgccggagaaagacatcaagcgcacgcccatggccatgactcctcacgcctcggcggccaccgtagccgttacccctgcgttgcgctttccccacactttgtctgccacgggcctctcctcaccgcctctggctgggggctgcggcggctgccgggttcggttccggcccagccagcgcggccgaggcacgcaggggcggcgaggtggctctcacgtgtcgcgcgtggggggcctgctgggcaccgtattcggcgggggcggccgcgacgacggggaggccacgcggaagaagtacgcagacaccgtggcgcgtatcaactccatggagctcgaggtctccgcgctctcagacgctgatttgcgtgcacgcaccgctgcgctccaggaccgtgctcgctccggggaatccctggattcccttctccccgaagcatttgctgttgtgagggaggcttccaagagagttctaggcctccggccctttgatgtgcagttgattggtggtatggttctgcacaagggggagattgctgaaatgaagaccggagaggggaagactcttgtggccattctgccagcatacttaaatgctttgagtgggaaaggagtgcatgttgtcactgtaaatgattatctcgcaagacgtgattgtgagtgggttggtcaagtcccccgatttctaggactgcaggttggcttaattcaacagaacatgacacctgagcaaaggagggaaaattactcatatgatattacttatgtcacaaacagtgagcttggttttgattatctaagagataaccttgcaatgactgtagatgaacttgtcttgaggaacttcaattactgtgtgatagatgaagttgattcaatccttattgatgaagcaagaacacctcttataatatcaggcctagctgaaaagccaagtgatcggtattacaaagcagcaaaaatagctgaagcttttgagcgagacattcattacacggtggatgaaaagcagagaaacgttttacttacagaagaaggttatgctgatgctgaagaaatactggacatagatgatctgtacgatcctcgtgaacagtgggcttcgtatattctaaatgcaatcaaggctaaggagctcttccttaaagatgtcaattacattgttcgtagcaaggaagtgcttattgtagatgagtttactggcagagttatggcgggcaggcgatggagtgatggtctccatcaagcaattgaagcaaaagaaggtgtacctatacaaaatgaaaccataactctcgcatcaataagttaccaaaacttctttcttcagttccccaaactatgtggcatgactggaactgcagctacagagacccaagagtttgagagcatatataaacttaaagttactgttgtcccaacaaacaagccaatgatacggaaggatgactcagatgttgttttcagagcaacaaatggaaaatggcgtgctgttcttgttgagatatcaagaatgaataaagttggccgtcctgtgcttgttggtaccaccagtgttgagcaaagcgaatctttatcaaagcaattgcgtgaagctgggattcctcacgaggtcctgaatgctaagccagagaatgttgagagggaggcagagatcgtagctcagagtggacgccttggtgctgtgacaattgctaccaatatggcgggacgtggaactgatattatccttggtggcaatgcagaattcatggccaggttgaagttgcgtgagatccttatgccaagggaccaacacgtgatgaagtaatagcgaatttgagaaatgcatttgtgaagatagcagacgaatataaagtttacactgaggaggaaaagcagaaggtcattacagtaggtgggcttcacgtagtaggaacagagcgccatgaatcacgcagaattgacaatcagctccgtggtcgaagtggaagacagggggatcctggaagctctcgcttctttcttagtctcgaggataatattttccggatctttggaggtgacaggatacagggtctgatgcaagcattccgagttgaagatcttcctatcgaatcgaaaatgctaacgagggctctagatgaagcgcagcggaaagttgagaattacttttttgacatcaggaagcagttgtttgagtatgatgaggtattgaatagccagagagatcgtgtatatgcggaaagaagacgtgctcttgcatctgacagtcttcaatcacttattgtggaatatgctgaattgacaatggacgacatattaggggctaacataggacctgatactccaaaggaaaattgggacctgaacaaacttatagctaagctgcaacagtattgccatctgttggatgacttgacaccagaattgttggagggcaaaagctcaagctacgacgatttgcgggagtacctgcgtaagcgagggcgtgaagcttacttccagaaaactgttagttatttctccttttcctttcatggatattgttttttcgcatggttcaaaggttttaagaagttcaacaacaacaacatcaacatagccttttagtcccaaacaagttggggtaggctagagttgaaacccaacaagaagtcaccaaaaagagaaagagagagaaaggggaggggaaaaagtttttgagagaactaaaagggaaaaggcctaatcacagttcgggcacgtggatagtttttttccaagcacttctatccaaacacaactcctttggatattccattccttcaagtcccttttgattgcttccttccatgtcaagtttggtcgtcctctacctctcttcacattattgtcctgtcttatgatgcctttgtgcactggtgcctctggggg

SEQ ID NO: 10500 - DNA, 3224 bp, Zea Mays
cggtcgtcggcccacctagttccttatccgtcgtctcctacgcctccatccacactccacagccacgccacagtcgttgcccaccacccagagcacgcggcggcttgtcgccgtgcgcgccgccaccatcaccacacgaggcgccggagaaagacatcaagcgcacgcccatggccatgactcctcacgcctcggcggccaccgtagccgttacccctgcgttgcgctttccccacactttgtctgccacgggcctctcctcaccgcctctggctgggggctgcggcggctgccgggttcggttccggcccagccagcgcggccgaggcacgcaggggcggcgaggtggctctcacgtgtcgcgcgtggggggcctgctgggcaccgtattcggcgggggcggccgcgacgacggggaggccacgcggaagaagtacgcagacaccgtggcgcgtatcaactccatggagctcgaggtctccgcgctctcagacgctgatttgcgtgcacgcaccgctgcgctccaggaccgtgctcgctccggggaatccctggattcccttctccccgaagcatttgctgttgtgagggaggcttccaagagagttctaggcctccggccctttgatgtgcagttgattggtggtatggttctgcacaagggggagattgctgaaatgaagaccggagaggggaagactcttgtggccattctgccagcatacttaaatgctttgagtgggaaaggagtgcatgttgtcactgtaaatgattatctcgcaagacgtgattgtgagtgggttggtcaagtcccccgatttctaggactgcagagaacatgacacctgagcaaaggagggaaaattactcatatgatattacttatgtcacaaacagtgagcttggttttgattatctaagagataaccttgcaatgactgtagatgaacttgtcttgaggaacttcaattactgtgtgatagatgaagttgattcaatccttattgatgaagcaagaacacctcttataatatcaggcctagctgaaaagccaagtgatcggtattacaaagcagcaaaaatagctgaagcttttgagcgagacattcattacacggtggatgaaaagcagagaaacgttttacttacagaagaaggttatgctgatgctgaagaaatactggacatagatgatctgtacgatcctcgtgaacagtgggcttcgtatattctaaatgcaatcaaggctaaggagctcttccttaaagatgtcaattacattgttcgtagcaaggaagtgcttattgtagatgagtttactggcagagttatggcggcgatggagtgatggtctccatcaagcaattgaagcaaaagaaggtgtacctatacaaaatgaaaccataactctcgcatcaataagttaccaaaacttctttcttcagttccccaaactatgtggcatgactggaactgcagctacagagacccaagagtttgagagcatatataaacttaaagttactgttgtcccaacaaacaagccaatgatacggaaggatgactcagatgttgttttcagagcaacaaatggaaaatggcgtgctgttcttgttgagatatcaagaatgaataaagttggccgtcctgtgcttgttggtaccaccagtgttgagcaaagcgaatctttatcaaagcaattgcgtgaagctgggattcctcacgaggtcctgaatgctaagccagagaatgttgagagggaggcagagatcgtagctcagagtggacgccttggtgctgtgacaattgctaccaatatggcgggacgtggaactgatattatccttggtggcaatgcagaattcatggccaggttgaagttgcgtgagatccttatgccaagagtcgtcaatccaatagatggtgttattgtatccaaaaagcagatgccaccaagaaagacatggaagacaaatgaaagcttgttcccatgtgaactttcaaaagaaacattatcgtctgtcaaggatacagttgaaatggctgtcaaagaatggggagataaatcattaactgaactggaagcagaagagcggctgtcctattcatgtgagaagggaccaacacgtgatgaagtaatagcgaatttgagaaatgcatttgtgaagatagcagacgaatataaagtttacactgaggaggaaaagcagaaggtcattacagtaggtgggcttcacgtagtaggaacagagcgccatgaatcacgcagaattgacaatcagctccgtggtcgaagtggaagacagggggatcctggaagctctcgcttctttcttagtctcgaggataatattttccggatctttggaggtgacaggatacagggtctgatgcaagcattccgagttgaagatcttcctatcgaatcgaaaatgctaacgagggctctagatgaagcgcagcggaaagttgagaattacttttttgacatcaggaagcagttgtttgagtatgatgaggtattgaatagccagagagatcgtgtatatgcggaaagaagacgtgctcttgcatctgacagtcttcaatcacttattgtggaatatgctgaattgacaatggacgacatattaggggctaacataggacctgatactccaaaggaaaattgggacctgaacaaacttatagctaagctgcaacagtattgccatctgttggatgacttgacaccagaattgttggagggcaaaagctcaagctacgacgatttgcgggagtacctgcgtaagcgagggcgtgaagcttacttccagaaaactgttagttatttctccttttcctttcatggatattgttttttcgcatggttcaaaggttttaagaagttcaacaacaacaacatcaacatagccttttagtcccaaacaagttggggtaggctagagttgaaacccaacaagaagtcaccaaaaagagaaagagagagaaaggggaggggaaaaagtttttgagagaactaaaagggaaaaggcctaatcacagttcgggcacgtggatagtttttttccaagcacttctatccaaacacaactcctttggatattccattccttcaagtcccttttgattgcttccttccatgtcaagtttggtcgtcctctacctctcttcacattattgtcctgtcttatgatgcctttgtgcactggtgcctctggggg

SEQ ID NO: 10501 - DNA, 2751 bp, Zea Mays
agttagccaggagccagggcccaggaggccagaagccgcacacgcggtcacgcggaccgcggacgactgccgccgccgtcgtcgtcgattggctcgtgagtcctgctcgctgctccttcctacgccgtgccaccgcctgctgtttcgctcgctcgtgcttggctgctcctgactgcaccgcgccgccgccgccgcagttctgctctccatcccgacacatcgcgccgcttcaagctaaagtgccactgcgccaccatccatcccggcatctcgcgccgtttcagtctcaagagcagatacgcaggtatggagccacgcactgagggagatgcttccaggaacttgcgccaaggtcgattgctagagccgccaccggtacctgctgtgaggacttctccagaaggagtgcagaggcacacaggtcaggatgtgattgctagtagaagtcaaagtgcagcagcatctgagacgggctcttctttgccatgtgaagatggaaatgcaacggctgaaactattggcagcagcacccatcctgtgcacattggtgtgcaaaaccaagacattgaacaagagcaagttcatgagactggaaagagatacaagaggttgacatctgatgtatggaattactttaccaagaaaaaagagataatagaggagaatgggaagaagcgtgagcaaatttggggttattgcaacttcccaaattgtaagcggcgatatagagcagagggccgccaaggtacaactgcatttaagaatcatttgaggtccgcacacagcatagttcgaggccaacaacaacttaaatttgagaaggaccttggtaataacattacccatatccagcctttcatgtatgatcaagaagttagcgtgaagaaacttatcatggcaataattatgcatgattatcctttcaatatagtagagcatggatatttcgttgatttcattaaatcacttcatcctagctttccaatcaagagttgtaatgctgttggtaaagaagtaatggatacatatttggaagagaaggagaaattatatgcacatttaaaaactgtgcattgtcgctttagtgtaaccatggatatgtggacatcatgctcgaataaatcatacatgtgtgttactgttcattggataaatgatgattggtgtattcagaagaggattattggtttcttcaatgtcaaaggacgacacactggtaaaaagttgtcagagacctttactgaagctatggttagatggaatcttgataagaagctattttccttgaccttggataatgctagtgcgaatgaattggcagtcaaagatataatttcagatctaaaagatggccaggcttccttagtttgtgatggtctgttttttcatgtaagatgtgcatgtcatatactaaatttagttgctagagatggcctgaaagtaatttcgaaaacaattgacaagatcaaagctcttgtactagctgtgaagggatctccattgcagtggaaggaacttatgaagtgtgctagcgagtcagaattagatacaaagaggggcatctcacttgatgtttcagcaagatggaattcaacttatttaatgctgcgggatgccttgtactacaaggatgcttttgcaaggcttaagtcttcaaatcgtcatatgtatgtaaaaaattatccatctccggatgagtgggacatggcactaaaaatctttcaatgcttgaaaaaagtttatagtctcgctgaaattctctctggcacttcatatccaacagcaaacttgttctatagaggtttttgtgacataaaagtattgctagatgactggtgttctagtgatgatgccaccatcagtgaaatggcaattgccatgagtcaaaaaattgagaaatattgggaacattctaacttggctcttgctgtggcatgctttcttgatcctcgatacaagaaaaaagttatagagtattacatgaagaaattccacggtgatgggtaccatgtggaacttgaaaaaattgttaatgtggtaagagggctctattgtttttattctagctctacacctgcaccagcaaagagtacatcaccggaaccagctaatagtgcatcagatattttaatggcaagtgtatctgatgaactggacagttttctgtatggtacaaatgaacctactctagttcggtccaatgagttggaaaagtacatggcagatccacttttgcgtcttggtggtccatttgatggcccatttgatattttagcgtggtggaagagcaagagggaagtgtatcctattctttcacaaattgttcgagatgtgatggccatacaagtatcaacggttgcatctgaatctgtttttaatgctgctggccgttttgttgatccttatcgtaatcgtcttgagccggagatggtagaggcattgatatgcaccaaagattggatagctgcagaaagaaaagattctaagattgttggttcaattgtgagtgaccttgaaattgagactttatctaccgtcatggctaacaaaataagagctgtggatgacaaggacatagaatggaaggaccaggagcatgatggatgttcatagcacctctaggcacgtaggtcaaagattcatcatgagatacggtcatagggtacatccaccgccagacagtcacatgatcaggttaatatattctttcatccatgagttgtgcttccatctatgagctaccatttgcaa

SEQ ID NO: 10502 - DNA, 1777 bp, Zea Mays
cccactaatcagatccccgcaggctggttcactgagccggcttccgagcggcccatgggcttgcccaggaccggctcttccagtcgcctcaacgcgcaggcgccggagttcgtgccgcggggcccgccaccaccgacgccgccccggccgtttgagtactatgcgcctatggtgaacgcagcggatttgctgccaaggagcaacaggcgcgggagccggaagcggagatgctcccgcccgccgcggtgaagacggagctggtgtatctgggcaatttggtcggttggcacggggtatgcatcaataggcaccgtcatcgcagtaggacgcgtgcgtgatcaagcctggatgggacggttttgacacagcacgtcctgtgtgcgaggatctcgaactgggtcagttcgtggtgatgttcttctaggattctttcgtcatttcttttactgcatcgttgaaactgatccagggtagtgcggcggtgttgggggttgcggcgggcctcgccctcatcgtcggcttcgtccgctgcgatacctgtgaagttaacaatctacgctattatcgatagcaatccagcgctgaagtcaagaagttacctgggcaaaaacagtatacccgattctagggcaagggaggctggaagcaccttttttgcatgggagctgcatggagagaaattattggcagaaaacaaacttagaccagattcttgaatgtgccaagggaataagcttcgcttgctgcaattcatgtgctgcttggcgccacaaaaggagtagaggtgtgatttgcttgctttgcagggagcggggtcatagtctgaagaactgtcctgacaaaagcgagggaaatttgaagaaattttgctagaactgtggtgaatctggacactgtctttccaagtgccccaagctcattgagaatgggttacaaattttgcaagctgctttatctgcaatcagcaaggacatttgagcaagaactgccctgaaaacaaacatgacatcccatccaaagctccatcttggcgccaacagtggttcacataggtttgctcttgagaattaagttgttaatgaagctactttccgttgccctgatgagctaggatggaaaccacagaggacacctatcatatcatcagatggaagcatcttacacgcaagacagcaagctttctggtatggagctgaatggtactctggattatcaattgttaagtctacaggctctgaaaacaatggacttaagcaacaaccacttgcatgattcaatcccttaccagttgccatcaaaccttacctatctgaatctggcaaaaaataacttctctggtaatcttccatactctatatccaacttggtttcacttgagtacctcaatctcagccacaactcgttatttcagaaaattggtgaattttctttcagaattgtatattgtgtaaggcctactgtatatttcagaaaattggaagcctcaattcactttcagaactagacgtatctttcaacaacctcacgggaatcttcctttctcaatgggcgctctgtcgaagctttctaccctgtaagtattcatggttctgatagctctcttcttgactggtatgcagttatatgcaaaacaatcaactatcaggcacatttgatgtccttagcaacattagccttgcgacactgtaagtagcttcccatgtatcgataagattgctaattttccttttatgttgtgctatatagttgttgatatatttgttatgttgtggaatat

SEQ ID NO: 10503 - DNA, 2145 bp, Zea Mays
cccactaatcagatccccgcaggctggttcactgagccggcttccgagcggcccatgggcttgcccaggaccggctcttccagtcgcctcaacgcgcaggcgccggagttcgtgccgcggggcccgccaccaccgacgccgccccggccgtttgagtactatgcgcctatggtgaacgcagcggatttgctgccaaggagcaacaggcgcgggagccggaagcggagatgctcccgcccgccgcggtgaagacggagctggtgtatctgggcaatttggtcggttggcacggggtatgcatcaataggcaccgtcatcgcagtaggacgcgtgcgtgatcaagcctggatgggacggttttgacacagcacgtcctgtgtgcgaggatctcgaactgggtcagttcgtggtgatgttcttctaggattctttcgtcatttcttttactgcatcgttgaaactgatccagggtagtgcggcggtgttgggggttgcggcgggcctcgccctcatcgtcggcttcgtccgctgcgatacctgtgaagttaacaatctacgctattatcgatagcaatccagcgctgaagtcaagaagttacctgggcaaaaacagtatacccgattctaggtgagaagctcaaagaaggggaagacatctacatctatcaggggtgacaaatccttttgctatgaagatgaccacagggttcttgtttgcgagttcatcctctagaatgtattgggttgtcgccacgaaaaaacacacgaatacataaattcaaataatttctggcaagggaggctggaagcaccttttttgcatgggagctgcatggagagaaattattggcagaaaacaaacttagaccagattcttgaatgtgccaagggaataagcttcgcttgctgcaattcatgtgctgcttggcgccacaaaaggagtagaggtgtgatttgcttgctttgcagggagcggggtcatagtctgaagaactgtcctgacaaaagcgagggaaatttgaagaaattttgctagaactgtggtgaatctggacactgtctttccaagtgccccaagctcattgagaatgggttacaaattttgcaagctgctttatctgcaatcagcaaggacatttgagcaagaactgccctgaaaacaaacatgacatcccatccaaagctccatcttggcgccaacagtggttcacataggtttgctcttgagaattaagttgttaatgaagctactttccgttgccctgatgagctaggatggaaaccacagaggacacctatcatatcatcagatggaagcatcttacacgcaagacagcaagctttctggtatggagctgaatggtactctggattatcaattgttaagtctacaggctctgaaaacaatggacttaagcaacaaccacttgcatgattcaatcccttaccagttgccatcaaaccttacctatctgaatctggcaaaaaataacttctctggtaatcttccatactctatatccaacttggtttcacttgagtacctcaatctcagccacaactcgttatttcagaaaattggtgaattttctttcagaattgtatattgtgtaaggcctactgtatatttcagaaaattggaagcctcaattcactttcagaactagacgtatctttcaacaacctcacgggaatcttcctttctcaatgggcgctctgtcgaagctttctaccctagctacagtactatcagaagctgaatagattgctgctggaattagagcaaaggagtggaggagtttctgaagagagcagacctgcaaaataaccgtcgtcatgtcagtgacatggccgctcaacttcttcctcttactgcattgtatctgaactgcgtcgacctaccaactacatcactgcaccgactgctatactgcatcaaccaaccgaacggctatatgaaacgacacaatgtcagccgtcagatatgaatattaacttcataaaagtaattgtaacttgtgtaggctggttatagcttgtgatttcacatttcatttgttagcggccaagatttatttctgttagtttatgaccaccactcaggaaagttgattgattctccattccaatctttgttagacctgc

SEQ ID NO: 10504 - DNA, 2224 bp, Zea Mays
cccactaatcagatccccgcaggctggttcactgagccggcttccgagcggcccatgggcttgcccaggaccggctcttccagtcgcctcaacgcgcaggcgccggagttcgtgccgcggggcccgccaccaccgacgccgccccggccgtttgagtactatgcgcctatggtgaacgcagcggatttgctgccaaggagcaacaggcgcgggagccggaagcggagatgctcccgcccgccgcggtgaagacggagctggtgtatctgggcaatttggtcggttggcacggggtatgcatcaataggcaccgtcatcgcagtaggacgcgtgcgtgatcaagcctggatgggacggttttgacacagcacgtcctgtgtgcgaggatctcgaactgggtcagttcgtggtgatgttcttctaggattctttcgtcatttcttttactgcatcgttgaaactgatccagggtagtgcggcggtgttgggggttgcggcgggcctcgccctcatcgtcggcttcgtccgctgcgatacctgtgaagttaacaatctacgctattatcgatagcaatccagcgctgaagtcaagaagttacctgggcaaaaacagtatacccgattctaggtgagaagctcaaagaaggggaagacatctacatctatcaggggtgacaaatccttttgctatgaagatgaccacagggttcttgtttgcgagttcatcctctagaatgcaagggaggctggaagcaccttttttgcatgggagctgcatggagagaaattattggcagaaaacaaacttagaccagattcttgaatgtgccaagggaataagcttcgcttgctgcaattcatgtgctgcttggcgccacaaaaggagtagaggtgtgatttgcttgctttgcagggagcggggtcatagtctgaagaactgtcctgacaaaagcgagggaaatttgaagaaattttgctagaactgtggtgaatctggacactgtctttccaagtgccccaagctcattgagaatgggttacaaattttgcaagctgctttatctgcaatcagcaaggacatttgagcaagaactgccctgaaaacaaacatgacatcccatccaaagctccatcttggcgccaacagtggttcacataggtttgctcttgagaattaagttgttaatgaagctactttccgttgccctgatgagctaggatggaaaccacagaggacacctatcatatcatcagatggaagcatcttacacgcaagacagcaagctttctggtatggagctgaatggtactctggattatcaattgttaagtctacaggctctgaaaacaatggacttaagcaacaaccacttgcatgattcaatcccttaccagttgccatcaaaccttacctatctgaatctggcaaaaaataacttctctggtaatcttccatactctatatccaacttggtttcacttgagtacctcaatctcagccacaactcgttatttcagaaaattggtgaattttctttcagaattgtatattgtgtaaggcctactgtatatttcagaaaattggaagcctcaattcactttcagaactagacgtatctttcaacaacctcacgggaatcttcctttctcaatgggcgctctgtcgaagctttctaccctaggcaaccctttccagtagggtcgcgcccctctggtaagagggtcgctgttaagttgcctgattaatccattctttcactgtgtctgcatgttgcagtagatgccagcagatcatgaagcgcccaaatggtgctgagctacagtactatcagaagctgaatagattgctgctggaattagagcaaaggagtggaggagtttctgaagagagcagacctgcaaaataaccgtcgtcatgtcagtgacatggccgctcaacttcttcctcttactgcattgtatctgaactgcgtcgacctaccaactacatcactgcaccgactgctatactgcatcaaccaaccgaacggctatatgaaacgacacaatgtcagccgtcagatatgaatattaacttcataaaagtaattgtaacttgtgtaggctggttatagcttgtgatttcacatttcatttgttagcggccaagatttatttctgttagtttatgaccaccactcaggaaagttgattgattctccattccaatctttgttagacctgc

SEQ ID NO: 10505 - DNA, 2424 bp, Zea Mays
cccactaatcagatccccgcaggctggttcactgagccggcttccgagcggcccatgggcttgcccaggaccggctcttccagtcgcctcaacgcgcaggcgccggagttcgtgccgcggggcccgccaccaccgacgccgccccggccgtttgagtactatgcgcctatggtgaacgcagcggatttgctgccaaggagcaacaggcgcgggagccggaagcggagatgctcccgcccgccgcggtgaagacggagctggtgtatctgggcaatttggtcggttggcacggggtatgcatcaataggcaccgtcatcgcagtaggacgcgtgcgtgatcaagcctggatgggacggttttgacacagcacgtcctgtgtgcgaggatctcgaactgggtcagttcgtggtgatgttcttctaggattctttcgtcatttcttttactgcatcgttgaaactgatccagggtagtgcggcggtgttgggggttgcggcgggcctcgccctcatcgtcggcttcgtccgctgcgatacctgtgaagttaacaatctacgctattatcgatagcaatccagcgctgaagtcaagaagttacctgggcaaaaacagtatacccgattctaggtgagaagctcaaagaaggggaagacatctacatctatcaggggtgacaaatccttttgctatgaagatgaccacagggttcttgtttgcgagttcatcctctagaatgtattgggttgtcgccacgaaaaaacacacgaatacataaattcaaataatttctggtgctgtggagtattcataattgtgtgcttttgttgaatccttcatgtaccataattcttactgctttcaagcccttttagaatatgactttaggatgtagaaattggtgaaaggagacaagaaattattctctaaactactattttttataggcaagggaggctggaagcaccttttttgcatgggagctgcatggagagaaattattggcagaaaacaaacttagaccagattcttgaatgtgccaagggaataagcttcgcttgctgcaattcatgtgctgcttggcgccacaaaaggagtagaggtgtgatttgcttgctttgcagggagcggggtcatagtctgaagaactgtcctgacaaaagcgagggaaatttgaagaaattttgctagaactgtggtgaatctggacactgtctttccaagtgccccaagctcattgagaatgggttacaaattttgcaagctgctttatctgcaatcagcaaggacatttgagcaagaactgccctgaaaacaaacatgacatcccatccaaagctccatcttggcgccaacagtggttcacataggtttgctcttgagaattaagttgttaatgaagctactttccgttgccctgatgagctaggatggaaaccacagaggacacctatcatatcatcagatggaagcatcttacacgcaagacagcaagctttctggtatggagctgaatggtactctggattatcaattgttaagtctacaggctctgaaaacaatggacttaagcaacaaccacttgcatgattcaatcccttaccagttgccatcaaaccttacctatctgaatctggcaaaaaataacttctctgttaaaacaatctaactgcaaggaaccattgggtgcagcaatctcagccacaactcgttatttcagaaaattggtgaattttctttcagaattgtatattgtgtaaggcctactgtatatttcagaaaattggaagcctcaattcactttcagaactagacgtatctttcaacaacctcacgggaatcttcctttctcaatgggcgctctgtcgaagctttctaccctaggcaaccctttccagtagggtcgcgcccctctggtaagagggtcgctgttaagttgcctgattaatccattctttcactgtgtctgcatgttgcagtagatgccagcagatcatgaagcgcccaaatggtgctgagctacagtactatcagaagctgaatagattgctgctggaattagagcaaaggagtggaggagtttctgaagagagcagacctgcaaaataaccgtcgtcatgtcagtgacatggccgctcaacttcttcctcttactgcattgtatctgaactgcgtcgacctaccaactacatcactgcaccgactgctatactgcatcaaccaaccgaacggctatatgaaacgacacaatgtcagccgtcagatatgaatattaacttcataaaagtaattgtaacttgtgtaggctggttatagcttgtgatttcacatttcatttgttagcggccaagatttatttctgttagtttatgaccaccactcaggaaagttgattgattctccattccaatctttgttagacctgc

SEQ ID NO: 10506 - DNA, 3219 bp, Zea Mays
attattcgaggccgtagttccgagagaagcgagcggaccctaaaagagaggaagaaacctgctggcttccttctcgtccccaacaggcgtccccaagactccaacttcctcgatctagccatgtcgtccgcgccgcctgcccaccagtccaagccttccccccaccgccggcagcaccacaacctcggaccgaggtcgccgccgccgccgccgccgcagtcccagcgctacgtacccaaatccgccccccgctgcggcgccaaaaccctcccccccgtcccagccatcgctcactaccgcgctccgatcatcggccgcctcgccctcctcgtccggctctggcgggagctccagcggtagcgtaggtgtccggtcggttgatgcattcgtcgcgtatctgccgcatgacgaggcggtcgcggcgggtctcggcggcctcgatgcacacgagtcgcaggtcgtcgtcgaccacctcaacgacgcacttgccgcgctccttcgggccaagcctcgcgagttctggctccgggtggcacagaacacttctttgcatgaattccttgatagttatctacaattcaggcacaggtggtatgatttgccacaccgaggcccaaagggaactgtagcaggtttggttgttggggagcttgagctttgccgtcgtgtatttatggtcctctatcgcatatcctcgaataaggatcctggagcaggtcgcggcgagtcccttagcatgaaggagcatgcagcccttctgctggagaaaaaattgcttgatctaccaaaattgttggacatatgtgctatatatgagcatgacaacggcaagttaacaagttcactggttacgaatgttattaatgtgcagccgagtgtactggatgacattaatattgtcattccccagttcctcaacattttccacacgatgcatgataggtgcatgacatctttacaggtgctcacctcaaccggatcaattgataatggatatgttcagcttcagaaagatttcatggaggtgttagattttataaatgatgcgattgttactctggattcttttgttggtgcttatcaacctgccgctttattgttctgtactaattttgaaatgagctatggagttgaggaattgctgaatgctcttgcaaggctgtatagttcattgctaccatcattgctccatgggtttaaagttatgcccaagtctcagagcaatgcagaggcatcacttgacagcacacttagtgacattcctcttgctataaggatgttgtcaaagagaacagcgagatttggttggagattgttgcactactgttatttgaatgatcaagttagggagcatgatgctcaaacttctactaagatgtttccagctaaagtcgaagatcctatgatcaggggagacatcttggttcaaacacttaaagatataaatagagaatccacttactcttctcaagtgaatcatggaaatacttttctccaagaacttgaaagtgaatttcaattaatgagccagattggtgatattcggaacaaaggatggatatacatggatgatgagcagttccagttcttatcacgattgtgtggatctactcacacttcttggaatggcatatctgatttgccagtctcttctcatggtggtgaattacagcagaaggatgaggaaacagcgatggttgagtccaaaattagtcagataagggatcttttccctgattatgggaagggtttcctttctgcttgtctggaagcctacaacctgaaccctgaggaagttatccaaaggatattagaaggaacacttcatcaagatctgctagctttggatacttcattagaagagatgccacacgaaaaacctgcaccaactgctgtgaaagataaagggaagggtatattggtggaaactgtgcctcaaattacaaagaaaccccataaagttgctgagacacattactttgttcaagatggcctatcttcagcaacttcatcagcatcacaagatttacaaggaaggccaatgatgatttgccggacactgcaatcctggactcgaaaaatgctaaaaatgcagctagatctgttatccttgactcgcaatatgagtatgaagatgagtacgatgattcatttgatgatcttggcttcagtgtggtagagtcaagttatgaggaaactgatggtgtcaatgacgctgaggcttcatcacatggcccaagatggagttcacagaagaaaccacagttttatgtcaaggatgggaagaattatagctacaaggttgctggttcggttgctgtatccagtgctcgagaagcagctgtcatgaggcaaactcaaaaagagacaatctatggtctgggtcgtggtggaaatgttccttttggtgtcccgaacaggcaacatatagatgtggaggcagaggaggttggtgatgctgacaactcaggcagaggttcaaattcccgtggccggggaagaaaaggcggaagggaaggcaaccgtccggaggagaatgagagctccaatggacgaggctctggctttggtggtaaaagaggaggctggagtcagggcaatccggctgaggaaaactggaaccctaatggtcaacaaggttttggccgtggtggcagaagagggggctggaatcagggtggcccagcgaaggaagacggtaactctagtggcaggcaagaaagttttggccgtggagcaagacggggcagcatgaaccatgaccaatcagccgaggataatgaaggccataataatcccgcacaagactttactcgaggaccagctcctcgtggtggccatggaaggggaggtggccggaaccatcacaggagagatcgggcaatgaagaagcatatgcaaggattgacagggctttagctgctggtagccttatgcttttgatgtgccgtactgtaaatggcatttttggaggcactcctacttgaccatccaaatttttgtgcttgttctgtttttaaatcaaataacgccatgaagtaacccacatatgttctcgtaacatttgtgattgccctaaaaagggtaatagtgtatgtagttctaaacatgcttgtaactcgttaaatacataattaattctctagcgactgaaaagaaaaatcatgaaaccaaaccaattttgttagctttttttgtcatgtgctatccagtaaaaca

SEQ ID NO: 10507 - DNA, 2174 bp, Zea Mays
gcaccatttccaccgtatcactgcacggccgcgcgaaaatgtgcagcgccacaagtgcattccggccccgtgagtaatcgtaacagaggatcgctagctagtgtgctaccctgtacggcgcaggcgcagccatgagcaacagcggcaggtggcggaggaggacgaggtccgtagccccttcgccggccacctcttctccgtcgtctcctggcctccgagaagcgcagccgttccggcttccccagtggaagttctcccaggtcctcggcgaactgccgcccgcggccgaagcccgccgcgacggcgctccccgtccgcaggacgacgacgatgcggacgaaatctcggctatcgagttcgacggccgcggcgagtacttggccggcggcgacaacgccgggcgcgtcatcctcttccggaggaccgacggcgacggcgacgacgcgcggcctcgcgcggagcttgagcgcacggaccgtgccggagcgccgccgccgaggtacagctacgcgacggagttccagagccacgaacgggagttcgacgtgctggacagcttggacatcagcgagaggattaagaaggtgaggtggtgcgcgcggcccaacagctccctgctcatgctcgccgcgaacgaccgcacggtcaagctctggaaggtctccgaacacaaggcggaggcgccgaagaaagggaacggtcggccgagttggggcaccgcggcgctgtcggcagccacgaaactgccgaggggctgttcgtctgcagagcctgacgaacgtcctgaaaaggcagcaggcgatgtcggagacggctactctgcgaaatgccggagagtcttcggccgcgctcacgagttcaacatccactccgtctcgaccaactgtgacggggagacgctggtgtccgcggacgacgtgcggatcaacctgtggcatgcggaggtgacgcgccagtgcttcaacatcgtggacatgaagcccgcggacatggaggacctcaggtgatcaccacggccgagttccacccgtcgtcctgcagcatgctggcctacggcagctccagcggcctcgtcaggctggtcgatctgcggcgatcggcgctgtgcgaccacagcgtgagaatgttccaggaccgcgagaaccgccctcagcccagcacatttttcagtgagataatctcctgcatcaccgaccttaagttcacaggcgacggggaacaccttctgactcgcgactacatgaacctcaagctctgggacctgcgcgtggaaacctcacccgtcgcaacgtacaaagtccacgagttccttcgcccaaagctgtcggagctgtacaccgacgactacatcttcgacaggttcggctgctgcgccagcaacgacggggcctacttcgctaccggatcttacagcaaaaccttcagagttttctcccgtgccgctgcgcagacatgcggcgctacgttggaggccagcaccaacccttacaggatacaattacatgctcctacgaagatcccagcgctgcttagcaatttctctctcggagttcatagaaaaggtcaggatggtcatccgaggtcagacggcaaggaacaagtctcgtgcaacatggcgtccaaggtgaagcatctagcatggcacccggcagaaaacttcatcgtttgcgcagccaatagcagcttgtacatgtaccatacataagcacgctcatgttatgtgtgcagagtgcaaatcacagaacagcgttcgtagctaattagattgaagccagaaaagaagatacttttcccatgttagggcttgttcggttattcccaatacacatggattatatgggattggaaaaaattgagaagaagtttgacttgtttgggattcaaaccaatccaatcccgctcaatccacatggattgagagctaaccgaacaagcccttacggttgcatgttgtgaacagggatattgaactgactgtacattgtcaaggatcttggatcttcagcagatcatagaaaggaaaagatactctcgtaacgaacgaaaggatcgcctccctgactgtcctttctgctcctcgatacatccttgcaatattcctgaatttcgaagggttgacctgcaactcagacttgctttgtgcattgattaaacatcatggaagcactgaaagg

SEQ ID NO: 10508 - DNA, 2185 bp, Zea Mays
gcaccatttccaccgtatcactgcacggccgcgcgaaaatgtgcagcgccacaagtgcattccggccccgtgagtaatcgtaacagaggatcgctagctagtgtgctaccctgtacggcgcaggcgcagccatgagcaacagcggcaggtggcggaggaggacgaggtccgtagccccttcgccggccacctcttctccgtcgtctcctggcctccgagaagcgcagccgttccggcttccccagtggaagttctcccaggtcctcggcgaactgccgcccgcggccgaagcccgccgcgacggcgctccccgtccgcaggacgacgacgatgcggacgaaatctcggctatcgagttcgacggccgcggcgagtacttggccggcggcgacaacgccgggcgcgtcatcctcttccggaggaccgacggcgacggcgacgacgcgcggcctcgcgcggagcttgagcgcacggaccgtgccggagcgccgccgccgaggtacagctacgcgacggagttccagagccacgaacgggagttcgacgtgctggacagcttggacatcagcgagaggattaagaaggtgaggtggtgcgcgcggcccaacagctccctgctcatgctcgccgcgaacgaccgcacggtcaagctctggaagctccagggcaggtctccgaacacaaggcggaggcgccgaagaaagggaacggtcggccgagttggggcaccgcggcgctgtcggcagccacgaaactgccgaggggctgttcgtctgcagagcctgacgaacgtcctgaaaaggcagcaggcgatgtcggagacggctactctgcgaaatgccggagagtcttcggccgcgctcacgagttcaacatccactccgtctcgaccaactgtgacggggagacgctggtgtccgcggacgacgtgcggatcaacctgtggcatgcggaggtgacgcgccagtgcttcaacatcgtggacatgaagcccgcggacatggaggacctcaggtgatcaccacggccgagttccacccgtcgtcctgcagcatgctggcctacggcagctccagcggcctcgtcaggctggtcgatctgcggcgatcggcgctgtgcgaccacagcgtgagaatgttccaggaccgcgagaaccgccctcagcccagcacatttttcagtgagataatctcctgcatcaccgaccttaagttcacaggcgacggggaacaccttctgactcgcgactacatgaacctcaagctctgggacctgcgcgtggaaacctcacccgtcgcaacgtacaaagtccacgagttccttcgcccaaagctgtcggagctgtacaccgacgactacatcttcgacaggttcggctgctgcgccagcaacgacggggcctacttcgctaccggatcttacagcaaaaccttcagagttttctcccgtgccgctgcgcagacatgcggcgctacgttggaggccagcaccaacccttacaggatacaattacatgctcctacgaagatcccagcgctgcttagcaatttctctctcggagttcatagaaaaggtcaggatggtcatccgaggtcagacggcaaggaacaagtctcgtgcaacatggcgtccaaggtgaagcatctagcatggcacccggcagaaaacttcatcgtttgcgcagccaatagcagcttgtacatgtaccatacataagcacgctcatgttatgtgtgcagagtgcaaatcacagaacagcgttcgtagctaattagattgaagccagaaaagaagatacttttcccatgttagggcttgttcggttattcccaatacacatggattatatgggattggaaaaaattgagaagaagtttgacttgtttgggattcaaaccaatccaatcccgctcaatccacatggattgagagctaaccgaacaagcccttacggttgcatgttgtgaacagggatattgaactgactgtacattgtcaaggatcttggatcttcagcagatcatagaaaggaaaagatactctcgtaacgaacgaaaggatcgcctccctgactgtcctttctgctcctcgatacatccttgcaatattcctgaatttcgaagggttgacctgcaactcagacttgctttgtgcattgattaaacatcatggaagcactgaaagg

SEQ ID NO: 10509 - DNA, 1162 bp, Zea Mays
atccggcccattaaacagttatactctcgtctcgccgtcgctatcgaggcgagctccgtggaagtttgctggctgctgaggctcgttcgaggcggtggaggacaggcaggcaggcagctctccgttcggcttggcttggcttggacggctgccgcgtcgcgcacctgcgggcgggcagtggccagtggctgggcggtccggggccggggcagccaggggcgtcgtcgcgctcgtagccactgaggtcggcggcggtggcaccgtggcagtgcggtgccgagaaaccgtcccaccaaggaggctggggcaccgaacagcgaacaacggaagaagagcagctgaacaggcaggggagaggttccagctatgctcaccgcgcagccgccacctgaggtagcgggtgaggatgacagcagtttccaccatgtcttcgtggagtttatgaccaaagccgctcagttcgaggagctcgctgaatctggggagcgattgcttgggagattccgtgaggagcttgtaagctcatccgaagctggacttaaagatcatataaagaaagctaagactttgctcgaagaacttgaatgtctagtcgagaatgtctatggcatcacattaacatccagtttaagtgctctggaagtttcagacagtcattgcctcgacaacatgccaagcaccgattgctatgccatggaggaggataaacgagcagatcatttggacatggacgtatcgctcgttacggtgatggccatggttcgcaacatgctgaagcttgactacacgatgcaggagaagattgtcactgcattgtccttgaaaacaccagcatcggagctcgagggatactgcctcatgtgggatctacgcccgtacatcgatgacgacgtgatgcgtcttgcgtggaacatgtgtccttgaagcattggggctttgagttgtttctgctgggatggatgtctggtctgttcattattttcttatgtatgacaacgtggttgtgtgtgttcatggtcgtcttctggagacgagaaacacatgggtgttgtttggttcacataaattggtaactaataatattagattatgtttgtttaagttcaaccgtaatggataccacactacaaatggatacttccttatttaaatttgttaccgc

SEQ ID NO: 10510 - DNA, 1289 bp, Zea Mays
attaaacagttatactctcgtctcgccgtcgctatcgaggcgagctccgtggaagtttgctggctgctgaggctcgttcgaggcggtggaggacaggcaggcaggcagctctccgttcggcttggcttggcttggacggctgccgcgtcgcgcacctgcgggcgggcagtggccagtggctgggcggtccggggccggggcagccaggggcgtcgtcgcgctcgtagccactgaggtcggcggcggtggcaccgtggcagtgcggtgccgagaaaccgtcccaccaaggaggctggggcaccgaacagcgaacaacggaagaagagcagctgaacaggcaggggagaggttccagctatgctcaccgcgcagccgccacctgaggtagcgggtgaggatgacagcagtttccaccatgtcttcgtggagtttatgaccaaagccgctcagttcgaggagctcgctgaatctggggagcgattgcttgggagattccgtgaggagcttgagtattttcgtaggccccagattcctaaggaatcagatgtcatgaatcagatacttaaatccaactgcactgtcagaatgaggtcctatgttgaagctggctgcaggcttcactaccaaaacatctcaaacataaatcagttaagctcatccgaagctggacttaaagatcatataaagaaagactttgctcgaagaacttgaatgtctagtcgagaatgtctatggcatcacattaacatccagtttaagtgctctggaagtttcagacagtcattgcctcgacaacatgccaagcaccgattgctatgccatggaggaggataaacgagcagatcatttggacatggacgtatcgctcgttacggtgatggccatggttcgcaacatgctgaagcttgactacacgatgcaggagaagattgtcactgcattgtccttgaaaacaccagcatcggagctcgagggatactgcctcatgtgggatctacgcccgtacatcgatgacgacgtgatgcgtcttgcgtggaacatgtgtccttgaagcattggggctttgagttgtttctgctgggatggatgtctggtctgttcattattttcttatgtatgacaacgtggttgtgtgtgttcatggtcgtcttctggagacgagaaacacatgggtgttgtttggttcacataaattggtaactaataatattagattatgtttgtttaagttcaaccgtaatggataccacactacaaatggatacttccttatttaaatttgttaccgc

SEQ ID NO: 10511 - DNA, 3141 bp, Zea Mays
gcagcctcccaggccccccaactctcttcctcctctccctccccacaccaattcccattcccaattcgccctcctcaaatccggcgcccgcattcccgaccaccccgcagatctgggatccgccaccgccggatccctcgctgcccgcggcgccccgggacgcgcgtgatcctacccacaaccgtcaagttggcgccccagcgaaggtcgcagcgcctctccggcggcggcgcgggctccgccgccgcgcagccgcccggagcctccggcgcacaggcagcgatgggtgactcaggcgacgccgtcatggcgcgctggctgcagtccgcggggctgcagcacctcgcgacctcctccgccgctggtgctggcggtgccgactaccgcggtgggatgcctgggcttgggggcgctggcgcggggagcatgctgtcgagcctgctcatgcagggctatgggccagaatcggttgaagaaaagcatagactttatactcttctaagaggtttaaattttaacggagagtctgcacccacatcaatgtctgagccttacacaccaacggctcagagctttggtggtgggaaccctgtggaggggttttattcacctgaacttagaggggaacttggtgctggacttctagaccttcacgctattgatgatactgagcttctgtctgaggatgtagcatcggaaccatttgagccatcaccttttatgccaaaggatattgatgatgatgatgaggacgtgatatcagggagtcaacaagcaccattagataattatggtttagtgaccagtgaaaaagagagcactactagagaaaataatgttgcaaagattaaagtagtggtaaggaaaagacctttgaacagaaaggagctatctcgaaaggaagaagacatcataaccgtgcatgattcatcatgtttgacagtatacgagcctaagctgaaggtggatttgacagcttatgtggagaagcatgaattttgtttcgatgctgtcctggacgaacatgtttccaatgatgaggtttaccgtgaaacagttgagcccataattccaattatatttcagagaacaaaagcaacatgttttgcttatggtcaaacaggcagtggcaagacatacacaatgcaacctttgcctctgagagctgcacaagacatggttcgtctattgcaccaacctgtctatcggaatcagaattttaagttgtggcttagctatttcgaaatatatggtgggaaactctttgatcttctatctgacagaaggcaactattgatgagggaagatggcaagaaacaagtttgcattgttggtctacaggaatttgaggtttctgatgttcagattgtcaaggaatatattgaaagagggaatgcagccaggagcacagggtcaacaggggccaatgaggaatcatcaaggtcacacgctattctgcaactggctgtgaagaagcatatcatagtaaaagataccaggagacagagagatcgtgatgctaatgaagctaaaaatacaaaggctgtggggaaaatatcatttattgatcttgctggaagtgagcgtggtgctgatactactgataatgatagacagacaaggattgagggagcagagataaataaaagtctgttagctcttaaggaatgcattcgagctcttgataatgatcagatacacattcctttcagaggaagcaaacttacagaggttcttcgtgattcatttgttggtaactctaggacggtgatgatttcttgcatttctccaaacgcaggctcatgtgaacacacactaaataccttgagatacgctgatagggtcaaaagtctttccaagggtggaaacacaagaaaagagcagcccacaggaccaactaccacttctagccgggagtcttcgtcagctccatcatattcattgcctgctgaagctgaagaaattcctaaccagattcaagagaagagaccagttgatacttatcggaaaggcactgaaaattttacctccaacccttccgcggagcctgatagaaattccttcagtatggttccaaattattctaataaagggagagaagacaatggtgcagcatctggtaatgatagggagaggtatgatttgaagtccacccaaactgcttacactagtaaggcacagttggttcagaattcaacaaacacacaggaggagaaagtcacaaaagtctcacctcctcggagaaaggcttataaagaagacaaatctgatcggcagggcaactacgtgaaaaaggataatggtcctgagacaggtcggactgggtataagatacaacaggcaaagcagctgcaacagcagcaaaggccaacatctgcttcagcttcgtcaaggcaatctgaaaaggaaagttcttgtgatgatgtagaaattgatgcaattcttgaggaaatgaaccttttggcagaagttgatcaaccaggtagcctgattgacaactacgtgacccaactgagctttctgctgtcacgcaaggctgcaggcttggtcagcctccaagcacgcttggcacggttccagcaccggctcaaagagcaagagatccttagccgcaagaaacctcccagatagtatgatgatcagcaatgactctgtccttgtgccttgtaatctgattgcttggagctcagttgtggtccatcagctgttttttacgtgtgcgctccagtaaattctatagccccaagcaggccaagacatgtgggagtggcttagggcggtcttgatgtcgagggcgtggtcctggttgatatcacctgacactttttgtcagggccgataaccagtttggtaatagtcctttttctatacagtggggctgcttgggtgtggttgtttttggcttgcccacttttacctttgttttctttttcacatattgtacgagggaaagctggaactgggattttgcagatatcagtgggtcgattttcgctggaggggtctgcggaaacagatacattgttgtcgtatattcattactgatattatttgcattgcggaaggaaaaggatgtgtgaatggtgaaacacttgaaattgccttttccccatttccgagatactactgttgtatccccgt

SEQ ID NO: 10512 - DNA, 1000 bp, Zea Mays
cgctaggcggccggtttcgtcgcttctccttctccctcccattcgcgcgagtttgccccgaaaggagatgaagcagacgcgccccattcgcttcccatcgtagtgaactcggttcgcctcgcctcgcccaccgccgaggcagcgaccagcgaggcgtgctcctcctccggcgctaagacggggccggccgctcgtggggcctcgcctcaggggccccgtgggaggcggcgggccccgaaacgccgtcgtggtgtatcaggcatcatagggctcgcggcggcgattgttggccgcgagttggtcgtgtggatgaggctccaggcgggccccagttttggcaaatggcaccagttcctgcaacaacgaggtcatctacgctggcatctactaccctccccgaagtctcaaggtcaggttttcactaagctggttggaagtccatagaccctgtagtacagaacagtcatcggaacatgatcacgcgttagaattattggagtggagcagctcactcgacaaaaatgtgtcaccaaccgatgatttattgcattgtcaactgcacttaatgttcttagttgttggggtcttcttctccactgaaggtccttaagtcataaacaccttcgataaaatgccacaagaggtccgcctcacttccgccgaaggttctcaagacgaagatctcggaaagaagcagaaatgcagaacgacgaagctagcttcagctcaaatcaagcaaagaaggaaaagactagatagaccttgctggtttaaattgcttatagacaaatgttcaagggcatgtatgtaattttacctgggctgcgtcccgtacctagaaatagatgaacagtatcaccgtactgtttaagctggattataattactctctcgcattcacgcctttgagcaagtcgaatgtatcaatgtaatattaatattgttaaatattcatttatgttttatagaatgcaaatataaatgaattaataagatgcag

SEQ ID NO: 10513 - DNA, 1216 bp, Zea Mays
gccctcacttccgtttatcagggggacgctaggcggccggtttcgtcgcttctccttctccctcccattcgcgcgagtttgccccgaaaggagatgaagcagacgcgccccattcgcttcccatcgtagtgaactcggttcgcctcgcctcgcccaccgccgaggcagcgaccagcgaggcgtgctcctcctccggcgctaagacggggccggccgctcgtggggcctcgcctcaggggccccgtgggaggcggcgggccccgaaacgccgtcgtggtgtatcaggcatcatagggctcgcggcggcgattgttggccgcgagttggtcgtgtggatgaggctccaggcgggccccagttttggcaaatggcaccagttcctgcaacaacgaggtcatctacgctggcatctactaccctccccgaagtctcaaggagaaagggcattctagcgaagagagggctacatagctcataagaattattattagccttgtggctatgtgccattcacttggggttatgcaccgtgatctgaagccagaaaacttcctccacttggataaagaagatgatttgtcaatagaagcaatcgattttggtctatccgtgttcttcaaaccaggtcaggttttcactaagctggttggaagtccatagaccctgtagtacagaacagtcatcggaacatgatcacgcgttagaattattggagtggagcagctcactcgacaaaaatgtgtcaccaaccgatgatttattgcattgtcaactgcacttaatgttcttagttgttggggtcttcttctccactgaaggtccttaagtcataaacaccttcgataaaatgccacaagaggtccgcctcacttccgccgaaggttctcaagacgaagatctcggaaagaagcagaaatgcagaacgacgaagctagcttcagctcaaatcaagcaaagaaggaaaagactagatagaccttgctggtttaaattgcttatagacaaatgttcaagggcatgtatgtaattttacctgggctgcgtcccgtacctagaaatagatgaacagtatcaccgtactgtttaagctggattataattactctctcgcattcacgcctttgagcaagtcgaatgtatcaatgtaatattaatattgttaaatattcatttatgttttatagaatgcaaatataaatgaattaataagatgcag

SEQ ID NO: 10514 - DNA, 1419 bp, Zea Mays
cttacctatatcgcagattggttgttaatccggcctattatggattggaggatactgaaacaaacacattgaattcttatctatcaaggttagtcgaaactacatttgaagatcttgaggacagtggatgcataaaagtggatgaccactctgtaaagtacttgattttggggaaaatagcttcacagtattacctgagctacctcactgtttcaatgtttgggtcaaatattggccccaacacaacgttggaagtctttctacacatactgtcagctgcatcagaatttgatgagcttcctgtacggcacaatgagcggaaatgtcccgtatccagttgatcaacaccaccttgatgatccacatgttaaagccaacttactctttcaggcacatttctccagagcagaattgccaataagcgactatgtcactgacttgaaatcagttcttgatcagagcatacgcatcatacaggcaatgattgatgtatgcgcgaatagtggatggcttacgagtgcattgacttgcatgcatctcttgcagatgatcatacagggtctctggtttgagagagattatgaatccctctggatgttgccatccatgaatgatgatatattagaccatctcaagagtagaggagtctcaacagtcccctccttactagatctttcccgtgaagaattgcgtagggtacttcaaccattttctgcgtcagagttgtatcaggatctgcaacatttccctcatgttgatgtgaaagttaagcttcataatgaacaggagcgatccaaacctccaactttaaacatcaggttgcaattgaaaaattcgcgacggtcagcatcaagagcatttgcccctagatttcccaaggcaaaacaagaagcttggtggcttgtcctggggaatgctacaagttcagagctgtatggtctgaaaagaattagttttgcagatcgggtgattaatactcgcatggaattgccacagacgttcaatgtgcaggagacgaagctgatcttggtgtcggattgctacctaggttttgacttggagtattctcttgagcatctcaccaagggttgagtgctttattcagagctgtttgggctgtttcattttgtatgggttcagcaaccagctcatcctagattgatcctgtaatcacgagacatgagttcattccatgaatttttgtttgtatgactacatccctcgtgttcatggttatattatatttaatagctatatatacgagtggataggtttataactttcatgaaatatcttttccgtaagcatagtagatgtttgagctctaaggttatgaccaacaaattgtgtatatggtcgtgcaaaatactattttataatataaactatattatttacatggtgaagtttgaaatagaa

SEQ ID NO: 10515 - DNA, 2053 bp, Zea Mays
gatcactcaattcctcgttgcggttcgcgggtcctggaagcaggaatcatcaagacgctccgcgcgccattacagtctgacagcgaccccacaggctcgtcctccgtaagtccgtcctcctgtcgctgtcccgctcatgaaccgggcaacaactacggagcgagcggacgaggagatgctgtttcgattttccacttcctcttcctctacctctacctcggggtaacttgtagaactcaatttcacccttgcgttccgtccctttcctatgttcctccagcggtccagcctagtagtttcttgctctgcaattcgccagttttgggctcctgatcgatcgaatcgtcgtcctggtggctcccatacagccggaccgcatggctgggcagcgctgggtcggtaaagtggcggctgctgctgttgtggcgctcttgctcctgtcgaccgctcttcccggaggagcacggagagaacccgatgtcaacaacaatggacggagttttgtttttaactatactctgaccaaagctgttgtggaatatgctgcagctgtatatatgacagatctgacggctctatacacatggacatgctcaagatgcaatgacttgactcgaggctttgagatgacttgtataattgttgatgtccagaattgcttgcaggcattcgtcggtgttgatcacaatctcaatgctatcattgtttccatcagggggactcaagagaacagcatacagaattggattaaggacctgatatggaagcaggttaaacttaattatccaaacatgcccaatgctaagttttacgtccagccatcacgaatgctgttcgcaaggcaaggaagctacatggacacagtgacgtaattgtaacagggcattcgatgggtggagcactagcttctttttgtgcccttgatcttgcaatgagctttggaagtaacaatgttcatctgatgacttttgggcaaccacgcgttggcaatgctgcatttgcctcctactttgcccagtatgtgccatacacagtccgaatgacacatgaacgtgatattgtacctcatctgccgccttatttcttcttcctcccaaaactgacatacaagcacttccccagagaggtatgctcctgaacaaacataggaaacattgtccaaattttctctttgatgtgcttatcttctctgtggattgaaataaaaagttgaacccgatggctatttgcttggcggcatgtggatttgagtgcaccgattgcttccgaaatgatacgagcatcctcatagtatgtaaacgcaatgaaaacgtaactaatctttcagttcttgaacaaattgttgcaaactgtcattctctgtttctgagttgattaatttgtcacgctgttgagccccacttgaagaacctgcagcatgtgctatgttgtcttgaatcttacatgagctaaattctgaagtgttttcttactgacgaaaccatacacacctttgcaacgccatcctaaactcttcacatgtgttattaggtgtgggaacatgaagtcgatggcaacacaacctatcaagtctgtgatggcagcggtgaagacccaaactgttgcaggagtgtgtttgcgctgttctggagcgcttctgaccatttgacctacatgggagttgagatagcggccgacgactggagcacctgcaggatcgtccttgggcgaggcgtcgagcagctcaaagggagtcttcccaacaacattgttacgtccggacgctccgtcgacgttgtcatcgcagacgatgatacacttcagattgattgacgcagttcagggtagtcgttggtagtcatgcatatagctagaagataagctgttggctgttggtgcatgcttcagagcaaatcaaagggctttcttcctttaatcctttttttttgcttcgtgtggttctttcagccatatgtactatgcagcttgtgaatgtaaagctgtacggaaggtgacatgtttctagcttcgtatatagttggagctcaatacagccaacctggtactcactccg

SEQ ID NO: 10516 - DNA, 471 bp, Zea Mays
tacatgtcattccattaagaaaggagtaagaaaaaaatacaagtgctagataatgtctctgctgggctaactgaatggaagggtcttctaaaaggctactgggaacgattcagcaaatattgtgcagatgcgagtaatctggatggcagaaaggtagagagaatgctcgaagaaaaatttggtcctatcctcttccctaatgttgacacagacaatagaatttgccctaggtaatgcacgacaaacatacttttaagttgttctgaaggaaccttgagattcaaagttagtaggtatggtgaaggctattttataggctgtgatcgacatccaaaatgcaagtacattgctcgctcattatcacaacaagaagatgaaaccgaacccaccgaagaatgtcaaaaaacttttacacccagattacttggtgtcatgcctgattctgatgaaaaggattggtgttgccaatga

SEQ ID NO: 10517 - DNA, 1410 bp, Zea Mays
cgccgttttccccatctcgcgcagcgctactgccggctgtcccgagtcccgaccaccgtcctccgctcccggacgtgaatccttcctcctaccgcgatggagaccttcccgtcggtgaagaacatcctcctactggactccgaggggaagcgcgtcgccgtgaagtactacagcgatggctggcctactctctccgcgaagctggccttcgagaagtcggtcttcgccaaaacccagaaagcgaatgctggaacggatgcagagattgtaatgtttgatggtcaaattgtggtatacaagttcatccaagacctgcacttttttgttactggaggagaagaggagaatgagcttattttagcatcagttcttcagggattctctgatgctgtcgaacgacttctcaagaacatggttgacaaaaggacagcactcgagaatttggacctgatcctattgtgtcttgatgaaattgttgatggagggtaaagccttttcttactacgtacatgatattaagggcttcttttcttgttctctttattgtgtacatttattatcctttgatctgaaatcacctgactcatctgggccatggcaatagagctctattagggcctctatttgtaatggttgtattcaccggattcaaaggtttagtctggtgttctgcttctgtacctcaagcccaagcatgcctaaccttttaatggggttacacaatttgatgtgtgaaacaatggcttagtttgctaaagacatcagcaaaataaacagcccattcctttttttttgaaatggaacaaaactgattatccacatgaagaattgtatctatttgattttgagtttgagatcttgaacgactgcaggtaccacaactatgcactcgcctcaatgtgtctttgataacccattgatgtctaaactctgaaatgtggaagtgataggatcaagcatagagatgaatagaatcgcacattgtaagcagcatgtaattgtttggtgcattaaacataattttctgaatgattacacaggattgtacttgaaacagaaggaagagagatagctgaaaaggtgtctggtcacggatcggagggtgcttcatcggctgagcagactttagtcaatgccctaacgcaagcaagagagcatctggcgaagtctcttctcatgtgatgttgtgctttatattttgggggtgacgacggagtatctattattgtgtctggatgacactattctttttgttagcaacggagaaagaaaaatgtctgaagcatttgaatgtgtagagtggcacattgcttccaaaattctcatggtcatctataagccttcaaagttctgtagcatgattgttcttatattgactggttcagttatttgtcgttacttgttttgttt

SEQ ID NO: 10518 - DNA, 1423 bp, Zea Mays
gtgtgagactattgttttcgagattgctagcgaaaagcatctcaatccctgaatcgcacacccagccagaacgaacgccagaaggcccagaaccgctacctcctccaatacactttcgtggctccgccgcagcacgaaaccctagcttctgcatctccgccccctccacctcccctccgcgaagcaggcgagatgtcgtcgggcggcggtggggggcagcagttccgctacacgcagacgccgtccaaggtgctgcacctgcggaaccttccgtgggagtgcgcggaagaggagctcgttgagctctgcaagcccttcggccgcatcatcaacacaaagagcggcgtcggcgccaaccgcaaccaggccttcgtcgagttcactgacgttaatcaggcaatctcgatggtttcttactttgcatcatcttcagaaccagcacaaatacgaggcaagactgtttacattcagtattcaaacaggcaagaaataattaacaacaagagtcctggagagactgctggaaatgtcttgcttgttactatagagggtgttcaagctagtgacgtcaccattgatgtgatccatatggcccatgttaactggagaaaatgtcgttatcaacacctgcaatgggagagataccatgtttgttttgccgcctctgtcttctaactagtacattcaaagttcttatgaactcttatgtctcatcttgaggatgcaactttctaagtatcccccatcaacgcgcttatctccggtgtagggcacctcctgtttattcaagttattcatgaaaggttttctcggcctttgggtatgttcataaaatagccacctttgaaaaggctgcaggttttcaggcattgatccagtacactgatgcagatactgcttcagctgctagagaagccttagatggaaggagcatcccaagttacttgcttccagagcacgtgacatcctgctgcctgcggatttctttttctgcacataaggatttaaacatcaagtttcagtcaaaccgcagcagggattataataatccatatcttccaattaattattctgccatggatggtacattgcagcctgctgttggatctgacggaaggaaagtggaggctcaaggcaatgttcttcttgcatcaattgagaatatgcaatatgctgtttctgtagacgtgcttcatactgtgttctcatcatttggtacagtccagaaaattgctatttttgagaagaatgggggaacacaagctttgattcagtaccctgtaatcgtttaccatctgccaactctgaagtgcttggatctccctaaaaagaaaagattttccttatcagatgatgttttgccaaaacccaatgtgaaagtgattttcctgtgttataacaaaaacaagaggctttcacatat

SEQ ID NO: 10519 - DNA, 1804 bp, Zea Mays
gcccagaaccgctacctcctccaatacactttcgtggctccgccgcagcacgaaaccctagcttctgcatctccgccccctccacctcccctccgcgaagcaggcgagatgtcgtcgggcggcggtggggggcagcagttccgctacacgcagacgccgtccaaggtgctgcacctgcggaaccttccgtgggagtgcgcggaagaggagctcgttgagctctgcaagcccttcggccgcatcatcaacacaaagagcggcgtcggcgccaaccgcaaccaggccttcgtcgagttcactgacgttaatcaggcaatctcgatggtttcttactttgcatcatcttcagaaccagcacaaatacgaggcaagactgtttacattcagtattcaaacaggcaagaaataattaacaacaagagtcctggagagactgctggaaatgtcttgcttgttactatagagggtgttcaagctagtgacgtcaccattgatgtgatccatatggttttctcggcctttgggtatgttcataaaatagccacctttgaaaaggctgcaggttttcaggcattgatccagtacactgatgcagatactgcttcagctgctagagaagccttagatggaaggagcatcccaagagcacgtgacatcctgctgcctgcggatttctttttctgcacataaggatttaaacatcaagtttcagtcaaaccgcagcagggattataataatccatatcttccaattaattattctgccatggatggtacattgcagcctgctgttggatctgacggaaggaaagtggaggctcaaggcaatgttcttcttgcatcaattgagaatatgcaatatgctgtttctgtagacgtgcttcatactgtgttctcatcatttggtacagtccagaaaattgctatttttgagaagaatgggggaacacaagctttgattcagtaccctgatgtaaatactgccgctgtagcgaaggaagcattggaagggcattgcatctacgatggcggctactgcacatggtgacaagagcagagattatacaattccagctggcgtaatccaaggggcgccacaaccacctggtatacaagccacgtcccctgggtggcaaggtaaccttcaagcagcagggccatatgccccacccggtgcccctcctcaaaatcacagtgccaatggacaagtgccgaactggactcctggcaattcagggtattccccagccccaggaacatatccaggccagatgtactcatctccggcacagtatgtagcatcagggagcttccttaatacctcagcggccactccgcctcagtatgcaacctcagggggcttccctaataccccatccaccgctccgtcacagtatgcagcatcaaggggcttccctaacaccacacctgccgcccctcctggtgctccatcacaaacgccgcacgcttcccagcagatgccgcatcagcatggaaatcattcaggaggaggcacgcccggaactagccaaccgccactgccagcatcatattaccgttaagttggatcttcttttgctattgtacttgacctgtgttttgaactgagtaatcatgtaatactgcaataacctgcggtctgtaactgtgtttagatgtgatagcagatggatacgagtgaggaatacatgaatatgtttggggttttcattcattttaaaaaacggatcagtgttggctcatggcgattactggcaagatcatgattgatgttggattggtggtaatgttctgaacagccgac

SEQ ID NO: 10520 - DNA, 2019 bp, Zea Mays
ccgccgcagcacgaaaccctagcttctgcatctccgccccctccacctcccctccgcgaagcaggcgagatgtcgtcgggcggcggtggggggcagcagttccgctacacgcagacgccgtccaaggtgctgcacctgcggaaccttccgtgggagtgcgcggaagaggagctcgttgagctctgcaagcccttcggccgcatcatcaacacaaagagcggcgtcggcgccaaccgcaaccaggccttcgtcgagttcactgacgttaatcaggcaatctcgatggtttcttactttgcatcatcttcagaaccagcacaaatacgaggcaagactgtttacattcagtattcaaacaggcaagaaataattaacaacaagagtcctggagagactgctggaaatgtcttgcttgttactatagagggtgttcaagctagtgacgtcaccattgatgtgatccatatggttttctcggcctttgggtatgttcataaaatagccacctttgaaaaggctgcaggttttcaggcattgatccagtacactgatgcagatactgcttcagctgctagagaagccttagatggaaggagcatcccaagttacttgcttccagagcacgtgacatcctgctgcctgcggatttctttttctgcacataaggatttaaacatcaagtttcagtcaaaccgcagcagggattataataatccatatcttccaattaattattctgccatggatggtacattgcagcctgctgttggatctgacggaaggaaagtggaggctcaaggcaatgttcttcttgcatcaattgagaatatgcaatatgctgtttctgtagacgtgcttcatactgtgttctcatcatttggtacagtccagaaaattgctatttttgagaagaatgggggaacacaagctttgattcagtaccctgtaatcgtttaccatctgccaactctgaagtgcttggatctccctaaaaagaaaagattttccttatcagatgatgttttgccaaaacccaatgtgaaagtgattttcctgtgttataacaaaaacaagaggctttcacatatttaggaatggcatctcctgggaccctggagcccttgattaatctgcttataatgtaaatactgccgctgtagcgaaggaagcattggaagggcattgcatctacgatggcggctactgtaagcttcacctgtcatactcccgtcatactgatctgaatgtgaaggcacatggtgacaagagcagagattatacaattccagctggcgtaatccaaggggcgccacaaccacctggtatacaagccacgtcccctgggtggcaaggtaaccttcaagcagcagggccatatgccccacccggtgcccctcctcaaaatcacagtgccaatggacaagtgccgaactggactcctggcaattcagggtattccccagccccaggaacatatccaggccagatgtactcatctccggcacagtatgtagcatcagggagcttccttaatacctcagcggccactccgcctcagtatgcaacctcagggggcttccctaataccccatccaccgctccgtcacagtatgcagcatcaaggggcttccctaacaccacacctgccgcccctcctggtgctccatcacaaacgccgcacgcttcccagcagatgccgcatcagcatggaaatcattcaggaggaggcacgcccggaactagccaaccgccactgccagcatcatattaccgttaagttggatcttcttttgctattgtacttgacctgtgttttgaactgagtaatcatgtaatactgcaataacctgcggtctgtaactgtgtttagatgtgatagcagatggatacgagtgaggaatacatgaatatgtttggggttttcattcattttaaaaaacggatcagtgttggctcatggcgattactggcaagatcatgattgatgttggattggtggtaatgttctgaacagccgac

SEQ ID NO: 10521 - DNA, 2327 bp, Zea Mays
gttttcgagattgctagcgaaaagcatctcaatccctgaatcgcacacccagccagaacgaacgccagaaggcccagaaccgctacctcctccaatacactttcgtggctccgccgcagcacgaaaccctagcttctgcatctccgccccctccacctcccctccgcgaagcaggcgagatgtcgtcgggcggcggtggggggcagcagttccgctacacgcagacgccgtccaaggtgctgcacctgcggaaccttccgtgggagtgcgcggaagaggagctcgttgagctctgcaagcccttcggccgcatcatcaacacaaagagcggcgtcggcgccaaccgcaaccaggccttcgtcgagttcactgacgttaatcaggcaatctcgatggtttcttactttgcatcatcttcagaaccagcacaaatacgaggcaagactgtttacattcagtattcaaacaggcaagaaataattaacaacaagagtcctggagagactgctggaaatgtcttgcttgttactatagagggtgttcaagctagtgacgtcaccattgatgtgatccatatggttttctcggcctttgggtatgttcataaaatagccacctttgaaaaggctgcaggttttcaggcattgatccagtacactgatgcagatactgcttcagctgctagagaagccttagatggaaggagcatcccaagttacttgcttccagagcacgtgacatcctgctgcctgcggatttctttttctgcacataaggatttaaacatcaagtttcagtcaaaccgcagcagggattataataatccatatcttccaattaattattctgccatggatggtacattgcagcctgctgttggatctgacggaaggaaagtggaggctcaaggcaatgttcttcttgcatcaattgagaatatgcaatatgctgtttctgtagacgtgcttcatactgtgttctcatcatttggtacagtccagaaaattgctatttttgagaagaatgggggaacacaagctttgattcagtaccctgatgtaaatactgccgctgtagcgaaggaagcattggaagggcattgcatctacgatggcggctactgtaagcttcacctgtcatactcccgtcatactgatctgaatgtgaaggcacatggtgacaagagcagagattatacaattccagctggcgtaatccaaggggcgccacaaccacctggtatacaagccacgtcccctgggtggcaaggtaaccttcaagcagcagggccatatgccccacccggtgcccctcctcaaaatcacagtgccaatggacaagtgccgaactggactcctggcaattcagggtattccccagccccaggaacatatccaggccagatgtactcatctccggcacagtatgtagcatcagggagcttccttaatacctcagcggccactccgcctcagtatgcaacctcagggggcttccctaataccccatccaccgctccgtcacagtatgcagcatcaaggggcttccctaacaccacacctgccgcccctcctggtgctccatcacaaacgccgcacgcttcccagcagatgccgcatcagcatggaaatcattcaggaggaggcacgcccggaactagccaaccgccactgccagcatcatattaccgttaagttggatcttcttttgctattgtacttgacctgtgttttgaactgagtaatcatgtaatactgcaataacctgcggtctgtaactgtgtttagatgtgatagcagatggatacgagtgaggaatacatgaatatgtttggggttttcattcattttaaaaaacggatcagtgttggctcatggcgattactggcaagatcatgattgatgttggattggtggtaatgttctgaacagccgacctcagtaagtactgtgggcactgcttgattgtcgtctcggctttgccttgtccggtttgctggaaggccctgagctgccgctgctagctgttcctatctcgttttgtcactgagcagttctccacggaagacggaacctctgaatgctgtgctggcatacatattcatcggaataatgctgatcactgggataaggaaaaataaatactgtacgcaagagataaggaaatgagcaggaccagatagaaagcggatgtggttaagcgatgggctgagttaaacaaaaggacgaaacatttacctgctaaattgtcaacttttttctttttttccgcgactctgtctaagcacgattcagtagtgaagagtaagcaaaactgtcaactccggc

SEQ ID NO: 10522 - DNA, 2404 bp, Zea Mays
tttcgagattgctagcgaaaagcatctcaatccctgaatcgcacacccagccagaacgaacgccagaaggcccagaaccgctacctcctccaatacactttcgtggctccgccgcagcacgaaaccctagcttctgcatctccgccccctccacctcccctccgcgaagcaggcgagatgtcgtcgggcggcggtggggggcagcagttccgctacacgcagacgccgtccaaggtgctgcacctgcggaaccttccgtgggagtgcgcggaagaggagctcgttgagctctgcaagcccttcggccgcatcatcaacacaaagagcggcgtcggcgccaaccgcaaccaggccttcgtcgagttcactgacgttaatcaggcaatctcgatggtttcttactttgcatcatcttcagaaccagcacaaatacgaggcaagactgtttacattcagtattcaaacaggcaagaaataattaacaacaagagtcctggagagactgctggaaatgtcttgcttgttactatagagggtgttcaagctagtgacgtcaccattgatgtgatccatatgcaggcccatgttaactggagaaaatgtcgttatcaacacctgcaatgggagagataccatgtttgttttgccgcctctgtcttctaactagtacattcaaagttcttatgaactcttatgtctcatcttgaggatgcaactttctaagtatcccccatcaacgcgcttatctccggtgtagggcacctcctgtttattcaagttattcatgaaaggttttctcggcctttgggtatgttcataaaatagccacctttgaaaaggctgcaggttttcaggcattgatccagtacactgatgcagatactgcttcagctgctagagaagccttagatggaaggagcatcccaagttacttgcttccagagcacgtgacatcctgctgcctgcggatttctttttctgcacataaggatttaaacatcaagtttcagtcaaaccgcagcagggattataataatccatatcttccaattaattattctgccatggatggtacattgcagcctgctgttggatctgacggaaggaaagtggaggctcaaggcaatgttcttcttgcatcaattgagaatatgcaatatgctgtttctgtagacgtgcttcatactgtgttctcatcatttggtacagtccagaaaattgctatttttgagaagaatgggggaacacaagctttgattcagtaccctgtaatcgtttaccatctgccaactctgaagtgcttggatctccctaaaaagaaaagattttccttatcagatgatgttttgccaaaacccaatgtgaaagtgattttcctgtgttataacaaaaacaagaggctttcacatatttaggaatggcatctcctgggaccctggagcccttgattaatctgcttatagtaacattgactttctcactaaacatgcagctgattatttcattttcccatgtgcttttctatagaaattattcatctgaatctgattaagtctttctttacactttagatgtaaatactgccgctgtagcgaaggaagcattggaagggcattgcatctacgatggcggctactgcacatggtgacaagagcagagattatacaattccagctggcgtaatccaaggggcgccacaaccacctggtatacaagccacgtcccctgggtggcaaggtaaccttcaagcagcagggccatatgccccacccggtgcccctcctcaaaatcacagtgccaatggacaagtgccgaactggactcctggcaattcagggtattccccagccccaggaacatatccaggccagatgtactcatctccggcacagtatgtagcatcagggagcttccttaatacctcagcggccactccgcctcagtatgcaacctcagggggcttccctaataccccatccaccgctccgtcacagtatgcagcatcaaggggcttccctaacaccacacctgccgcccctcctggtgctccatcacaaacgccgcacgcttcccagcagatgccgcatcagcatggaaatcattcaggaggaggcacgcccggaactagccaaccgccactgccagcatcatattaccgttaagttggatcttcttttgctattgtacttgacctgtgttttgaactgagtaatcatgtaatactgcaataacctgcggtctgtaactgtgtttagatgtgatagcagatggatacgagtgaggaatacatgaatatgtttggggttttcattcattttaaaaaacggatcagtgttggctcatggcgattactggcaagatcatgattgatgttggattggtggtaatgttctgaacagccgac

SEQ ID NO: 10523 - DNA, 2090 bp, Zea Mays
tgaaaggaggttcataaatgtaccttttggagcttcatgggcggaagttactatgcgaacatcagcttttgatactcctagaagattctttttggacactgttcagatctgtccactgaagcgacctgttaaatgggaggctgttgttactttctcttctccatcttcaaagaatttcagttttcctgtagaaggtggcttaactttggagttgtccatagcccagttctggtctagtggaattgctagccatgaacctacctgtgttgattttgagattgtgctgcatggaatatccattgatcagaaagtaagtacccttgatggtgagtcacccttgcttatagttgctagatcacttctagcgtcagagaagcttgttcctgttggcaccctgaacaaggataccttatcgacccgtggagtgtaatctttcttcacttcccactgaccgtgataaattgccctctggcaagcaaattattgccctgaccttaacttacaagttcaaattagaagacaatgctgaaataaagccccatgtgccactgcttaacaacagaatatatgacaataaatttgagtctcagttttatagaatatcagattcaaacaagcgtatttactcgtccggagacgtttaccctagttatgtcagactttccaaaggagaatacacgttgcaactgtacataaggcatgagaatgtgcaattcttagagaaactcaaggaactggttctgtttattgagaggaaactagacaaaaaggatttcgttccattgatgttctactcccaacctgatggtcctatagttggaagtggcaccttcaaatccactgttctagttccaggcgaacctgaagcattctatgtgggtcctccgtctagtgaaaaactcccaaagaatgctccacctggggctgttttggttgggtccataacctatggtactgtaagcacatttaacaagaaagatgaacaaaaccaccgtgctccagtatcttatagtatctcatataccattttgccatcaaaggttgatgataaagaaaagggggttttagttggtacaaagagcatacctgaacagttagatgaggaggttcgagacaccaagataaagtttctttccagcgttaagcaactaactgaggaggacaagtctgcctggtcagaacttgtggtttctctgaagtcagaatatccgaagtacacacctttgctttctaagattttgcaatgtgtcctccagaaaggaactgatggtgataagattagccatgaaaaagaggttattgctgcagccgatgaggttgtgggcagtattgataaagaggaactggctaagtatttatctctaaattcagatcctgaagatgaagaagcacagaaattcaagaaaaaaatagaagaaacgcgagatcagttggctgatgcactatatcaaaagtgtcttgcattggctgagattgaatcactgaagtctgatgagtcaattgaggtatctgctaaagatatttttgaggagaattacaaagaattgattaaatgggttgatgtcaaatctgcaaaatatggcacttcgactgttttgcgtgaaaaacgctgtggaagacctggtacagcattgaagattctaaatgatttgattcaaaatgaatctgaaccaaagaaaaagctttatgatttgaagatccagttgattgaggagatgggatggaaccatgtctcaacctacgaaaaacagtggatgcaagtccgctttcccccatgtctgccaccattttgattgtgaactcatttttacaatggctctatcatcctgggttcagtagttgtcattttcattgctgggtgcgtcagttcattatttcgatggcaaacagccaactaggcaagctactggatttgtgcgtttggggacacagttattccatagttattttgtggtacaatatcaggggagtcctttctccaaggagataagacggaacagagatattttgatggacttgaaggagattttatcctcttcaatccttataatgtctatcaaaccaaataaggtttataatccttgtcaaac

SEQ ID NO: 10524 - DNA, 4472 bp, Zea Mays
gctgccagactgcaacagccaccggcggtcggcacgacagcacggtccttccattgttgctcccagctccaacgcagcattactcatctccattctccagtccgataatccactcattacctcatcatcgtttccaaaagcaaagctttccacgcagattccaccattaaattgggcgaacttttttgaattaaaaactcaaatcctggaaaacgagatgcggtaggctggtagtaggaggactaatcatgtgggcgacgctacataaacccgtcgcgcacgccaacttgcgtctcctcctcacagtctccgccttctccggaccactccacttaggcaccgccagcgctgtcgcggcggcggttacgacccgacgctcgagttctagcaggggcgtcgcggccaccgcgatgccttcgtcgtctccgcctccgctgccaccagccgaggagacgaccgcctctgctgccgctctcgcccctgagggtggattctccctcaccgagccctcgttcctcgagtccctcatgccgaagaaggagatcggcgtcgaccgcttcctcgccgctcaccctgagtatgacgggcgcagcgcactcatcgctatcttcgattctggagtcgatccagctgctgctgggttacagactacttcagatggaaagcctaaaatccttgatgtacttgattgcactggtagtggtgatgttgacacgtccaaagtggtgaaagctgatgctgatggtgctattgttggtgcttcaggtgcccgtttggttataaacccctcatggaaaaacccttctcaagagtggcatgttggctgtaaattaatatatgaactgtttactgacacacttacatctcgattgaagaaagaaagaaagaagaaatgggacgaggaaaaccaggaatcaatttccgatgctctgaagcagctgaatgaatttgaaaagaagcatcctaagcctgatgacaccatgctgaagaaggcacatgaagacatgcaaagcagacttgattacctgaggaaacaagctgaaggttatgacgataaggggcctgtaattgacattgttacatggaatgatggtgatgtgtggagggttgctgtcgatacccagacccttgagggtaacaatgatggtggaaaactagcagattttgttcctctgacaaactacaggcttgaacgcaaatatgcaattttcagcaaattggatgcttgctcttttgtagcaaatgtttataatgatgggaaccttgtcagtatagtaactgactgctctccccatgctactcatgtcgcgggcattgcagctgcatttcatccagatgaacctctgctgaatggagttgcacctggagcacaattgatttcctgtaagattggagacactcgcttaggatctatggagacagggacggggctggtgagggccttgatagctgcagtagagcacaaatgtgatctgattaacatgagctatggagagcctacccttcttcctgactatggcagattcattgatctttctaatgaggttgtggacaaacatcgcattatatttattagtagcgccggaaacaatggaccggctttgaacactgtgggtgctccaggtgggactagtacaagcattattggtgttggtgcttatgtttcaccagccatggctgctggagctcactgtgttgtacaaccacctgcaaagggaatggagtacacatggtctagccgcgggcctactgctgatggggatcttggcgtttccattagtgcacctggtggtgcagttgctcctgtaccaacttggacgcttcaatctcgcatgctcatgaatggcacttccatgtcatctccttctgcctgtggtggggtagctcttcttgttagtggcatgaaggctgaaggcattccattaagcccttattctgtaagaaaagcaatagagaatacagccgcatctataagtaatgcacctgaggagaaactgaccacaggaaatgggcttttgcaagttgatagggcttttgaatatgcacagcaggctaagaagttgccacttgtttcttatagaatctcaatcaatcaagtgggaaagtcagtggactgtgcaacttgacccaaaatttcatgagggcgcgagtaacttggagcaactggttccttttgaggagtgcctgcaactgcattctactgatacctctgtggttcaaattcctgagtatatactggtgacaaacaatggacgcagtttcaacattgttgtcaatcctgctaatatcagcagtggccttcactattttgaagtttatggcatagattacaaagcaccatggcgtgggcctattttccgtgtgccaattactgtaataaagcctattgctctattgggagagccaccactattgtcaatttcaaaccttcgttttcaatctggtcatattgaaaggaggttcataaatgtaccttttggagcttcatgggcggaagttactatgcgaacatcagcttttgatactcctagaagattctttttggacactgttcagatctgtccactgaagcgacctgttaaatgggaggctgttgttactttctcttctccatcttcaaagaatttcagttttcctgtagaaggtggcttaactttggagttgtccatagcccagttctggtctagtggaattgctagccatgaacctacctgtgttgattttgagattgtgctgcatggaatatccattgatcagaaagtaagtacccttgatggtgagtcacccttgcttatagttgctagatcacttctagcgtcagagaagcttgttcctgttggcaccctgaacaagatcaggataccttatcgacccgtggagtgtaatctttcttcacttcccactgaccgtgataaattgccctctggcaagcaaattattgccctgaccttaacttacaagttcaaattagaagacaatgctgaaataaagccccatgtgccactgcttaacaacagaatatatgacaataaatttgagtctcagttttatagaatatcagattcaaacaagcgtatttactcgtccggagacgtttaccctagttatgtcagactttccaaaggagaatacacgttgcaactgtacataaggatttcgttccattgatgttctactcccaacctgatggtcctatagttggaagtggcaccttcaaatccactgttctagttccaggcgaacctgaagcattctatgtgggtcctccgtctagtgaaaaactcccaaagaatgctccacctggggctgttttggttgggtccataacctatggtactgtaagcacatttaacaagaaagatgaacaaaaccaccgtgctccagtatcttatagtatctcatataccattttgccatcaaaggttgatgataaagaaaagggggttttagttggtacaaagagcatacctgaacagttagatgaggaggttcgagacaccaagataaagtttctttccagcgttaagcaactaactgaggaggacaagtctgcctggtcagaacttgtggtttctctgaagtcagaatatccgaagtacacacctttgctttctaagattttgcaatgtgtcctccagaaaggaactgatggtgataagattagccatgaaaaagaggttattgctgcagccgatgaggttgtgggcagtattgataaagaggaactggctaagtatttatctctaaattcagatcctgaagatgaagaagcacagaaattcaagaaaaaaatagaagaaacgcgagatcagttggctgatgcactatatcaaaagtgtcttgcattggctgagattgaatcactgaagtctgatgagtcaattgaggtatctgctaaagatatttttgaggagaattacaaagaattgattaaatgggttgatgtcaaatctgcaaaatatggcacttcgactgttttgcgtgaaaaacgctgtggaagacctggtacagcattgaagattctaaatgatttgattcaaaatgaatctgaaccaaagaaaaagctttatgatttgaagatccagttgattgaggagatgggatggaaccatgtctcaacctacgaaaaacagtggatgcaagtccgctttcccccatgtctgccaccattttgattgtgaactcatttttacaatggctctatcatcctgggttcagtagttgtcattttcattgctgggtgcgtcagttcattatttcgatggcaaacagccaactaggcaagctactggatttgtgcgtttggggacacagttattccatagttattttgtggtacaatatcaggggagtcctttctccaaggagataagacggaacagagatattttgatggacttgaaggagattttatcctcttcaatccttataatgtctatcaaaccaaataaggtttataatccttgtcaaac

SEQ ID NO: 10525 - DNA, 2660 bp, Zea Mays
cgccatcacgtccgcagcccacatgctccaccctcgcccccctccccgccattctcggcgcaccgctcgccatccccataggccatcattgctagcgcgcccatgccccctgcccctgtcatcggcaccagaaaccgctcccctcgcacgccggccctagctggctagctcccaaatccgcccctccgcctcagatccctacggtgggatgcgagggaacgacaaccacgcggcctcccgtccttagagcctcaaatccgatgccccctccctaagccattccctcggccgcgacatcaacgaaaacgagcatggcccccctctacctcctccaccttgccgtttatggcctccgcactgccccaacgtcgacaccttcgtcctccccctctactcccagtgcaccgccgccgcgtatgcgctatcccacccgatggacgtgttgccgcctctgcagcacgccctgtcgctgtcgaccccacccagccatgcatttggagtttacaatgtggagacatgatttatccaccggacgacgaggttggtgcgcggatggcgagggaggacctccactgggcctactccacacctcttcctgtctaccgaggtcgagcacatggaggacctgctccgctgtcgggcactcctgagccagcgactacaaaatccactctggctctctacttcaccctccatattacaatatgtactttgtatatgtgagatgagacacccaagcagtcaaactaaacactattgtccaatcccctcttccaaattcattacaatcctattagcatgcaaagatttaatttgatgcaatgttttgatttgtactacgtttttactagctttgcagatgcttcagaaggttatggtcagtgacttttttcttttcagatttgttagaatagacacagaaatttagatttctctcctgtaatgttgttagcattggtcttaattttatttgttgttgttaggagaggatttgattatcatgatcagtacaagatatcaatcattaaatagcgaattcactctaatttctagccaccatttttctaagtaccatgttgctgctctctttccgctggatgaacatttgaacagtggcaccgaatagtgatcttatagtgctggcccgcaacacatggggtgcttctgttcttttacccattgaaatgttatggatcttttttctaatctaagattagaagtatggtcgtgatactattttgctataatctatgaatgtttttctgtaaaaaccaatctgtttttgctttagattaccaaactaaattgtctctatgcttttttgtgggtgattttgttggacccctacagccgtgatggcatgggaggctggcaagtcgattctttgtatatagttagtagtacaaaactatatgctatgagggtccagagaaattgatgatgaggagcagctagaggtcgtggtggagaagggctagagaaagggatgacgagggacagttgcaagttgtggtggagaagggcgacgaccccatgacaacatggggtgaatttctatatcagttgccaatcataagaaacaaatcttattattgcactccagggccagatgctattattgttggctatatcagacagtttgtcatcaagcctttgtctggattcctttttggcactcttatggagtactaagccacactgaagaatttgggcttaagagtgaggttttgaaggtgactcttgcaactgacgtcgtgaactgagtgtgaatatctactggatgggcaagcaagtttccaaccccatgccctcccatcgattctgctgcctgatccggctagagtttattaggactcgcaactacctcggagttcactgctgtaaatatgggtaacaccctaccagtgcatgatatgtcggaatccacagcagccataggatctcccaacaaggaggatcttgcaacaatgacattgatcaagaattggatgttggaaattatggtttggcattgttacttctcttactcctgtttcatgtcccaatctgaggtgactcgtgttggtaatcatggcatctcagattgggagtgggaggaggatgaggagatgatttggtgctaccagggacaggccccatctcctagaaatggatcttcctcctttgcatgggcaacttgtgcatcgggctactcttcaccaacagtgttcggtatgggagccacaaatagcagcacgatgggaatgcagcagcagcagcagcaaggggtatacgggaacatgcaggcaggtgcacagaacgtgcaaagtatggtgggccttcagaaccagacccagaatcccaacttcactcagcagattcaacaaaaccaacaatgattcaacactaacggtcatggaggttgaaagatgagcaatatagccatcgttttgctatttgtctgttggtctttactcagcttatctgtgagactgatagtagccccaggttgatagccttcgtttttctgtaaatcaatgtagatgcatcgccattagcgagatgcaggtcaattatatacgttgtaactgtgttttggatatgtgaatagtgttacgtgtgttccttttatttataattaagcctcgcagcaaggccgacaatcgaattgcatacgacta

SEQ ID NO: 10526 - DNA, 2043 bp, Zea Mays
gctagcccacgtaagcacggtttcagttcaaaaccattctccactgttgctcctgtcctgttcctccgcttcctctgtctctgtctcgtcgtctcccccatctggccatctccggctagggtttgccctcccaccacgtccgaggtctagctcgtctccgccactgccggaccaaggatgtcgcaagagcaaggtatggaggagccgccgccgcaggcggtaggcgaggcacaatcggccgccgatgtccccatgagcgaggccgcagcggtggaggatgaggatgaggaacccgtcatgggggaggggcagggcggtgaaagcgggaccgccgatgccgttgattccgtcaaggcttcagtgaagcccgaagcagagggcgcggaggaaggggacagagaggagcttaatggtggcccgacggcggatttgactgacgaggttgtgaaattggagaacggggatggccccgtgccggtgggtggctccgcggatgagtgcggagctggagatggcggtgttgataagggcctggttggtcagaatgagcctgttgtgaaccagcttgtgctggtgcaggctgaggaggagctggcattgtctaagatctcaaacagttccttcatgttcgattacaccactgggggtgatgactcagggactgaggaggagcaggctgccttcatgaaggagctggagcgtttccacagggagaaaatgttggagttcaagccccctaagttttatggtgaaggattgaattgcctcaaattgtggagacaagttactggattgggtggctatgatcaggtgacatcatgcaagctgtggcgtcaagtgggagagtcattcaaacctccaaagacatgtacaactgtttcatggactttccgtaacttctatgagaaggcactccttgaatatgagaaacacaaaatcgaaacaggagagttccaagtagcttcatctgctctaccagatcgagttggttctgagagccaggtgggtggaagccacgtatctggttctggaagagccagaagagaatctgcaactcgtgcaatgcaaggctggcattctcaccgcctactaggcaatggtgaaaatgctgatcctataattaaggataaagggcctattgtcttaaagaaggataaaactcctaaaagcagtggttctgccaagaggaaaaggataccatcccttgaagatgacatggtgataccttataaatccgataagctacaaaagattgctatgaagtctatgcattggttcctggccttctgcgtgaagaggtacatgttcagtctgaccctgctggtcgtttgatagttactggagagcccgagcaattggataacccatggggtgtcactccattcaagaaggtcattaggttgccttcccgcattgatcctcaccaaacctctgcagttgtcaccctccatgggcagctatttgtgcgtgcaccatttgaacaatcaaaataatgttgatgccacaatgaagcacaatactacaagtttgccttatgagtgggattataccgttatgacatgagcttagaagtgctcaccctgaccgtcctccaaaactagttccttgctgattttaatgcttcaagcctcctccatgctagatctctcatgtatcaagttaaactcattagttgacatagttctgtgtgtattcggttgtgcccgttggctgtgaattgtagctaaagcaaagttactaagcctagagtttaggatgttgatagtctgatgctcaacatgtccatggtttcttttcaatttagtcggcatagaatgtactgtttgtagcaatgtagtatgtagcttgttcccagtatttaagctccggaacatggagagcggtagagattcattgtatgtaactgttgctggtgcattgcaattgctattcaacttgtattgtcaaacaatctgaaactctatggcctccttgtaccctgccttcgtattgtgtgactttgtgtttccgtactagctgaaagaggaagataaatgactgcca

SEQ ID NO: 10527 - DNA, 2184 bp, Zea Mays
ttcagttcaaaaccattctccactgttgctcctgtcctgttcctccgcttcctctgtctctgtctcgtcgtctcccccatctggccatctccggctagggtttgccctcccaccacgtccgaggtctagctcgtctccgccactgccggaccaaggatgtcgcaagagcaaggtatggaggagccgccgccgcaggcggtaggcgaggcacaatcggccgccgatgtccccatgagcgaggccgcagcggtggaggatgaggatgaggaacccgtcatgggggaggggcagggcggtgaaagcgggaccgccgatgccgttgattccgtcaaggcttcagtgaagcccgaagcagagggcgcggaggaaggggacagagaggagcttaatggtggcccgacggcggatttgactgacgaggttgtgaaattggagaacggggatggccccgtgccggtgggtggctccgcggatgagtgcggagctggagatggcggtgttgataagggcctggttggtcagaatgagcctgttgtgaaccagcttgtgctggtgcaggctgaggaggagctggcattgtctaagatctcaaacagttccttcatgttcgattacaccactgggggtgatgactcagggactgaggaggagcaggctgccttcatgaaggagctggagcgtttccacagggagaaaatgttggagttcaagccccctaagttttatggtgaaggattgaattgcctcaaattgtggagacaagttactggattgggtggctatgatcaggtgacatcatgcaagctgtggcgtcaagtgggagagtcattcaaacctccaaagacatgtacaactgtttcatggactttccgtaacttctatgagaaggcactccttgaatatgagaaacacaaaatcgaaacaggagagttccaagtagcttcatctgctctaccagatcgagttggttctgagagccaggtgggtggaagccacgtatctggttctggaagagccagaagagaatctgcaactcgtgcaatgcaaggctggcattctcaccgcctactaggcaatggtgaaaatgctgatcctataattaaggataaagggcctattgtcttaaagaaggataaaactcctaaaagcagtggttctgccaagaggaaaaggataccatcccttgaagatgacatggtgataccttataaatccgataagctacaaaatgactcaatggttattgacatgggccctcctgctgattgggtgaaaataaatgttaggaaaaccttctcagttccgttaattcctgaagcaaaatttggagtgttgaatgccagtgaatgtgtgaactgctgattctttatgaaatgtatatatctcagaaagattgctatgaagtctatgcattggttcctggccttctgcgtgaagaggtacatgttcagtctgaccctgctggtcgtttgatagttactggagagcccgagcaattggataacccatggggtgtcactccattcaagaaggtcattaggttgccttcccgcattgatcctcaccaaacctctgcagttgtcaccctccatgggcagctatttgtgcgtgcaccatttgaacaatcaaaataatgttgatgccacaatgaagcacaatactacaagtttgccttatgagtgggattataccgttatgacatgagcttagaagtgctcaccctgaccgtcctccaaaactagttccttgctgattttaatgcttcaagcctcctccatgctagatctctcatgtatcaagttaaactcattagttgacatagttctgtgtgtattcggttgtgcccgttggctgtgaattgtagctaaagcaaagttactaagcctagagtttaggatgttgatagtctgatgctcaacatgtccatggtttcttttcaatttagtcggcatagaatgtactgtttgtagcaatgtagtatgtagcttgttcccagtatttaagctccggaacatggagagcggtagagattcattgtatgtaactgttgctggtgcattgcaattgctattcaacttgtattgtcaaacaatctgaaactctatggcctccttgtaccctgccttcgtattgtgtgactttgtgtttccgtactagctgaaagaggaagataaatgactgcca

SEQ ID NO: 10528 - DNA, 2173 bp, Zea Mays
tttttactgttggctgaattcaatacccagacgctgaggtgatcgccctgtcgcccaagacgctgatggcgaccaacaggttcgtgtgcgaggtgtgcagcaaggggttccagcgagagcagaacctgcagctgcaccggcgcgggcacaacctgccgtggaagctgaagcagaaggacccgctgcaggcgcagcggcggcgcgtgtacctgtgcccggagccgacgtgcgcgcaccacgacccggcgcgcgccctgggcgacctgacggggatcaagaagcacttcagccgcaagcacggcgagaagaagtggaagtgcgacaagtgctccaagcgctacgccgtgcagtcggactggaaggcgcactccaagatctgcggcacccgcgagtaccgctgcgactgcggcacgctcttctcccggagggacagcttcatcacgcaccgggcgttctgcgacgcgctcgcgcaggagagcgcgcggctgccgccgaccagcagcctcagcaacctcaccagccacctctacggcgccgccaccaacgcgggcaacatggcgctcagtctctcgcaggtgggctcccacctcacctccactctccaggacggccaccaccaccgcccgtccccggagctcctgcgactcggcgctacggccggcggcggcggtggcagcagcatcgccgcgcgcctcgaccacctcctgtcgcccaacggtgcctccgccttccgcccagcgcagcctccgtccttcttccacaacgcgggggcatcggtcggccaggactttggggatgacgcgggcaatgggccgcactcgttccttcagctgcaggccaacaagcctttccatggactactcatgcagctgcccgacctccaaggcaacggtgctgggggccccggcgcctcaggcggacccagctctctcttcagcctgggtttctttgctaacaatggcaacagcagctcggggtccagtcacgagcatgcaagtcaggggctcatgaacagtgaccagttcagcggcggcggttcggaggcacaggcggcggcagggatttttggcgggaacttcgttagtgctggtggagatcaagttccaccgccggggctctacagagaccaagcctccatgctgccgcagatgtcggcgaccgctctgctccagaaggcggcgcagatgggcgcgaccacgagcgccaacggcgccagcgcggcgtccatgttccgaggcttcgcgggctcttccccacaacacgtgcggccagcgacgccgcacatggaacagagcgacgcgaacctgaacgacctgatgaactcgctcgctggaggcggtggcctcggtgccggcggaggaatgttcggcggcggcagcaacggcgccggccacgcgggcatgtttgatccgaggcagctgtgcgacatggcggagcgcgaggggaagttcggcttcggccagggtggtggcggagacatcacgcgggacttccttggcgtcggcggaggcggcctcgtgcgcgggatatcgacgccgagaggagaccaccagagcagcagcgatatgagctccatggaggctgagttgaagtcggcctcgtccttcaatggaggcaggatgccatgacagagaccgacccatcgatcaagattatacagacataagctcgcgcacagtaatccagagacttgatcaaccagatgcaatgggagagcagtaaggtcgtcgtcatgaagttagaaactgagtcgcatgagtgagttcatgcatgggataaagctagctagctagctttcatcatccgaagggaccttgggtgagaaagatgcgtcttctctgactaatggagcagtaagctggagtgcgagttggacgcatgtgatcacccatttgctcgtgcatggcgggggttggtgttcattctgctggtctcgttcttgttggttttcccttcctttgtagttggataatctttgttggatcaagtatagtttttctagtgatagtatctataaggatgttatttgtagctagcttataaaggggcgtgatttgcagcttaatttgctccattcccctcctcctattttttatttccttttctcttgtatcaaaacaatacccccccttacaatgtcattaatcatgctagctgaaattcatcatgttct

SEQ ID NO: 10529 - DNA, 3059 bp, Zea Mays
cgcttcttcacgtcccccctcaatcacatcaccggcactccccattgtccttcatctgctgcctgctcctccgcgcggccatgcccgagctcgcggtcctcgttctcagccacgcgctctttcacgcgcgcctccgttgccgctcttgctcccagactttgccgtggccctctcccgtctctcattggcatttttttatgtagggttactcacactgttacaagggtcattcagcgcctgtcactgctctggctgatagattgcttatggatggtgaatctaaactgcttgcaagtggagggtaccaatccaccttccctacccgtccagctgctcgatgcctctgaaattgatggagcgatacctagcacgcggtgcatgttgttctgaagattctgctgctgttggttgccattcaccctgacagtattgccagtggcaccgtcaactatttcttccctctccgcccgagcctgcagatgaatgtttgacggcacttctcgcctactgtcctcactggtgtttccaaagtctgcagtgagttcggtctcagctctaattaacgaggaagtcatgctaggcaccctctggtcttctcgtctccaaccaaccactaccggcgtgtggatgatagcaggttatctgttgcgtggcataaatcgtccctgttggtgagctgttccaaagactcaaaggttaaagtttgggacacagtggctccttcgagtggttcatcaccatgtgtaggcagtgctcacctcaactcaaacaggccaccaattgctatgaaatgccatgaatccctttgctatattgctgctggagctcaagtgacagcgattgacttgaggacaatgaagaaggcttctgtccttgcactccagaaccacagaatactttcttacggatacgtcaatggctgtgcagtccaaaaaaatgaagagaagggaatttgacattgtcgttcaagcttcaacattgatcacttattggttttcaggaagtctttctgaatgtcagttgctataggattatttgaacaacatctcttccaatggtgatatattttatgatgctcagaatgatttcttgacacctgaatgggacagtgagaatttacaagtggtactgatgattctatccatgttcaaatcatcaagatagtcatcaggttccttcagtaattcaaaccatcactaatcccttctgacgggctatatattctatcggaccaggcacaactatccaaatttcttttctatataacaaacgcggacgtaaagttgctcaaccacgctgtccacgtcgctcctccgtttcccagccattggatcggcaaccaacgacacaagagaattccgtgcgattgtttcttaacgtgaagtttctggacagcgccggacagatagagagaatagaagaatatacacatcttcttcctctcgcttccaaaggtgatgccttccacggagaggagatcgtgcgaccatgatggcagcgactcttgattttgcccatcttcccacgctcaaacggataacagtctccttccttctgtctcttccaatcgtctcttcctagttccataacactctcacaacacgctagcaggacactcattctctcaatcggctcttcccgctgcgctacacgccaccaagagcctccccaactcctccccgtcaaacggcgccgcgtcgcaaggagcacaaccaccccccgtctccttcctcagacgctgtcgcgtttctcgcgcggtgcgccccctccctgaaattcttatatacagagcaaggagcaaatatgggattccatgatgtccacgtcgctattttttgacggctcaacttgattgtgccgtgaattgtctgttagctagggagtcatcatttctgttttggcctctaaaataacgtttacagctggaaccgaagtatgcttgacaaatggttattgcccacggaagcttaaatacttggtgctgaactgctgaagtatgatgtctcactgaaaaacaacgagatggcaatgagaagtgttcaggaagaggggtaatatttactcagagcagcaaaggaaggtgctacttcatggtcatgagtatatgcaaagagacaatgctcataatagtttgctttgatatttgttgttcatgctaaggatgccacttactttatttgcaaacaagctatttcagatgattgacagctttggcatgacttttcttttccttcttttgcattgtttcatatgtgtgaggattttagggagcatattaaatgagatacatgagtgctcagtcatcatagtaagactgcacaggtagtcatgtgttatacctggccattccatatttatcaaaagccatttcctttaaataattgtattctatagcctcaatcattcaatcaagttattgtaccatgactcattttgtgtgcagttttcccttttttgtgctaactctaatgaaatttcgtttaaggggacaagtaaacatgagcgaaatgggtaattgagtaattgatttgagttggtttcagttactaaagtagcaacctcataaaaaacttaaacatgaacagatcaatacaagtacgcatcttaagcactttgtcagtttgattagtaattgcaagaaaataatttacgtacattactctgcaattactaatatgtcctctaattgatgctacaggtcgccccaccaagctgccatgatattcctccacttaccagtgtttcaaattccaatgacatcaggttgaagaaaggaacttcacacatgaaaagagacgatccggacgaccatgaagattaaacgttgctgttaagaaaagccatattttctgtattgcttctaagctgttttatggcctttaaaccaatacttttgcttggcatatatgtagctataactattgtaatataatctctgagcttctcatgctgctattcaacatatcattactcctaccaatatatgtacagtttcagttgacttgcttgctttccgttcttgccttatcaagctaattagctaaactacaattcagttt

SEQ ID NO: 10530 - DNA, 2943 bp, Zea Mays
gcgaactgattcaagggggcttatcataagggttatgttgaaagccaagaagtatgactttgtccagaagttctatgagaagatgcagaaaaatggcgtaccaccaagagcaataacttacaaagtgcttgtaagatctttttgggagcaggataaaattaatgaagctgttgaagcagtcaatgacatggaacaaagaggagttgttggagcagcaagtgtttactatgaattagcttgctgtctctgcaataatggaaggtggagagatgctatgttacaggttgagaagctgaaacagcttcccctcacgaaaccactggagtacgcatttactggaatgatcttagcctcatttaatggtggatatatctatgattgcatctcaatatttgaattaatgaaggaccactgcatgccaaatattgggactgtgaatgtcatgttaaaagtttatggacattgtgatatgtttgggaaggcaaaggacttgtttgaaaccaccaaggcttgtttcttaaattctcagacatatatccacgagcattcgtcattcaaagcagacacatatacatacaactctatgcttgaagcatctgcctctgcccaacagtgggaatacttcgaatatgtgtatagagagatggctctgtctcatcactgtctagatcaaagcaaatattcatggttgctcatcaaggcatgcagagctggaaagccatatttgctggagcatgcacttgactcgatacttgaaagaggagagatccctgatgtacagttgattactgaatcgatatgccagtctattgctcatagagattatggaaggacgctgcagctcttgaatattatgacccaggcctcaataaaaattaaagaagtcgagtgggattacctactacagcaaaatatgcatcaattcagcattgatgccctcgagggccttataaagtatctcagtactaatggtactaccaatgctgatcctgcagttgatttagtaagagcactgcagtcccaatgccgggacgataccagtactcaacagtttgaactctcttttcatggaagtggaaacaaatattcatgtagcagtctggcagaactagatcagctcacttgcaagaacttgtgcactgatataattcttgacgtccctggttctgatagagagatgcctcagttaggtgtcagtgctctcatgtgcagggacatctcattaaacggtcaacgagtggaaaacaaacatgagctttctgatcttgggcagaggggtccacaggtatctgcaattgacaaagtacttgattccatgaattcttatggtgacaattcgtatggggagatgccatcagcttcaaaaattcttgagctgtgggagcatgagaggtaaatgacatgtttgctccaaaaacagaaaattagaggataaatgaaatgctagcagatattatttgatatatgggcagtgcaatccttgtataaattactgacaaatgctgtaaatttgaaggcccctaagttggttcgtgggatctctgctgcaatcgtgttgcctaaaattattatcagaaggctcttatttgtgtgatctcattgtccatactacggaaaaaacagggaatatatagaagctctgagctcttggaagataaatttatgcattgacactgtttctctatttatagcgtctctcaaccctcacccaaccaccatctccatcgccaatgcatgggtctgggggcttttctgcgatcagcacctccttataaggacgacgtgatccactgctagccaaagaagcagcagatgaagtgttaaggccttcgtcttcacaccatcgctgatacttcaagcgacatccaagaaaagcattagatgggtggtgggggaaggaggagaggaggccaacgccgggagacaaagggtggttactgacgacattggaagaaggaccggcgtgaggctatagggtggaggagtagaggcatcgacctaagggaggccaaggggcatgagcggaagggacatctagctaaccttacattcagttgttggacatctaactattacactgtataacgcgtgcatatacatgtatccttatacaccctcgaaaaactatggcatcaaatctcaagatcaacaaaattatcataagcacctccatcgacagacatatcacttactggaagatgtcatcaacttttaaaataaatctggaaaatacaatcacccgtgcctaattgaggttaaacggtatgcaaattccacaagagtgttacgcccctagccaccggctcgagttcgccgagacgtgagcaaccagtgccgactccgagacgacgctttcaggcccaacagactgccagctgatggggcacttgccgaggaagaagaggatcccgtgatacgcctgggccttctaggagtgcgtaagggcgaatagaggagcagcgcagcctgggacagggacctgagcgtgtatggtggagaagagcgagaggaagaagcaggagcaagatcaccgtcagccagggtgaccgagtcagatgcttttaacatggagagaaaaggcaacaggaaaagaaagctaaacaactttagttaggcgacactgggatcaataatgaattgattctttaagtttcaagagcaatcagcaatcctcctcttccaaacaggtatttagggtaaaaaaagaagtctacaatcattgtctcaatacgaagcaacatctctacatgcaatccttttttttaaccttgactaacataatgccagttgtctgaattttttaccagattttgcaaaacatattacaaaaagttctttggagatctgtgatgtgtctaaataagcaatagttctacatgacttagtattgtctccaatgtagcattttgaaatcattattagtgaatgatacacgaaaataaa

SEQ ID NO: 10531 - DNA, 1900 bp, Zea Mays
ccctaatcgagcgcgaaaggaacggaacggcgcagccgcggcggcggcggcggctcatgtaagctccccaccagcgaccagtggacacgtatatccatctcccctcgcacagtcgcaactcgcacgcatccgtcctcggcctcgttccgtccgccagcaatgccgctggcgctcgcgcaactgcaggacttgcgggaccgcatctccgaccgcctccgcccatggagccgctccgcgcagttctgggtccgcgccgcggacatctacaccagctacaaggtgtgccagctgcgcgcggggttcgtgaaggacgaggacgagctagagaccatgtgggagcggcagcacgagctcggcgcggagaagatgtactccctctgctccgagctcggcggtctcttcctcaaggctgctcaaattctgggaaaacctgacctggcaccgatggcttgggtgaagagacttgttacgctgtgtgatcaagccccatccacgccatttgatgtggttagagatgttgtggagaaacagttggggaagaacttcgatgacatgtttgaattcttcgatgtcgagcctgttgggtctgcttctattgcacaggtgcatcgagcaaggcttaaattatcaaagacagacgttgctgtcaaggttcaacatccaggagccgaacaactgatgatggttgatattcggaatatgcaagcaatggccttgtttttgcagaagcatgacctcaactttgatctattctctgccaccaaagagatggaaaaacagatatgttatgagtttgactttgtgcgtgaagcaagagcaatggaaagaatacgagaatttctacgtgtcactaataagaaacctccggttatggtgcctcgtgtgattcctgggatggttagcagttttgataatggaatttatcaaggggaccccaataatgaatcttggcaatgaaatggctaaaaggggcatagatcctggtggtaagattgcagcaatggcaaagcagaagattttgtcagatcttactcttgcatatggtcaaatgatcttgaaggatggctttttccatgcagatccacacccaggaaacatccttatctgcaaggacacagaggtggctttacttgattatggacaagtgaaagaaatgccagaagatttacggctggcttatgcaaatcttgtagttgcaatggccgatgatgatttctcgagggctgaggaaagtttcagggagctgggtatccgaacatgggccataactgataacaaactagaagaattgtttcagttatccctgcgaatgttcgatacaagattaccaccaggtgtaactgttatgtcaccttttgccgatgattcttcgcttaacaaaattggagtggagagcttcccggaggagctattttcagtgcttcgaacaatccagcttttgcgagggttgactgtgggcatgggccttacattctcgtgcgcccagcattggagaccgatagctgaggaggcgttgttaaaagctggaagacaaagcgcttcaaaatcaagaaaacagaagaggagttttctgaggagattgttttggtgaagtaggcatttagccgcatagcgaacatcaaaggacatggtatacgaacattctgtgatgaaacggaagtagccaaaagctcgagccttcgatttttagacagtacatctgtccatattcgtttaccttgggtgcgtgttattttatatatttgctcattcctttatcactatgtgttttttgggattcagtatatagttgggattgtatcggaagctgacatgtacacaagtgacatggaccaattcaaaggaaatcatcgtggtatgtgggggtttgttctgtggactttttttgtttctgatgtga

SEQ ID NO: 10532 - DNA, 1453 bp, Zea Mays
atcattcagacaccgacgcaaggaataagaccgcggcgcgccatcgttgccaagcctcaacacacccacacgaggcagctccgattcttcaccacgagcaaagatccacaacgtcgaactccgggagcgagcagacgcctaaagcgacaaaggcccggacaccatcgagccaagcggagtgacgaagagcctccacaacacggacaccattgagccaagcggagcgacgaagagcctccacaacacgaacgaacacacaaactgcaggtcttctgggccgcacctagcagagcagtgtagatcgccagcaccaagaagaaagctgaaaggtcagccacgccgatgtcaccccgccaagccatcgcgtgttgtcaccttctgccgtccaccgacgcaccaacccaccagccccaaccctcagagccccaacgccggtcgagcaccagcgagagacctaagaaggccaaggcgagggttcccgcatggggcgagaggtccaaagacggcaccctcgatagggtaggggtggcgcccgcgggcgtcaccgctgtccgcctgcaagcgagcatggctttcgtcgcaggacctcccaccacacgccgcaacgcacggagccagccggccctgcccacaccacaggccgaaacgagaggcggagagataaatctagccggagaggctcaagatccggcccccagccccacgaccatgacccaccacctgcagaaggcaccgctggcagccgcagatccaccaacgcccccgatccaagcaccacgctacaagcacaagcgagccacgccgccgccgcagcgggccggccgcgtgcgtgggcgccaacgtcgccggccagccacggccatggccacgcgagcgcgggcactaccgccacgggctagccgcacgagccaccatggttgcggccacaaggccacctgcccatgccagcagggaggagcggcggacggcgaccagcccctagatccggccagtcagcccgccgatccggccttcccagcggcggatcaggtcgccggccacctccaggaagagggaggagtggagtgggtggaagaagggagggaaatgagtgagagagcagtcccgccgccgccctcctcgctgctcgtcgaacttccggcgagctgctccggcgacggcgggggtgaagaccggcggcggtgggtgcggtcgatggggagccgcccgtgtcgcccagaggaggatgacgtcagagcaggaaagaaattaggctactactgcgaatttttagagcacagtatttccatgaacaccgaagttaaatccgtccttttaagataatatgctatgcagcaggtgatcagcacaagatccatatttatgaatctgagggaacacaaagacaaatgatatttaggtggaactagggacacctcatcatctgatgtttgtgatctacatgtattccctt

SEQ ID NO: 10533 - DNA, 1474 bp, Zea Mays
acgctgcctccgcgccacacagaaaggaaaaagtatctctctctcccgcgcgcgcgggtgagccggggaccctcctacgtctcgccaccctgctggtatagcccgccggtcgtccacgccatggccacccaatatgcgcggctctccctgccatgccgcctgccctcgccgctccctccgccggtgccgacgacgacccgccggctgccgcgcgccgcggcggcggcggcgtccacctccccgcggtgcccacgcgtcgggggcgcggcggccacgcgcgcccgcggcccgtgccggcctcgcgcctccgagggcgaagtgcagcagcaggaggcggaagcggaccaggtggtggacagcaacatgctgccctactgcagcatcaaccgcaaggagaagaagagcatcggggagatggagcaggagttcctccaggcgatgcaggccttctactacgaaggcaaggcgatcatgtcgaacgaggagttcgacaacctcaaggaggagctcatgtgggaagggagcagcgtcgtgatgctaagcccagatgagcagaagcttttggaagccgccatggcgtatgtctcgggcaaccccatcatgacggatgatgaattcgatcaactaaagctgagactaaagaaagaaggaagcgacattgtacaggaaggtccaagatgcagcctacggagtcgaaaggtctacagtgacttgactgttgactacttgaagatgttgctcctaaatgttcccgcagctgttgtagctctggcactattcttctttttggatgatttcacgggatttgaaatcacatatcttcttgagttgccggagcctttcagtttcatcttcacatggttcgccgcactgcctttaatattttgggtagcgcaggcgatcactaatgtcatagtgaaggacttcctgatcttgaagggtccgtgtccaaactgcgggaatgaaaacctctccttcttcggtaccatactgtcagtgcctagcggtggctcaaaaaacagcgtgaaatgtgcaagttgtggcactgagttggagtacgactcttcaacccgattgatcacactcccagaaccggctgaggctaaataagtgatggcgtggtttcggaaagacggcccggccggcccgcagattcttgatcgacgacagtacgaagcaagactgttcttggatcgggtggcaatcgtggagtgatgtatgtttgctgtgctagtctgtgtgtatatatatttgaacaagtttagacacctgtattatatagatctaatgaaatgggtatatgtatgtgcatagagtgtacaaagaaaaatttaataagccgagttattgtatgttttttctcctcctatatattgctgttacctagtcggctactacaaacaatgagggataaacaagcaaataaacaacgatttctcgatggaaacccacattttttgtgtgtgtgcaaata

SEQ ID NO: 10534 - DNA, 3654 bp, Zea Mays
caagattgtagcgttagtatggactatatgttagtgtgaaatacatccgacgtggttttatgataatttcttgttaaaagtcacagaaaagttaaaaaagtcagtggagaaaagaagaaaatgatttagcggcagggcagctggtgatcagatctccaccgtcctcgacttgtcgtcgtcgccccctctctcgatctctcaaattgacaaaatattgaactcctttccagcctctcctctccccaatcaccgacaccgcgcgcgagatcgcaagcgtccacaccgtgaccaccggcgccgctgcggcgtccggagcaggcggcgagcgtcgtccacagggtaggctcggctcgctgaggcggacgagatgagcgggcacgactccaagtacttctctaccaccaagaagggggagatccccgagctcaaggaggagctcaactcccagtataaggacaagagaaaagatgctgtcaagaaagtgattgctgctatgactgtaggaaaggatgtctcatcattgttcactgatgttgtgaactgcatgcagactgagaacttggagctcaagaaactagtatatttgtatctcatcaactatgctaaaagtcaacctgatcttgccattcttgctgtgaacacatttgttaaggtaagaaagtctagccatatttgcaattatcacatttgttaaggtaagaaagtctagccatacttgcaattatcatttgtgcagaaaaagatgattactgtatgcaaaatatagggttgtatttatatctaacggtccaagagacctgcttgcacctaatggctgcttgcatagtagtcgttgccaaatataagaactatagatataatcagaggcatgaatattctgcaggattcacaagacccaaacccattgattcgtgctttggctgttaggacaatgggttgtatccgcgtggacaaaatcacagagtatctctgtgatccacttcaaagatgcctcaaggatgacgatccgtatgtacggaagactgcagctatttgcgttgctaaactttatgatataaacgctgagctagtagaggacagaggatttctggaggcccttaaggacttaatatctgacaataatcctatggttgttgcaaatgctgttgctgctctggcagagattcaagatagtagtgttcagccaatctttgaaatcaccagccatacactgtcaaagcttctgacagctttgaatgaatgcacagagtggggccaagttttcattttggattctttgtcaagatataaagcagcagatgccagggaagctgaaaacatagtggaacgagttacaccccgtctccaacatgcaaattgtgcggttgttctttctgctgtcaagataatccttctacaaatggagctcattacgagcacggatgtagtcaggaatctctgcaagaaaatggctccccctcttgttactcttttgtcagcagagcctgaaattcagtatgtagccttgaggaacattaatctgatagttcaaaagaggcctacaatactcgctcatgagattaaggttttcttttgcaagtacaatgaccctatatatgttaagatggaaaagctggagattatgataaagcttgcctcagatcgaaatatagatcaggtgctcttggaattcaaggagtatgccacagaggttgatgttgattttgtgcggaaagctgttcgtgcgattgggagatgtgcaattaaattggagagagctgctgaaaggtgcatcagcgttttgctcgagctgattaagataaaagttaattatgttgttcaggaagctataattgttatcaaagacatcttcagacgctaccctaatacgtatgagtctatcattgctacactttgtgaaagtctggacactttagatgaaccagaggctaaggcatccatgatttggataattggagaatatgctgaaagaattgacaatgcagatgaacttcttgagagcttcttggaaacattccctgaagaaccagcattagttcaactgcagctgctaaccgctactgttaaattgtttcttaagaagccaacagaggggccacaacagatgattcaggctgttctcaataatgcaacagttgaaacagataatcctgatttgagggacagagcttacatatattggcgacttctgtctactgatcctgaggctgcgaaagatgttgttttggcggagaaacctgtgatcagtgatgactccaaccagcttgactcatcacttcttgatgagctgctagcaaacatttctaccctttcatcagtttatcataagcccccagaatcatttgtcagccgtgttaaggctgctcctagggccgatgatgaagagtttgctgatacagctgaaacagggtactcggagtccccatcccagggtgttgatggggcatcaccttcatctagtgctggtacttcttctaatgtacccgtgaagcagctggcggttgcatccccacctgcaatgccagaccttttaggtgatttgatgggtatagataatgctattgttcctgttgatgaacctgcagcaccttccggccctccactacctgtcttactgccttcgactacaggtcaaggactgcaaattagtgcacaactaacacggcgtgatggccagatatactatgacatatcttttgagaatggcacccaaggtgtcctagatggatttatgattcagtttaacaagaacacatttggtcttgctgctggtgaagcacttcaggttactccactgcaaccaggccaatcaacaaggacacttttacaaatgaccccgttccagaatatcagccctggtgcaccaaactcgctactacaggttgctgtgaaaaataatcagcagccagtgtggtacttcaatgacaaaattccgctgcatgttttctttggtgaagatggaaaaatggaacgagctggttttcttgaggcctggaaatctttgcctgatgacaatgaatttacaaaagaattcccgggctctgtcatcagcagcatagatgctactgttgagcgcctcgtagcatcaaatgtgttcttcatagccaagcggaaaaatgcgaacatggatgttctgtatctctccgcgaagatgccccgtggaatccccttccttatagaggttacagccgtggttggtgttcctggtgtgaagtgtgcagtcaaaacaccaaatagggagatggttcctctcttctttgaagctatggaggctctcaccaagtgacgacaaacttaatggatctggatcggtggttctacaaaaaaaataccagtcgatgagctgctataggtgtttggacgtggcattttatttttcacggaagctggtgtgaattgtagtttttttggtattagattacagtatttaaactgctagtttcctggttccaaagttttttcaccagaaatactggaggtgttcatgccttgcatgatttgtacatcttaccatgttgtatgaagcgatgaaattgtaggtgacgaaaaagtagaataagcatagattaactggtacgattgtggattgttattaatttccctgcaacccaatcactattttaatggtgatgtatctatatttttcaaatggac

SEQ ID NO: 10535 - DNA, 3383 bp, Zea Mays
tgagagggccgggcagggttcttctgcgcgcgcggcgttaggccacttctcgtcgcagaaactatgtattgtagttgtaggtatagtttatataaattaatataatagaaatagaaaccatgtgtgtgtgtggttttcagcaccgtggctcttagcttctcgtgtcctggccgtaagcattccgtgcgatgcctccgctgtccggccgtcgtggtctcgtcacgcacgcacacgtacacacacctcgcttgatatgatgcccgtgtgctctcaggtctcaaacaacgctgtccgtctctccggcgcggaggggataaaagtctcggcgtgaactcctggccagtcttttgctgctgccatatccgcgcgcactgccggccggccagccagccagccagcgcgcgcgtgtcgcggcggagctagagggctaggtagcagagtggtggccagtgccgcgggttgcgttgggatggcggcgcttgtggcgctgacgctggcgctggcgctgacggcggcagtgacagcgacggcgaaggagtgcaccaacatcccgacggagctgtcgtcgcacacggtgcgggcgcggctgcaggcggcgccgggcggagcggcggagtggcggtggcgcgagctgttccacgagcacctcaaccccaccgacgaggccgcgtggatggacctcatgccgccgcctggcgccgcggctgcggcgcaacaccagcagcaccaccgccaggaggagctcgactgggtgatgctctaccggtcgctcaagggccagcagcagcagcagccggtggggggcggcaccgccgcagccgggagtacgccgttcctggaggaggtgtccctgcacgacgtgcgcctggaccccgacggcgacgtggcgtacgggcgcgcgcagcagacgaacctcgagtacctgctgctgctggacgtggaccgcctcgtctggagcttccgctcccaggcggggctgccggcgcccggaaccccctacggcggctgggagaagcctgacagcgagctcaggggccacttcgtcggtcactacctgagcgcgacggccaagatgtgggcgagcacgcacaacggcacgctcgccggcaggatgtcggcggtggtggacgcgctcgacgagtgccagcgcgccggcggcacgggctacctctccgccttccccgccgagttcttcgaccgcttcgaggccatcaagcccgtctgggcgccctactacaccatccacaagatcatgcagggcctcctcgaccagcacgtggtggccggcaacggcaaggcgctgcggatgttggtcgccatggccgactacttcgccggccgggtcaggaacgtcatccagaggtacagcatcgagcgccactggacgtcgctcaacgaggagaccggagggatgaacgacgtgctctaccagctctacaccatcacgcacgaccagaggcatctggtgctggcccatctattcgacaagccatgcttcctgggtttgcttgcggtgcaggctgacagcctttcgaatttccatgccaacacccatattccggttgtaattggcgggcagatgagatatgaagttacaggtgatcctctttataaggaaattgcgacgttcttcatggacacagtgaactcctctcacgcatacgcgactggtggtacatctgtcagtgaattctggtccaatccaaagcgattagctgaagctctgaccactgagactgaggagtcctgcacaacttacaatatgctcaaggtttcgcgccatctgttcagatggacgaaggagatcgcgtacgcggactactacgagcgagcgctgatcaacggcgtgctgagcatccagaggggcagggaccccggagtgatgatctacatgctgccccagggccccgggagatccaaggcgaagagctaccatggctggggaactcagtacgaatcgttctggtgctgctatggcactgggatagaatcgttctccaagctgggagattccatttacttcgaggagagaggtgagaggccggcactgtatgttgttcagttcataccgagcacgttcagctggagaactgcaggccttactgtcgcacagcagctgatgcccctcagctcgtcggatcagtaccttcaggtctcgttctccgtatctgccaagacgacaaacggtcagtttgcgacgttgaacgtgagaataccatcgtggacatctttgaatggcgcaaaggcaacactgaatggcaagcatctggaattagcatctccagcaagcagtggggcagcggtgatcagttgtcactccagttacctatccacctaaggactgaagcaataaaagatgaccggccggagtacgcgtctatacaagcagtcctgttcgggccgttcctcctcgccggcctcaccaccggagactgggacgccaagaccggcgccgccgacgccgcagcctccgactggatcacccccgtccctgtggagtccaactcccagctggtgacgctggcgcaggagtccggcggcgaggccttcgtcctctccgccctgaacgggtccttgacgatgctgcagcggcccaaagacggcggcggcaccgaggccgccgtgcacgcgacgttcaggctcgtcccgcagggaggcgccggcgcgggcgccgccgcgatgctcgagccgctggacatgccggggatggtggtcacggacaggctcacggtggccgcggagaagagctcgggcgccgcgttcaacgtcgtgccggggctcgccggtgcgcccggctcggtgtcgctcgagctcgcgtccaggccggggtgcttcttggtcggcggcggcgagaaggtgcaggtgggctgtgccggtggtgcccagcagaagcgcggcgacggcgcctggttccggcggtcggccagcttcgcgcggggcgagccgctgcggcggtaccaccccatgagcttcgctgccaggggcgtgaggaggagcttcctcctggagccattgttcaccttgagggacgagttctacaccgtctacttcaaccttgtagcgtgacagacgggagatgacgacgagacctgcaggtcgaggactcgaggttgatgttgcttcggcctctggtaaccaaggggggaaaatgttgagttggaggtggagtgtcggacagttatgtttagagaaaagagaatgattttcccatattcaccgaatgatccgcggccgcctatttctgcttcaaccattcatcatcgtcgccataattctaaccacttcttgggtccctcctccagcttgctgcgtccaagcacagtttatttgccagtttctaaatctatactatatttaaagcaccagtttcaacggtcgtcatg

SEQ ID NO: 10536 - DNA, 3385 bp, Zea Mays
tgagagggccgggcagggttcttctgcgcgcgcggcgttaggccacttctcgtcgcagaaactatgtattgtagttgtaggtatagtttatataaattaatataatagaaatagaaaccatgtgtgtgtgtggttttcagcaccgtggctcttagcttctcgtgtcctggccgtaagcattccgtgcgatgcctccgctgtccggccgtcgtggtctcgtcacgcacgcacacgtacacacacctcgcttgatatgatgcccgtgtgctctcaggtctcaaacaacgctgtccgtctctccggcgcggaggggataaaagtctcggcgtgaactcctggccagtcttttgctgctgccatatccgcgcgcactgccggccggccagccagccagccagcgcgcgcgtgtcgcggcggagctagagggctaggtagcagagtggtggccagtgccgcgggttgcgttgggatggcggcgcttgtggcgctgacgctggcgctggcgctgacggcggcagtgacagcgacggcgaaggagtgcaccaacatcccgacggagctgtcgtcgcacacggtgcgggcgcggctgcaggcggcgccgggcggagcggcggagtggcggtggcgcgagctgttccacgagcacctcaaccccaccgacgaggccgcgtggatggacctcatgccgccgcctggcgccgcggctgcggcgcaacaccagcagcaccaccgccaggaggagctcgactgggtgatgctctaccggtcgctcaagggccagcagcagcagcagccggtggggggcggcaccgccgcagccgggagtacgccgttcctggaggaggtgtccctgcacgacgtgcgcctggaccccgacggcgacgtggcgtacgggcgcgcgcagcagacgaacctcgagtacctgctgctgctggacgtggaccgcctcgtctggagcttccgctcccaggcggggctgccggcgcccggaaccccctacggcggctgggagaagcctgacagcgagctcaggggccacttcgtcggtcactacctgagcgcgacggccaagatgtgggcgagcacgcacaacggcacgctcgccggcaggatgtcggcggtggtggacgcgctcgacgagtgccagcgcgccggcggcacgggctacctctccgccttccccgccgagttcttcgaccgcttcgaggccatcaagcccgtctgggcgccctactacaccatccacaagatcatgcagggcctcctcgaccagcacgtggtggccggcaacggcaaggcgctgcggatgttggtcgccatggccgactacttcgccggccgggtcaggaacgtcatccagaggtacagcatcgagcgccactggacgtcgctcaacgaggagaccggagggatgaacgacgtgctctaccagctctacaccatcacgcacgaccagaggcatctggtgctggcccatctattcgacaagccatgcttcctgggtttgcttgcggtgcaggctgacagcctttcgaatttccatgccaacacccatattccggttgtaattggcgggcagatgagatatgaagttacaggaaattgcgacgttcttcatggacacagtgaactcctctcacgcatacgcgactggtggtacatctgtcagtgaattctggtccaatccaaagcgattagctgaagctctgaccactgagactgaggagtcctgcacaacttacaatatgctcaaggtttcgcgccatctgttcagatggacgaaggagatcgcgtacgcggactactacgagcgagcgctgatcaacggcgtgctgagcatccagaggggcagggaccccggagtgatgatctacatgctgccccagggccccgggagatccaaggcgaagagctaccatggctggggaactcagtacgaatcgttctggtgctgctatggcactgggatagaatcgttctccaagctgggagattccatttacttcgaggagagaggtgagaggccggcactgtatgttgttcagttcataccgagcacgttcagctggagaactgcaggccttactgtcgcacagcagctgatgcccctcagctcgtcggatcagtaccttcaggtctcgttctccgtatctgccaagacgacaaacggtcagtttgcgacgttgaacgtgagaataccatcgtggacatctttgaatggcgcaaaggcaacactgaatggcaagcatctggaattagcatctccagggacatttctcactatcagcaagcagtggggcagcggtgatcagttgtcactccagttacctatccacctaaggactgaagcaataaaagatgaccggccggagtacgcgtctatacaagcagtcctgttcgggccgttcctcctcgccggcctcaccaccggagactgggacgccaagaccggcgccgccgacgccgcagcctccgactggatcacccccgtccctgtggagtccaactcccagctggtgacgctggcgcaggagtccggcggcgaggccttcgtcctctccgccctgaacgggtccttgacgatgctgcagcggcccaaagacggcggcggcaccgaggccgccgtgcacgcgacgttcaggctcgtcccgcagggaggcgccggcgcgggcgccgccgcgatgctcgagccgctggacatgccggggatggtggtcacggacaggctcacggtggccgcggagaagagctcgggcgccgcgttcaacgtcgtgccggggctcgccggtgcgcccggctcggtgtcgctcgagctcgcgtccaggccggggtgcttcttggtcggcggcggcgagaaggtgcaggtgggctgtgccggtggtgcccagcagaagcgcggcgacggcgcctggttccggcggtcggccagcttcgcgcggggcgagccgctgcggcggtaccaccccatgagcttcgctgccaggggcgtgaggaggagcttcctcctggagccattgttcaccttgagggacgagttctacaccgtctacttcaaccttgtagcgtgacagacgggagatgacgacgagacctgcaggtcgaggactcgaggttgatgttgcttcggcctctggtaaccaaggggggaaaatgttgagttggaggtggagtgtcggacagttatgtttagagaaaagagaatgattttcccatattcaccgaatgatccgcggccgcctatttctgcttcaaccattcatcatcgtcgccataattctaaccacttcttgggtccctcctccagcttgctgcgtccaagcacagtttatttgccagtttctaaatctatactatatttaaagcaccagtttcaacggtcgtcatg

SEQ ID NO: 10537 - DNA, 4516 bp, Zea Mays
gttagaggaaggagacgacaaaccttcattctaatggttggttgctccaggtggtgtccggaagggcttagcatgcacttgaagaccaggcagctgttctctactcaaggaagagatggcccatgtttcgttcaaaagcaaagatgtggacagcggcatgtcccggtggtctgaatacctaagtgttgaagagccaattccttccgcaatggcaacctggaggaacatgagcgctgatgcgccgcaaggctcttctgctggtagccacaaacatcttcagatggagccggtggttcagctgtccaaggttgcggaaggcttgctggccaaaatgtaccggctgaacagcatcctggactatccagatccaaacacgcacacattctcggatgcattttggaaagctggtgtctttccaaatttccccaaaatttgcatcacgatgtcaaaaaaatttccggaacatcctaacaagctgcagctagaaagggtagataagtttggtcttgatgctttaaacgagaatgctgaaggttacatgcacaatcttgagcagtggatcctgttgcttcttgatttgctggcatttcgtgaacaagctttgcgacttattttggatttgagcagcacggtcataacattgctgccacaccaaaactctttaattcttcatgcttttatggatctgttttgttcatttgtccgagtgaatcttttctctgacaagatgccaagaaagatgatcctccaggtttataacatcttgcacataatgctaaagggtggtcgtgattgtgagttttatcaccgactggttcagtttgtggactcttatgatccacctatcaaggggttgcatgaagatcttaattttgtgagcccaagaattggagaggtcctggaagctgttggcccaattatatttctttcaactgatacaaaaaagttaaggaacgaaggtttcctcagtccatttcatccacgttatccagacatcctaacaaattctgcccatccaatgagggcccaagacttggctaatgtcacatcataccgtgagtgggttcttctaggatatcttgtttgtcctgatgaactacttagggtgaccagtatagatgttgccatggttgttctgaaagagaacttaatacttcctctgttcagagatgagtacatcttacttcatgaaaattatcaactttatgttcttccaaaagttctagaatcgaagagaatggctaaatctggccgaactaagcaaaaggaagctgatctggagtacaatgttgcaaagcaggttgagagaatgttaacggaagtgcatgagcaagcactggtgtcatgtgatgctatgcatcgtgagaggagaattcttcttaagcaggaaattggaaggatggttttatttttcactgatcaacctagcctcctagcacctaatattcagatggttttttctgctcttgctttgtctcaatgcgaggtgatttggtacttccaacatgtggggattgcatcatcaaaatctactcggttgaaaactgttgacattgatgcgacagacccaactattggtttcttactagatggaataggcaaactttgttgcctggttcgtaaatacatagcagcaataaaaggttatgccttatcatatttgttatccagtgctggaagaatacggttcttacttggtactccaggaatggttgctcttgacctagatgcgacactgaaaggcctttttcagcaagtcctccattgtctggagaacattccaaaacctcagggggaaagtgttcctgacattaccgctgacttggctgatttgcgtaagcactggctgtcaatcttgatgatagtcacatcttcacgatcctcgataaacattaagcacttggagaaggctactgtgtctactgggaaggagggtttggtgtcagaaggcaatgctgcatataattggtcaagatgtgttgatgaacttgagagccaactctccaaacatggaagccttaaaaaactctacttttatcatcagcatcttaccacggtcttcagaaatacaatgtttggcccagaaggtcgtccacagcattgttgtgcttggcttggagccgcttgcagttttccagaatgtgcttctgcaattattcctgaagaggttaacaaaattggcagagattctatctcttatgtggagtcccttatcgagtctatcatgggtgggttggaaggtttgataaatattctagattcagaaggtggatttggctcattagagatgcagctttccccagagcaagcagctcttcgcttaaataacacaagagcaaagggtgtttcaagcttgttaactccaggatatgagagctatcctgataacagttcatcaattaagatgctggaagctgctatgcaaaggctgacaagtttgtgttctgttctaaatgacatggagcctattggtgttctcaaccatgtttttgttctacgcgagtacatgagagactgcatcataggaaatttcaggagaagatttcatagtatgattagaactgagaactgcattcagcgaccatcaatcatagaatctcttctaagaagacatctgggcatcatccatctagcagagcagcatattagtatggaccttactgaaggcatacgtgaagtgctgctagctgagagttatactggtccatttcccaatcttcaaatgtttgagactccagtggggacacaaggaggggggtctgccgttgagatgatatgcaactggtatattgagaatgtagtaaaggacgcttctcgcattggagttgcttttgatgcaatccaaaattgcttcaggagctcacagcctattggtggtggatgtttggctgaatcatttacagataaaagagaaatgaaatcacttgttcgtctttttggtggctatggaatagataaaatggataagatgctaagggagcatacgtctgcgcttttaaactgtatcgattcagcattgaggtcaaatcgtgatgccttagagggcctagctggaactgtaaattccggcgataggattgaaagggatgtgaacctgaaacaaattattgacctcgaaacactggctgacctctgtattcaagcagggcaggcaataactttccgtcggctgttggttgaggccgtcggagcagtccttgaagagaaagtgcctctgatatattctctgctcaaaggattagccttgcagttgccagacgaggtacctgataaaaatgagataattagattgagaaaggttgcgagcagtgttggtgttggcgacaaacatgatgctgagtgggtacactctattctggcagacgctggtgcagctaatgataattcttggatcctacttccatacctttgtgctgcattcatggtgtccaacatttggaacggtgctgtttatgatgtcaatataggtggactcagtaacaatttgcactgcctagcaaggtgtgtaagtgctgtgattgggggaagcgaatacactcgggtcgaaagggagcagcgaataaattctctttcaaatgtgcatacagatgagctgcaagaggccgagttaccgagccgtgtctcagcagaagcaaatatcaaatcttgtatgcagatctacgtcaaactgtctgcagggatcgtcctggattcatggaacgacacaagcaggcagcacatcgtcccgaagctgacattcctggaccagctctgcgagctgtccccgtacgtgccaaggagcaccttagaagctcacatcccatacaccatcctgcgctcgatataccaccagctgtacggaggctctctgctggcctcggaaccggcggagcagtccccaaggcagtcgcctctcatctctctggcacacgcgtccccgtccgcaaggcagatgcagaaccgaccagagacaacacccaggtcccacaccttcgacccaggctactacagctcgtcggggtcccagcacgacgatggctacgacgcggataggaggaccggacggctgctgcggagcttgaggcgctctggaccgctcgacttcggtgcgagcagaaaggcgaagaagttcgtcgagggctccagctccgggagcagccatggagctggctcgctgcagaggttcgcagtgtccagatctggccctctatcgtacagatagggccgcatgtaatgtaaactctagagagcagtagatcttcctatgcgtgctggtttacgtagctagcagtagcaacagcagcagctagttgtgctgtaagtaaaacccattaattgcttaatttgtgttgactgtcgttaggcaagtgatttgaattagctgttgctcgtttggtttgtgtatcaacaatacaattgttcgttgatttttcttgatagcaaagtaaagtaaaccaaccttctcttgaaagaaagaaatagagagaaagattagacggaggccgattaagcagagatgaattggttctgagtgtag

SEQ ID NO: 10538 - DNA, 4725 bp, Zea Mays
cgcagcgtcacgagagagggggtggggcgcttgccagtaaattgcgtaggcgtaacgacgaatccggcactcgcaaccaccgcatccgtcctcgtctggtccggttgcctactcccctcccactgccccgctgctgctgcctccccgcgcaatggcgccgagatccccgcgctgagcgagcctcccgggggtcgacctccgaaccggcgctgccgtcccgcagtgcacttgaagaccaggcagctgttctctactcaaggaagagatggcccatgtttcgttcaaaagcaaagatgtggacagcggcatgtcccggtggtctgaatacctaagtgttgaagagccaattccttccgcaatggcaacctggaggaacatgagcgctgatgcgccgcaaggctcttctgctggtagccacaaacatcttcagatggagccggtggttcagctgtccaaggttgcggaaggcttgctggccaaaatgtaccggctgaacagcatcctggactatccagatccaaacacgcacacattctcggatgcattttggaaagctggtgtctttccaaatttccccaaaatttgcatcacgatgtcaaaaaaatttccggaacatcctaacaagctgcagctagaaagggtagataagtttggtcttgatgctttaaacgagaatgctgaaggttacatgcacaatcttgagcagtggatcctgttgcttcttgatttgctggcatttcgtgaacaagctttgcgacttattttggatttgagcagcacggtcataacattgctgccacaccaaaactctttaattcttcatgcttttatggatctgttttgttcatttgtccgagtgaatcttttctctgacaagatgccaagaaagatgatcctccaggtttataacatcttgcacataatgctaaagggtggtcgtgattgtgagttttatcaccgactggttcagtttgtggactcttatgatccacctatcaaggggttgcatgaagatcttaattttgtgagcccaagaattggagaggtcctggaagctgttggcccaattatatttctttcaactgatacaaaaaagttaaggaacgaaggtttcctcagtccatttcatccacgttatccagacatcctaacaaattctgcccatccaatgagggcccaagacttggctaatgtcacatcataccgtgagtgggttcttctaggatatcttgtttgtcctgatgaactacttagggtgaccagtatagatgttgccatggttgttctgaaagagaacttaatacttcctctgttcagagatgagtacatcttacttcatgaaaattatcaactttatgttcttccaaaagttctagaatcgaagagaatggctaaatctggccgaactaagcaaaaggaagctgatctggagtacaatgttgcaaagcagggaagtgcatgagcaagcactggtgtcatgtgatgctatgcatcgtgagaggagaattcttcttaagcaggaaattggaaggatggttttatttttcactgatcaacctagcctcctagcacctaatattcagatggttttttctgctcttgctttgtctcaatgcgaggtgatttggtacttccaacatgtggggattgcatcatcaaaatctactcggttgaaaactgttgacattgatgcgacagacccaactattggtttcttactagatggaataggcaaactttgttgcctggttcgtaaatacatagcagcaataaaaggttatgccttatcatatttgttatccagtgctggaagaatacggttcttacttggtactccaggaatggttgctcttgacctagatgcgacactgaaaggcctttttcagcaagtcctccattgtctggagaacattccaaaacctcagggggaaagtgttcctgacattaccgctgacttggctgatttgcgtaagcactggctgtcaatcttgatgatagtcacatcttcacgatcctcgataaacattaagcacttggagaaggctactgtgtctactgggaaggagggtttggtgtcagaaggcaatgctgcatataattggtcaagatgtgttgatgaacttgagagccaactctccaaacatggaagccttaaaaaactctacttttatcatcagcatcttaccacggtcttcagaaatacaatgtttggcccagaaggtcgtccacagcattgttgtgcttggcttggagccgcttgcagttttccagaatgtgcttctgcaattattcctgaagaggttaacaaaattggcagagattctatctcttatgtggagtcccttatcgagtctatcatgggtgggttggaaggtttgataaatattctagattcagaaggtggatttggctcattagagatgcagctttccccagagcaagcagctcttcgcttaaataacacaagagcaaagggtgtttcaagcttgttaactccaggatatgagagctatcctgataacagttcatcaattaagatgctggaagctgctatgcaaaggctgacaagtttgtgttctgttctaaatgacatggagcctattggtgttctcaaccatgtttttgttctacgcgagtacatgagagactgcatcataggaaatttcaggagaagatttcatagtatgattagaactgagaactgcattcagcgaccatcaatcatagaatctcttctaagaagacatctgggcatcatccatctagcagagcagcatattagtatggaccttactgaaggcatacgtgaagtgctgctagctgagagttatactggtccatttcccaatcttcaaatgtttgagactccagtggggacacaaggaggggggtctgccgttgagatgatatgcaactggtatattgagaatgtagtaaaggacgcttctcgcattggagttgcttttgatgcaatccaaaattgcttcaggagctcacagcctattggtggtggatgtttggctgaatcatttacagataaaagagaaatgaaatcacttgttcgtctttttggtggctatggaatagataaaatggataagatgctaagggagcatacgtctgcgcttttaaactgtatcgattcagcattgaggtcaaatcgtgatgccttagagggcctagctggaactgtaaattccggcgataggattgaaagggatgtgaacctgaaacaaattattgacctcgaaacactggctgacctctgtattcaagcagggcaggcaataactttccgtcggctgttggttgaggccgtcggagcagtccttgaagagaaagtgcctctgatatattctctgctcaaaggattagccttgcagttgccagacgaggtacctgataaaaatgagataattagattgagaaaggttgcgagcagtgttggtgttggcgacaaacatgatgctgagtgggtacactctattctggcagacgctggtgcagctaatgataattcttggatcctacttccatacctttgtgctgcattcatggtgtccaacatttggaacggtgctgtttatgatgtcaatataggtggactcagtaacaatttgcactgcctagcaaggtatggactgactctatgtttgatgtcaaaaatcgttagttgtgggtatgtaagtgctgtgattgtatttgtgcaggtgtgtaagtgctgtgattgggggaagcgaatacactcgggtcgaaagggagcagcgaataaattctctttcaaatgtgcatacagatgagctgcaagaggccgagttaccgagccgtgtctcagcagaagcaaatatcaaatcttgtatgcagatctacgtcaaactgtctgcagggatcgtcctggattcatggaacgacacaagcaggcagcacatcgtcccgaagctgacattcctggaccagctctgcgagctgtccccgtacgtgccaaggagcaccttagaagctcacatcccatacaccatcctgcgctcgatataccaccagctgtacggaggctctctgctggcctcggaaccggcggagcagtccccaaggcagtcgcctctcatctctctggcacacgcgtccccgtccgcaaggcagatgcagaaccgaccagagacaacacccaggtcccacaccttcgacccaggctactacagctcgtcggggtcccagcacgacgatggctacgacgcggataggaggaccggacggctgctgcggagcttgaggcgctctggaccgctcgacttcggtgcgagcagaaaggcgaagaagttcgtcgagggctccagctccgggagcagccatggagctggctcgctgcagaggttcgcagtgtccagatctggccctctatcgtacagatagggccgcatgtaatgtaaactctagagagcagtagatcttcctatgcgtgctggtttacgtagctagcagtagcaacagcagcagctagttgtgctgtaagtaaaacccattaattgcttaatttgtgttgactgtcgttaggcaagtgatttgaattagctgttgctcgtttggtttgtgtatcaacaatacaattgttcgttgatttttcttgatagcaaagtaaagtaaaccaaccttctcttgaaagaaagaaatagagagaaagattagacggaggccgattaagcagagatgaattggttctgagtgtag

SEQ ID NO: 10539 - DNA, 1462 bp, Zea Mays
tccatgactgttctggaagctccaagcgttggcgaaaaaagtaagatatttctgcgaggcaaggaatccctcccccgcttctactctttcggttcgccggttcgccgtctcgcacacccacttcctacaccgccaccgagcactcgctcagtttcatacccatcctcgaagtcgcctctgtctagttcctgctcttccaccaccgcctgtgatgtatccccgaggcccggatgggggacgagatgcctcgtctcgccctatgcttgccactcccgccggcaacgacacgcgcgaggaggatgagatcaccaccgcggaggctcatgtggagaaagacgccgcgcggatggacgctgccctcctcatgcggactacgcccaagatggacgagtttcacaccgggggcgatctggactcaagtggaagtggaagcggcatctcggggccaagcgcctccaaaagacagctacaaagaaggggatcgtggcggcaacgagtcagcaggtccagcatccatgcttatccttttcctttgtgtttctatttgatctgtttttttgcccgcgccagcaacagagaagaatgtggtcgtggctgtaatgggtcagcagcacaaataggaaatgttgcatgtgttgccgacagaaccatctcactctctctttagtttctgcaattttttggacgaccgagaggtgctgccgtttatgagtaactttccagtgggaaaacagtatgccacaacatcatggtcagagtttggacattgcatgaagcacttgctggacaattgagaagaactcatgcctacttgcaggcatcatctcaaccatacaatgggattcattgaaatatcaggagggttgttgtacacgtgagtggaggtcgaacccttcttgtagggctcttaatgtatgaagtacgccatgctagctattgaatcaagttcaatgggattcgttaaaatataaggagggttgttgtacaagtgagacaaggtcagcccttcttgcagggctcttaatataagctcagcctgtactacacgttcatccacgtcgagctcgtcggctcccaacgcaaccccttcttctctcacgagatcagtggtgaggacgacactggggatagagacctagggttctccaagtgggcctagaaactccatggcaacgtctcaggtttcatgcagttctctaaatttattttgctcgattgtaagggaactgtgtcctctataagctcgcgctcgtgctgtaccgggagtaccccttcttcctgcaagtctggttcaattaaaaaattttgttctgtcgtgttgtaaagtacttggcgagctatgatatgtcattaccttagtgagaagactgcttctaatatattagtaatttttagctgtgcagatcatgtcatcatataaatgttgcaaacattataaaatagaggatccatttgaactctt

SEQ ID NO: 10540 - DNA, 840 bp, Zea Mays
tgtcgttcgacaccgtcaacggcggccgcgcgctcacgtcccggcggccacgggccgtgacagactcgagcccgtccgccgccttcgccgcgccgcctccgcctcctccatcgcacgccgactccgctgcctacatccgcgcacgtccgcctccactgcctccatccgctcgggagccgccgccctccgcgctaggcctcgcctccgtctggtctggattcttcgacatctggccatctgggcgctccgcgtcgccgacttctcgcaggcagagagcatccttgatagacctgatggctatcgcagagagctgtgttgatgcggtggtcatggagatggtggcagtctactgcggtggcctctacaccgccaaaccagagcttgctgcccgccgcatcgaggccatcggcttccaagtcgggcaccagctctctgagagatataccatggagcgccctcgatttagtgatcatcttgaagcaatcaagtttatctgcaaagatttttggtcagagctgttcaagaagcagattgacaatctgaaaacaaatcacaggggtacctttgtccttcaagataaccgttttcggtggcttactcgtgtttctctagatccacgtacagagaacacagattcaactgaaaatgattctgcagcattgggtgatactgcagcccaaacgactaccatgcttctgtatttcccatgcgggttgataagaggtgccttgaccaacttaggaatttcgtgttctgtctctgctgacatgtcaaaccttccagcatgaagttcgatttaagatactactacaatatgtaatctagtagcgagggctatac

SEQ ID NO: 10541 - DNA, 974 bp, Zea Mays
ccttgcatcaagttgttcgggttctttcttgggccaccggctgctgcctggaggcaagagttatgcaagtaggtggaggtggaggcgctcgtgatccaggggcccaagctgtcgaccatcctcagccaggtgaagaagctggaggcgtccgtgctggtgctcagccaacgcaaaccctcgcctttctgctgcttcctgcggagcaggagcagcagcgaggaggaggagctggtggaggagtgcataaaccgggcggagtgcctgacgctggcggtgcggcggcggagcaagggcgtgggcggctacctcgtgagcacccggtggcagaagaacttctggctgctcgcctgaccggtccacgaggactccccctcctcatcctcatcctttgacgcaacgcaagagttttacttacttcccgggctaatcgtttttacaaagtccaataataagtaaccaccaccaccaccactactgcatctgtttgttgatctgtaacctccagtgtcctagggtgtgtgccagccagtgtgcgtgtgcctgatcctctctctctccccacgatgtggtgctgtattctatgtatcgtcttggtttagctgtgctgctgtagcctgtagagtgtaagctagctgttgtgtagtgaaggcacgcagaagctgagccgatccgtttgccctgtctgttctgcgggaatctgtctgttttgcagagcggggatgcagaggcgcgggacggggacgtcagtacactgcgttgcgttgcgttgcgttgcataaactacgacttgtgtattgtgcttgtgcgatgtgtttgtttgcttgcttgcttgctacaatggttggtacagagttccataatgaagtgatgatgcgttttgactaactgtctcccccttgcgctctctctctctgtcaaaaaataaaaataaaactaggccgaggcattttgacaggtagtacaagcaagcaagc

SEQ ID NO: 10542 - DNA, 2567 bp, Zea Mays
cacacacacactctctctctctctctctggcctaggaggagacggagtacacagcaaaatttaacacttctcactgctagctcgcccattctcattcgttctctctctacgctgtcccctcctctctctctctctctctctccagcggcaaaagtgttgcactgcagcactgctagctaggagtatactatgagcttgctagctagcctggctgatggatggtcactactcatgtgcataaacgtgcatgtgaagtggctgggcatccaaccaaatatataagctactggcaaccggctgccggctgctggcaggtcgttcttcgtgttgtatgtagcttgaggctgaggccgggagatgaccatggtgagaacgacgatggtcggcgccagggagaggagcgggggagtgaggcagtacaacaggtccaaggtgcctcgcctgcggtggacgcccgatctgcaccactgcttcgtccacgccatccacaagctcggaggccaggacaaggctacgccgaagcgagtcctgcagctgatgggtgtgggaggactcaccatatctcatgtcaaaagccatctgcagatgtacaggaacatgagaaatgatcttggaatgcaagggacgacgatgcagctggtgcaccgggcggaggagcacgtatacggcctaggcggcatgcatatggaactctgcgccgatacacagcgacgacagccgcagtgcggtcatgatgagtgcgatggcccggcctgctgctgcatcgtcgtctgccgctcgccaccaccaccaaagcctggaaaggaggcgacgacgctgttccaacgccaactgaaaaggtcactgccttttattttttactcatttttctttctctgtatatgctcatcggtcacgtcagggaggccatccattcgcgtcccgacccggataatgacagacgatgaccatgacctgctgcagccgcatttgccatgcattggaaccagtcagtttttgccaatggaatggaatatttactccttcctggcacagtggaatagtggcggcagtgtctttgaaataatttgttttttgttttttgttttgacaagagggacaccgtcagtctactgcagatcttgatggaatgtctttctacaaatgcatgccagctagctaattggttggtccgttcttttttatttgtcatgttttagtttaaaatgaactacaaaatattcgagaaaggtggttgtagtataaaactttgatcaacttggttcgtgtcagttttactagcagctttaattttctcctgcacgtacacggcacgatgtgaagttgtgaaccaaccatgcatgcatgcatgcatgttgctttgcttgccgtgtagtgtgtttgcaatggaggagccaaacaacagtggtgcggggaggaggcgtgagcgggaggagatggatgggagcgcgagccccaagagggtgctgctgcgaggaggcccaggcccaggaacatgtgagggcgacgggtcaccatcaccacccagcgccagcggcggcctgtgctgggcgctcgcaacagcagcagcaggtggctacaacagctacatgcgcatgatgcaagcggccatggggatggctgccggcgctcgtgctccgcctccgcgcacgcttcgtcatccacctcgtcacgcggagacgacggtggagcccagccgggggccgggaataaagcggcaggcgcagatgcagtcggcgtcggcgcggcccggcgcacaaggcggcgaacacgccgcgccagctcttcgtcctcgcagcaccagcagcagcgagcagctcatcacattctcgggcttcgtggtggcgcagaagcagccgcctcctcctcctcctccctgctgcagccgtgaccaccctttcgagatggtcggcacggctctcatcgctcatggcgcctctgccgaagcgcgctgcggcctggagacgccgccgaggctgcccgcagtggccgaacaagcaggcggcgatccctgctggacgtcgtcggcgggttcagaagacgaccacgacgaggaggaggacggctgctcgctctcgctgtccctagctacgagaagcagccgcagcagcggcgacgagggcggccggctctcgcctacggcggccacgtcgtgggggagccagatcagcctcgacctgtccttgtccacgctatagaatagacccgtcatgttggtatgatgcgagtttgtgaatgggatagcttcttgggccttgcggcggccgggctgccttcctggtgtagcgtttcctacaattttcgcttgctcttgttgttgttgaagctcttggctcgttaggttagtcccacgtagtaatatcagttataatttcattgttgggaggagctagatggtcttgatctttaccattccgattcgggccaatttggcaaggctcggtctagataaggtaaacaccttcctgctcaggtttccaaagctggcattgccacccatcaccaggattacgtcgatcaattcatcaatactatatgatgaaaaaatatagtatgatatcatcaag

SEQ ID NO: 10543 - DNA, 4128 bp, Zea Mays
ccccctcccccacgtccgcctgctcgcgctcgagctcgagccgcatctcccaaaccctacccatataaaatattaagcccaacgcccgagtctctctctctctcaacttcccttcccaccaccctcaccctccccttcccgccgccaccaccagttcaaccctctctccctcaaaccctagccgccgccgcgctcgttccggattcggttccgatccgatggcgtccgccgaggaccaggccgcggccgccgcgctgctggggggtgacccggcggcgttcgacgcgctgctctcgacgctcatgtcgtcctccaacgccgaccgttccgccgccgaggccgccttccaccgcctccgggcctcgcacccggagcccctcgcgctgcggctcgccacctcgctggcggcgcccaccacccccgccgacctgcgcgccatggcgggggtcctcctccgcaaggtcctctccccggccccgtcttccgacgcgtcctccaacaacgccacgcccccggcgccgctctggccgcagctctcccccgcggggcaggccgcgctcaaggcgcacctcctctccgcgctccagtccgatcctcccaagcccatcgccaagaaggtctgcgacgctatctctgagctcgcggcctcgctgctgcctgagaacgcctggcccgagctgctgccgttcctcttccgcgccgcgtcggggcctgatgcgcacaaccttcaggagtcagcgctgctcatcttcgcgaggctggcggattacatcgcagaatctctcctcgaccatctcatgactatccacaacctcctcgcctcagccctggcgcatcccacgtctcctgatgttcggattgcggccctgggtgccgcagtcaaccttgttcagtgcctgccaaccaactccgacagggataagatgcaggatttgctcccagcaatgatgagggcgctcactgattgcctaaactctggccaggaagtctctgcgcaggaggcactggagctgctggtggagctcgctggcgccgagccaaggttcctgaggaggcagattgctgatgtggtaggggcaatgttgcaagttgctgaggctacacagctggaagatgggaccagacacttggcggtggagtttgtgattactctagctgaggctagagagcgtgcaccaggaatgatgcggcgactcccgcagtttgttggtaggctgtttgcagtgctgatgcagatgctgcttgatgtcgaggatgaccctgcttggcactctgctgaaactgaagatgaggacgcaggggaagggaacaactatggagtggcgcaggagtgccttgaccgcctttccatcgccattggtgggaacgcaattgtaccaattgcttctgagctgctaccacagtacctgtcttctgctgagtggcagaagcaccatgctgcgctcattacacttgcacagattgcggaaggatgtgcaaaggttatgcttaaaaatttggaacaagtcgtttcgatgatattgaatggatttcaacatccccacccacgtgtgagatgggctgctatcaatgccatcggtcagctttctacggatttgggcccagatcttcaagttcattaccaccagcaggtgctgcctgcattggccaatgctatggatgatttccagaatccacgagttcaggcacatgctgcttcagcgattttgaattttagtgagaattgtacaccggaaattttgacgccttacctggatggaattgtgaacaaattacttgttcttcttcagaatggaaagcaaatggtgcaggagggagcattgacagctttagcgtcagtagcagattcatcacaggatcacttcaagaaatactatgatgctgtcatgccatacctaaaatctatcttgatgcatgcaactgataagtccaataggatgctccgtgccaagtccatggagtgtataagtttggtaggaatggctgtgggtaaggacaagttcagagacgacgcaaggcaggttatggaagtacttatggctttgcaaggagctccaatggaaactgatgatccaattaccagctacatgttgcaggcttgggctaggctatgcaaatgtcttggacaggatttccttccttacatgagtgttgttatgcctccactgcttcagtctgctcaactcaagcctgatgttacagttacttcagctgaatcagatgacgatattgcatcagatgacgatagcattgaaacaattacacttggtgacaaaagaataggaattcgaactagtgtgctggaagagaaagcaacagcttgcaacatgctgtgctgttatgctgatgagcttaaggagggtttcttcccatggattgatcaggttgccccaacgttggttcctctgctgaagttttacttccatgaggaagtcaggagagctgctgttgcggccatgccggaacttctacgctcagcaaaattggctgttgagaaagggcaggctcaaggacgtgatgagtcttatgtcaaacagttgtctgactacataattgcagcacttgttgaagcactgcacaaggagccagaaacagaaatgtgctcatccatgctggattctttaaacgagtgtatgcagctttcgggtcttttgcttgatgaagcccaagtacgagctatcatagatgagattaaaaacgtcattatagccagtgccacccggaaaagagaacgctcggagagaacaaaagcggaagattttgatgctgatgaaggagagctactcaaagaagagaatgaacaggaggaggaagtatttgatcaggtcagtgagtgcctagggactttgattaaaaccttcaaaggttctttcttgccgttttttgaagagctctctatgtacattacaccaatgttgggaaaagataaaacacctgaagagagaaggatagctatctgtatttttgatgatgttgcagagcaatgccgtgaatcagctctgaagtattatgacacataccttcctttccttttggaggcatcaaacgatgaaaattcagatgttcggcaggctgctgtctatggtgtgggtgtatgtgccgagtttggtggtcatgtttttcgccctctagtaggagaggccttatcaaaattaaacaatgttataaggcatcctgatgcacgacttcctgataatatcatggcatatgacaatgctgtttcggcgcttggaaaaatatgccaatttcatcgggatggtattgatgcagctcagcctggcttagctgcttgcctataaaagacgacaaggttgaagctaaagttgtacatggacagctttgctccatggtggagaggtcggatgctgaaattcttgggcctcacagtcagtatcttcctaaaattgtttcaatttttgcagaggttttgtgcaatggaacagaacttgccactgatgaaactagaaacaggatggtgaatgtcttgaggcgtttccagcagactttgcctcctgattttcttgcatcgacgttttccaacttgcaaccgcagcaacagctactgctacagtccatcttgtcgacatagttgttttttctgtcgctgcaaggtgggggtttgttatttttcttgatgttttatcagccaattctttatgtcgtatctttttctggtggggtactttgtgaatgcattgtttgcttcaacgaactggaggctgtcaccacacatggttttgatagagtgtatattgtctgtcttgtattcgaaatatggtttgagatgtgctgcaacagaggtgcaagggaaacggtgggatttattgtcggatgggttggacatttgcagttttttggtaatgagatcactataagtggagttactttctgcttctctttgaagccattttaattctgttgaaaattattaaaatgtgctctgttggaagatgcagaagctcctccgggttcatactggtaattggtgaaataaaaagcagtcttatctttctgaatgaaccttgggttcgtgtgtatttaagctggatcgttaatttattctgagataaaaccgtagcaattcgctaatgtgttcggagatcaaaccgttgcaaatttccatctggc

SEQ ID NO: 10544 - DNA, 1396 bp, Zea Mays
gccgcaatccgcaactctgcacttggggttgggctcaaccgaatcgcccccgcgccaggccgttctcgtcgacgccgccgaccaataaggagcctcgcacgccacgccaccaccgccgccgcaacccacgcgatggcgccaccggactccatctccacgtgctcctcccttcccctcgccgctgcgcccatgtccgaaccgacccccttccccttcgctgcgtcgccgcttccaaacccgctcgtagccaccgcctccttcctacagcaccacctctcccgtttggcttcccacctgaacgtcccgcgccccgccctcgctgccgcggctgcgcgcacgccgggcccccagggcgcctccctatctctctctctcgcgcccgatgaggtcgcgcgcgctcttaccggcactcccgtcttcactgtctgcaactccagcaacgagttcgtgcttgtctccgaccctgccaccggcctccgctccctcggcctcctctgcttccgttcggaggacgccgacgccctcctgtcgcatgtgaggacgcggcaaccggtgctaggcaagggggcaaaagtggtgcctattacacttgatcaggtctatatgttaaaggctgaagtcagatctgctggttgtgaagaagcagaagaagcgctactgtccagtatattttcaaaaggaagacatagaaagagaacttacaagggcttccaaaggttcaagagggtcagccttatctaagaaaattatggttggaagtttggaggatgtcctgaagaaaatggagataaatgaaagagattctggctgggatgatttgatctttataccccctgggaagagcctcaaccaacatatcaatgaggtatcagcatgattttgttccacggtgatagctcagagtttgaacagactattcactttaaatgctatgatggtcagccaaacgaaatatcaaattgctgcctgagcttttcctttggatagctattttcatggtcagctttgtcagggaaaattaactaaagtgatagaatatggctgtgaaacaattttcttgttgcttcgattcacaaaattaacacaggttacacaagaagatttgatgaagagtaagttgcgacattggtaaatcaccttgcaatatagtttcatgaaaggggttatacaatagaaaaagagacgaatgtttatggccctattcggatgcatagtatataccatgattttttaaatattttggttttcgaatgctaaggtgtttggacgtcacaaccttgtagttttgaaaaccatgcttttgctaaaactatagtcgtcttgtttttttagaagcttagcttcgtgcttaaactgttgtgtttgtaacctccgtttttggtatgagtgatatatt

SEQ ID NO: 10545 - DNA, 1419 bp, Zea Mays
gccgcaatccgcaactctgcacttggggttgggctcaaccgaatcgcccccgcgccaggccgttctcgtcgacgccgccgaccaataaggagcctcgcacgccacgccaccaccgccgccgcaacccacgcgatggcgccaccggactccatctccacgtgctcctcccttcccctcgccgctgcgcccatgtccgaaccgacccccttccccttcgctgcgtcgccgcttccaaacccgctcgtagccaccgcctccttcctacagcaccacctctcccgtttggcttcccacctgaacgtcccgcgccccgccctcgctgccgcggctgcgcgcacgccgggcccccagggcgcctccctatctctctctctcgcgcccgatgaggtcgcgcgcgctcttaccggcactcccgtcttcactgtctgcaactccagcaacgagttcgtgcttgtctccgaccctgccaccggcctccgctccctcggcctcctctgcttccgttcggaggacgccgacgccctcctgtcgcatgtgaggacgcggcaaccggtgctaggcaagggggcaaaagtggtgcctattacacttgatcagatgaaatcgggcttaactgcttttgatggtgttcctgtttttcagtcagatctgctggttgtgaagaagcagaagaagcgctactgtccagtatattttcaaaaggaagacatagaaagagaacttacaagggcttccaaaggttcaagagggtcagccttatctaagaaaattatggttggaagtttggaggatgtcctgaagaaaatggagataaatgaaagagattctggctgggatgatttgatctttataccccctgggaagagcctcaaccaacatatcaatgaggtatcagcatgattttgttccacggtgatagctcagagtttgaacagactattcactttaaatgctatgatggtcagccaaacgaaatatcaaattgctgcctgagcttttcctttggatagctattttcatggtcagctttgtcagggaaaattaactaaagtgatagaatatggctgtgaaacaattttcttgttgcttcgattcacaaaattaacacaggttacacaagaagatttgatgaagagtaagttgcgacattggtaaatcaccttgcaatatagtttcatgaaaggggttatacaatagaaaaagagacgaatgtttatggccctattcggatgcatagtatataccatgattttttaaatattttggttttcgaatgctaaggtgtttggacgtcacaaccttgtagttttgaaaaccatgcttttgctaaaactatagtcgtcttgtttttttagaagcttagcttcgtgcttaaactgttgtgtttgtaacctccgtttttggtatgagtgatatatt

SEQ ID NO: 10546 - DNA, 2470 bp, Zea Mays
cccgctaaacctattcgacccgtcaacgaacagatccaccctcaccagccgcctgacgttcgagccgcaccagccctaaacccttccacctccagccgccataactgtaatccctttcaccatcagctgcccctccgttcgagccgtcgacgccctaatcctatcaccttctggccgcccaaatccctttcggctcctgccgccctctttttgaggcgcatgccatggagtcgttggtcttcgagtgccaggccatggcggcacagaccatggagtcacaggctatgatggcgcaggtcttagtctttaggccatggagtcgcaatcaggcgttcaagatgctctgagacttgagtcagctgtccatctgtgtacttgattgtgatgataaattgaagccagtaattggaacgtcatttggttctctagaggaagtggaagaattgtacaagatatatgctcttgagaattttattggctgcaacattccagaacatatcgaaatccatccaccatccgatgttcactcccagtaaaaacatcaagaaatccaaagaactatttaaatcgtgtaaagggaaaaatagtaaagtgagacgaaggtagtcaaacagtcatattgctaaagtattacaggtaggagaaagaatccaacagcatgttgaggagcttctacagtgttattggcatgggaattttgttagcttctatagtgctattggtatgtcgagtagcttcaaccaggtatggactttttaactctagcgagagtttttagttgtcacacactaatggctgaattggggaaagtagtaactgaaaatgagagtaaccagcatcaacaatagtttgctttcaaaattcagaaggatagttccttgttttgtacaacattttttaagtataagagttttaaaatagaacatagcagcatgaaaggcttattttttccagaacatagtttaatagacttaataagtttaaacgacccataattctggtgctttattctatcttttatctgttgggtcattaaaatctatagactttagcgtcctatcttgtcatgtattagtgacgtatggaatcatttggagtcaatgggaagattaatagccaaaaatgttagaagatcatgcttgtttagacctctatgttgtacggaccagcaggtttgaaatgatgttgtcactgttccttgttctcaactgttgtattaagcaagtactaccatggggatgtggggtgggactagtccaaatgttgtagttactagttactagagttagcaagcagaggaattggtaatggtgatgcgttctcaacttcttatgtgtgcttgtcgttcgatcgtccatcagtttttagatgtacaaaacatatcaccgcattgacgtccatggctgcgagtacagtacagtggtcggccggttccaagtttacaaacagcaagcagtactagtgagtaggtgacattagcagtacaaacccttaaacctgcaactaagcacgacagagagtaggggcggagctcaggcccgttcatctcggttaggtggaagaaatggtcggcatatgtgtttctttcatgctttactgcatcctgcatttttattttgttgcactggcacgaccgcctggcactggcaccccctcgtactgatctgatgttgtaatagcaattagcatgcgttcagattagttaagatatggagctgagctcgctgccaacaaggtcaatactagcatccatttttttgcaaactaggacacaatcaggtgaaaagcttgagctgcattctttgtctatttaactttactagttctgtttgtttcatggtatgctgttatttacaagtaagcccaggagattcttttattgatgttaaacaattacttttggatgctcctgaaacatgcttctatgcatgatacaatttgatattgcatactaaagatgggttagctcatcagttagaagactacaaggaaatatctgaaatagcagatataacttctagtggatgttcactggagatggttgctacaacatacaatgagaggtctattaggtcacatctccgacgtgtgaaggggctactatctctgtctagtctttatgtttccctatcaacgtccttagctctgcttcaggagtccgctcaaggaaaatttgcaggacttatatatgtgttctctgttcactgatgcggctggagcgtcatgtcaactgctcaccctccccctaacaaattaaactagactgatgagtggagcttcatgttgggatgatccatgcaccttttaagttttggaacgtcgtactcaaatgtagcttgtgttagttgaacctatcgtactttcttttggaattaaattatatgatatttaaacatgtttgatgtttaatacttgtgttggatgctttatgcttcaaatatatatgcattatacaaaaagttgtgtacac

SEQ ID NO: 10547 - DNA, 2566 bp, Zea Mays
cccgctaaacctattcgacccgtcaacgaacagatccaccctcaccagccgcctgacgttcgagccgcaccagccctaaacccttccacctccagccgccataactgtaatccctttcaccatcagctgcccctccgttcgagccgtcgacgccctaatcctatcaccttctggccgcccaaatccctttcggctcctgccgccctctttttgaggcgcatgccatggagtcgttggtcttcgagtgccaggccatggcggcacagaccatggagtcacaggctatgatggcgcaggtcttagtctttaggccatggagtcgcaatcaggcgttcaagatgctctgagacttgagtcagctgtccatctgtgtacttgattgtgatgataaattgaagccagtaattggaacgtcatttggttctctagaggaagtggaagaattgtacaagatatatgctcttgagaattttattggctgcaacattccagaacatatcgaaatccatccaccatccgatgttcactcccagtaaaaacatcaagaaatccaaagaactatttaaatcgtgtaaagggaaaaatagtaaagtgagacgaaggtagtcaaacagtcatattgctaaagtattacaggtaggagaaagaatccaacagcatgttgaggagcttctacagtgttattggcatgggaattttgttagcttctatagtgctattggtatgtcgagtagcttcaaccaggtatggactttttaactctagcgagagtttttagttgtcacacactaatggctgaattggggaaagtagtaactgaaaatgagagtaaccagcatcaacaatagtttgctttcaaaattcagaaggatagttccttgttttgtacaacattttttaagtataagagttttaaaatagaacatagcagcatgaaaggcttattttttccagaacatagtttaatagacttaataagtttaaacgacccataattctggtgctttattctatcttttatctgttgggtcattaaaatctatagactttagcgtcctatcttgtcatgtattagtgacgtatggaatcatttggagtcaatgggaagattaatagccaaaaatgttagaagatcatgcttgtttagacctctatgttgtacggaccagcaggtttgaaatgatgttgtcactgttccttgttctcaactgttgtattaagcaagtactaccatggggatgtggggtgggactagtccaaatgttgtagttactagttactagagttagcaagcagaggaattggtaatggtgatgcgttctcaacttcttatgtgtgcttgtcgttcgatcgtccatcagtttttagatgtacaaaacatatcaccgcattgacgtccatggctgcgagtacagtacagtggtcggccggttccaagtttacaaacagcaagcagtactagtgagtaggtgacattagcagtacaaacccttaaacctgcaactaagcacgacagagagtaggggcggagctcaggcccgttcatctcggttaggtggaagaaatggtcggcatatgtgtttctttcatgctttactgcatcctgcatttttattttgttgcactggcacgaccgcctggcactggcaccccctcgtactgatctgatgttgtaatagcaattagcatgcgttcagattagttaagatatggagctgagctcgctgccaacaaggtcaatactagcatccatttttttgcaaactaggacacaatcaggtgaaaagcttgagctgcattctttgtctatttaactttactagttctgtttgtttcatggtatgctgttatttacaagtaagcccaggagattcttttattgatgttaaacaattacttttggatgctcctgaaacatgcttctatgcatgatacaatttgatattgcatactaaagatgggttagctcatcagttagaagactacaaggaaatatctgaaatagcagatataacttctagtggatgttcactggagatggttgctagtatgtaacaacttctagtttcttctctattgtcatatatacttatatagtgcttattttctggagctaaagtaaaagttctttcagcaacatacaatgagaggtctattaggtcacatctccgacgtgtgaaggggctactatctctgtctagtctttatgtttccctatcaacgtccttagctctgcttcaggagtccgctcaaggaaaatttgcaggtacatcaggacttatatatgtgttctctgttcactgatgcggctggagcgtcatgtcaactgctcaccctccccctaacaaattaaactagactgatgagtggagcttcatgttgggatgatccatgcaccttttaagttttggaacgtcgtactcaaatgtagcttgtgttagttgaacctatcgtactttcttttggaattaaattatatgatatttaaacatgtttgatgtttaatacttgtgttggatgctttatgcttcaaatatatatgcattatacaaaaagttgtgtacac

SEQ ID NO: 10548 - DNA, 2570 bp, Zea Mays
cccgctaaacctattcgacccgtcaacgaacagatccaccctcaccagccgcctgacgttcgagccgcaccagccctaaacccttccacctccagccgccataactgtaatccctttcaccatcagctgcccctccgttcgagccgtcgacgccctaatcctatcaccttctggccgcccaaatccctttcggctcctgccgccctctttttgaggcgcatgccatggagtcgttggtcttcgagtgccaggccatggcggcacagaccatggagtcacaggctatgatggcgcaggtcttagtctttaggccatggagtcgcaatcaggcgttcaagatgctctgagacttgagtcagtgcctcgttgcagctgtccatctgtgtacttgattgtgatgataaattgaagccagtaattggaacgtcatttggttctctagaggaagtggaagaattgtacaagatatatgctcttgagaattttattggctgcaacattccagaacatatcgaaatccatccaccatccgatgttcactcccagtaaaaacatcaagaaatccaaagaactatttaaatcgtgtaaagggaaaaatagtaaagtgagacgaaggtagtcaaacagtcatattgctaaagtattacaggtaggagaaagaatccaacagcatgttgaggagcttctacagtgttattggcatgggaattttgttagcttctatagtgctattggtatgtcgagtagcttcaaccaggtatggactttttaactctagcgagagtttttagttgtcacacactaatggctgaattggggaaagtagtaactgaaaatgagagtaaccagcatcaacaatagtttgctttcaaaattcagaaggatagttccttgttttgtacaacattttttaagtataagagttttaaaatagaacatagcagcatgaaaggcttattttttccagaacatagtttaatagacttaataagtttaaacgacccataattctggtgctttattctatcttttatctgttgggtcattaaaatctatagactttagcgtcctatcttgtcatgtattagtgacgtatggaatcatttggagtcaatgggaagattaatagccaaaaatgttagaagatcatgcttgtttagacctctatgttgtacggaccagcaggtttgaaatgatgttgtcactgttccttgttctcaactgttgtattaagcaagtactaccatggggatgtggggtgggactagtccaaatgttgtagttactagttactagagttagcaagcagaggaattggtaatggtgatgcgttctcaacttcttatgtgtgcttgtcgttcgatcgtccatcagtttttagatgtacaaaacatatcaccgcattgacgtccatggctgcgagtacagtacagtggtcggccggttccaagtttacaaacagcaagcagtactagtgagtaggtgacattagcagtacaaacccttaaacctgcaactaagcacgacagagagtaggggcggagctcaggcccgttcatctcggttaggtggaagaaatggtcggcatatgtgtttctttcatgctttactgcatcctgcatttttattttgttgcactggcacgaccgcctggcactggcaccccctcgtactgatctgatgttgtaatagcaattagcatgcgttcagattagttaagatatggagctgagctcgctgccaacaaggtcaatactagcatccatttttttgcaaactaggacacaatcaggtgaaaagcttgagctgcattctttgtctatttaactttactagttctgtttgtttcatggtatgctgttatttacaagtaagcccaggagattcttttattgatgttaaacaattacttttggatgctcctgaaacatgcttctatgcatgatacaatttgatattgcatactaaagatgggttagctcatcagttagaagactacaaggaaatatctgaaatagcagatataacttctagtggatgttcactggagatggttgctagtatgtaacaacttctagtttcttctctattgtcatatatacttatatagtgcttattttctggagctaaagtaaaagttctttcagcaacatacaatgagaggtctattaggtcacatctccgacgtgtgaaggggctactatctctgtctagtctttatgtttccctatcaacgtccttagctctgcttcaggagtccgctcaaggaaaatttgcaggacttatatatgtgttctctgttcactgatgcggctggagcgtcatgtcaactgctcaccctccccctaacaaattaaactagactgatgagtggagcttcatgttgggatgatccatgcaccttttaagttttggaacgtcgtactcaaatgtagcttgtgttagttgaacctatcgtactttcttttggaattaaattatatgatatttaaacatgtttgatgtttaatacttgtgttggatgctttatgcttcaaatatatatgcattatacaaaaagttgtgtacac

SEQ ID NO: 10549 - DNA, 2886 bp, Zea Mays
gtcgccactaggaccgcgaggaggctctggctcgctgcccgatatattgattaattaatcgcccgttaattgcccgctaatcctctgccggccgctgccgcctcgctttttctcgcttaaataattgcctagtcaagctgatccagctcggcgggctgcgggcggacttggggagacagacaaacatacagagagagagagaggggcagaggcagcccgggatccgatcgggcggtcgatgctacggccggtggcgggcgtcgtcggggcatggctagccaggctgcgcggcgaggaggcgcgatgagaccaccgagcagcggcgtgcgcacggcggccgcgcggccgccggccgcctcgttcctgctggccacggcggccacggcggcgctcgtcggagggttctacttctggttggtggtctcgtcgttccggctccccgactcgggcgccgtcgggtgccgccccgacggcgaggggtcgtgggcggtcggcatgttctacggcagcagccccctcgcgctccgtcccatcgagctgggggacacactatttattttctttgaaacaaaaacaacaacctcaatgcaaggtgatattggagttgcaagaagcttcgaccaaggtgcaacgtgggaatttcttggcattgcactagatgaggcatggcatctgtcatatccttttgtgttcaagtatgagaacgagatttatatgatgccagagggaaacaagaagaaggagctgcgcctttatcgtgctactaagtttcccctcgaatggacattggagaaggttcttgtcaataagccacttattgatgcctcgttagtccaatttgagggatactggtggctatttgcatctgattttacacggtatggtgttgagaagaatgcggagcttgagatttggtacagcaattctcctcttggtccttggactgagcacaagaaaaatcctatctacaaatcagacaaaagtttgggagctcgaaatggtgggagactcttcatttttgaagggtcattatatcgccccggccaggattgcagtggtacttatggccggatggttaagttgcacaaggttgaaaagctaagcaaggaggaatacaaagaggtccctgtaaatcttgggatagaggagccaaagaaagggagaaatgcatggaatggcatgaggtaccatcacatggatgcacaacaactcgcatctggtggatggattgctgtaatggatggtgatcgagttccttcaggtgattcaaccagacgctctctcattggttacttagctttcctgttggccagtgcccttgtcgtttttgtgggttttatgaaaggtgcaatcagttgttacgttcctcccagtttatgggttcctctcacaaggagaacagaattatcccgtatcttctacgtgcaccgcttcaaccagaaagtccgcagatattctaccagcatcagcagatatatctctgctgctaaaaccaagctcagcgaaaagacttggtccaacgtgcttttcttctgtgtagttgctctatttggtgccataaatgtctgcattgccgtgcatttcttatgtggcggcaatggcgctgaagaggcgtacacatatcaagggcaacactcccagtttacgatgatcacaatgacatatgaagcccgtctctggaatttgaaagtgttcatcgaacactactctagatgtgaatcggttagggagatagttgttgtttggaacaaaggtaaccctccaagtagtgacgcgtttgactccactgtgcctgtgaggatacgggtcgaggagaccaattctcttaacaacagatttagggtggatcctctgataaagaccagagctgttcttgaactggacgatgatatcatgatgacttgcaccgacttagagaaaggatttagggtctggagagaacaccctgagcggatggtgggcttctacccccggatgatagatggcaaccctatgcagtacaggaatgagaggtacgctaggggtaagaatggatacaatctgatactcacaggtgctgccttcatggacaaagagtttgctttcaagacttactggagcgagaaggctcgtgaggggagggactatgtgcacaagaacttcaactgcgaggacttgctcatgaattttctgtatgcgaatgcaagctccaccacaaggaccgtggagtacgtccaccccgcatgggctatcgatacgtccaagctttcttctgttgccattagccgggacacccagaagcactatgacatcagaacgcattgcttggcaaacttttcctccatatatggccccctccctcagaaatgggagttcggcatgcgtgaagaccgttgggacaaataggatggcgacggtggtacacgacggacaaacacatgatggtgaaaccttctcttttttttttgtcaatcccctggaaagttttgtagcttcgggcgaaggtataggtccttggggcagaagtgcccctggtttgtgatgtgcctattagatctggctagaagcttagacctgatcaggatagaccattgttcaaaagttgaggatagaccaaaggcagtgcagtgtatgtgtatgtgaattgtggaaggcaaagagggaatttgagaactgcatagtgggtggaaagtttagactgttgggttcccttctctgtagtttgtgtacatctcttcctttctaagattcagctagcatgttgtgtgattatttaccgtaaggattctttttacagctcgtagtgtttattatttcagtctaatgaggactttctgaatctttcttttctgagatccgcactgttgtctactggaatgatgtttgtcgtgctcagcggcttcatct

SEQ ID NO: 10550 - DNA, 2909 bp, Zea Mays
gattaattaatcgcccgttaattgcccgctaatcctctgccggccgctgccgcctcgctttttctcgcttaaataattgcctagtcaagctgatccagctcggcgggctgcgggcggacttggggagacagacaaacatacagagagagagagaggggcagaggcagcccgggatccgatcgggcggtcgatgctacggccggtggcgggcgtcgtcggggcatggctagccaggctgcgcggcgaggaggcgcgatgagaccaccgagcagcggcgtgcgcacggcggccgcgcggccgccggccgcctcgttcctgctggccacggcggccacggcggcgctcgtcggagggttctacttctggttggtggtctcgtcgttccggctccccgactcgggcgccgtcgggtgccgccccgacggcgaggggtcgtgggcggtcggcatgttctacggcagcagccccctcgcgctccgtcccatcgagctggaagggaggagcaatggcaacagctcggcgtggccggtggcgaaccccgtcctgacctgcgggactgcgacggaggcggggtacccgagcaactttgtcgccgacccgttcctctacgtcgaggtgatattggagttgcaagaagcttcgaccaaggtgcaacgtgggaatttcttggcattgcactagatgaggcatggcatctgtcatatccttttgtgttcaagtatgagaacgagatttatatgatgccagagggaaacaagaagaaggagctgcgcctttatcgtgctactaagtttcccctcgaatggacattggagaaggttcttgtcaataagccacttattgatgcctcgttagtccaatttgagggatactggtggctatttgcatctgattttacacggtatggtgttgagaagaatgcggagcttgagatttggtacagcaattctcctcttggtccttggactgagcacaagaaaaatcctatctacaaatcagacaaaagtttgggagctcgaaatggtgggagactcttcatttttgaagggtcattatatcgccccggccaggattgcagtggtacttatggccggatggttaagttgcacaaggttgaaaagctaagcaaggaggaatacaaagaggtccctgtaaatcttgggatagaggagccaaagaaagggagaaatgcatggaatggcatgaggtaccatcacatggatgcacaacaactcgcatctggtggatggattgctgtaatggatggtgatcgagttccttcaggtgattcaaccagacgctctctcattggttacttagctttcctgttggccagtgcccttgtcgtttttgtgggttttatgaaaggtgcaatcagttgttacgttcctcccagtttatgggttcctctcacaaggagaacagaattatcccgtatcttctacgtgcaccgcttcaaccagaaagtccgcagatattctaccagcatcagcagatatatctctgctgctaaaaccaagctcagcgaaaagacttggtccaacgtgcttttcttctgtgtagttgctctatttggtgccataaatgtctgcattgccgtgcatttcttatgtggcggcaatggcgctgaagaggcgtacacatatcaagggcaacactcccagtttacgatgatcacaatgacatatgaagcccgtctctggaatttgaaagtgttcatcgaacactactctagatgtgaatcggttagggagatagttgttgtttggaacaaaggtaaccctccaagtagtgacgcgtttgactccactgtgcctgtgaggatacgggtcgaggagaccaattctcttaacaacagatttagggtggatcctctgataaagaccagagctgttcttgaactggacgatgatatcatgatgacttgcaccgacttagagaaaggatttagggtctggagagaacaccctgagcggatggtgggcttctacccccggatgatagatggcaaccctatgcagtacaggaatgagaggtacgctaggggtaagaatggatacaatctgatactcacaggtgctgccttcatggacaaagagtttgctttcaagacttactggagcgagaaggctcgtgaggggagggactatgtgcacaagaacttcaactgcgaggacttgctcatgaattttctgtatgcgaatgcaagctccaccacaaggaccgtggagtacgtccaccccgcatgggctatcgatacgtccaagctttcttctgttgccattagccgggacacccagaagcactatgacatcagaacgcattgcttggcaaacttttcctccatatatggccccctccctcagaaatgggagttcggcatgcgtgaagaccgttgggacaaataggatggcgacggtggtacacgacggacaaacacatgatggtgaaaccttctcttttttttttgtcaatcccctggaaagttttgtagcttcgggcgaaggtataggtccttggggcagaagtgcccctggtttgtgatgtgcctattagatctggctagaagcttagacctgatcaggatagaccattgttcaaaagttgaggatagaccaaaggcagtgcagtgtatgtgtatgtgaattgtggaaggcaaagagggaatttgagaactgcatagtgggtggaaagtttagactgttgggttcccttctctgtagtttgtgtacatctcttcctttctaagattcagctagcatgttgtgtgattatttaccgtaaggattctttttacagctcgtagtgtttattatttcagtctaatgaggactttctgaatctttcttttctgagatccgcactgttgtctactggaatgatgtttgtcgtgctcagcggcttcatct

SEQ ID NO: 10551 - DNA, 1164 bp, Zea Mays
accattacaaccactcaaccaaactccaccttaaatagctgtagtgttggctgcgcaaatcccggtctgatctagactgaggacgcgggccaaacaccaccatcactccacagcgtcggcgaggaagtcggcatgagcgtgttcggcggcgacagctgggcgcgtgatgcgcagcagcggaagcggcgtctcgacgagctcttgctacccatcacggcgccctcgtctccctcgacgcctgattccttcaagaagctccacaacggcaagctcgcctgcctcatctgcccccaccgccccgtcctcgacaccccgctcatgctctccatgcataataaaggtgcacggcacatcgctgcagaatcgaggctgagggagaaagaattatctaagaagcacgaaattagcaagagactggctctctcttcagatgtttcccattcaaattctggcaatccacggaccagtgtttggcctaccaatatcaaagaaaaaccattgattgaggagacccggagggcaattctggaagcacagtcgagcagattcaatgatttccaaggcaagaagacaaacagaagttcgaaagcgccaggagcaagaactttggttcactgcttcaggctggaaacgggatggccatggaagatggtacagagatgaaaatgttgaatttgactcagatgaagatgatcctaacatctgtctctcctgatcatttgagaaggcaatcggaattgaactatcctatggcccatctgggagtattgaattcatcacaatgcaatatcaagttcaatctctccctacaaaaaatggtccaatcagattttgtcagactgtcagcttttctgatcaatggaaatgtcagatcatgttcctgttaaacttaaatgtttgtttcattgtgagccaaacctgtataatgatagttgagaaatacagtgtgtatttattttgtgaaaacatttagagatcagagaattccgttttcaaagatgtagtctaaacctgccattagtcactgtaaagataggcgatgcattttggttttggagcttgttttcagactaatattttatttgtaaggaaaataatgaagagcaaaaaaaaaaaagggggctataccatacagaactgatagattttcaaaacatgacaaag

SEQ ID NO: 10552 - DNA, 992 bp, Zea Mays
cctgctgctgctaccacctccatccatttgcatgcatgcttcatcagaaaaaagaagcaaaagagatgcctaccaccaatgcaaaaaaaaaatcatgtatctacaaagcagagcagagcagagcaggagaggaagaagcacaggcaaagcagagcaggagaagaagaagaagcacaaggttgtgcacatggacgacgatcccatgtactgctttcttttgtacctacagcaacgaatgtgcgaaaacaggcaagggagggaccgggagacgagagacatttgagagacacatggatgcatgcattgcatgcatccgatcaccggccatcggccgaggtgaaggactcggcgaagccggcggggcgggcggggatgctgcccttgctgtcgtccaggctcatgacgctcccgccgccgtccgtcaggccgccggcctccgcgtcctgccagctcttcaccatctgcagcagcggcaggtgcaggtcgatgcccaggtagtcctcggcctcgtccttcacgggcctccacttctccaccatgggcaccagcacgttcaccgcgtgccccatgtccggccgctgcgacggctcccgggccgtgcagtgccccgccagctccgcgatcacgccgatgctctccattgtctcgccgtcgcccacgtccagggccgggtcgatcgccgcgcgcagctgctccgcgtccttccgtatctggctgaaccagtacgccaggtgccgggtctcctcgccctcgcccacgcggctgtcgtcgatggccgtcgtccctgttatcagctccagcagcactacaccgaagctgaacacgtctgctttcgtcgagatcttcccggtaactgcatactcaggagccaagtacccgaacgtcccggcaagtctggtcgccacagagtagttcccatccggcgcatctttcatgagcccgaagtccgccaccttggcccggaagtcgtcgccgaggagaatgttcgctga

SEQ ID NO: 10553 - DNA, 1709 bp, Zea Mays
aatagccaagtggataatgggaactctgttagagatatgattgcattgaatatgtggaatgattatagtcaacatcgttcatgatatatcaagaatgtttggaagaggatctcctaggatgaacttgatccaagctgcaactatgaaaaaaatatcccccagatctactactaacaagcgcaagaagagaacatcaccaaaagcaaactggaatagtggactagaaaagggtttagttgaaattcttcaagatcacaacaatgattgttataagggtcaaaatgggtggtcatcggaagcatggaatagaattgtcaagttattccatgagaaattctcttatgtcacatttacaaaatgccaaatccaagataaagagaaagagttaaagagagactacaaggctcttaaagaggcaaggcaacaaagcggggtatcatgggatgagaggttgtgtagaatagaagcagaagaacccatttggaataacctcaccactagtaacgagagacttaagaagtttcggactaaatctttcccactatttgaggctttaggagagctatatgatggaaatattgctgagggaaccatgaattttacttctattgagccttctcgacctcctgtcacacaaccttgtcaaggtgctgctacacagccttctcaagctgctttcacacttacacaaccttctcaaatcgctttcacacaaccttctctagctgctttcgcacgaccttctcgaaccgcttttagacatccttctctagccgctttcccacagccttctcaagccgcttttgcacagccttctcaaaccattttcacacagccttctgaagccactttcacacagccttctgaagccactttcacacagccttctgaagccactttcacacagccttctcaagccgctttcacacaaccttctcaagctaatatctcacaagccatttgtgatgaagatgatgagctcagagtattggatccaccagcccctgcatcagtgagcaaaagggcaaaaaatgttggtactggtaattcaagaacaagaattaacaagcgtacacaagatgggaatgtggttgagatgatgggaaggtttctagaaatgaaagaaaaacaagctgaggcggatgaaagggccacaactaatgcaaatgaggatgatttccctattcaaacatgcattgctattgtggatggaatggaagagttttctgatgatgagaaggttgattcttatgatgtttttaaggatgcccaaaaccgggccattttcatgactgccaaagatgctacgcgcataaaatggttgaggaagaagattgcaagaacatgatatgatatatgaagctaaagtaatgaaggatgattttgtagtatcgtccagcataaagaaagaaagctgcaatttgtgctattgtcagagatggatatttaactttagcaatttgcaacttttaagtaatctgttaaattaaagatgagatcttgcagacttttcttattacctaatggattctcttattagctgattcaaatctaatcatgcatattgtagtaaggactatgtatgttgaatcaatgactctggttcaattttaaatatcacatgtgttttaagtttcttaattttatggcttatcttctgattttattttcttttatttttatctagcggattttttagtaatatgatc

SEQ ID NO: 10554 - DNA, 2262 bp, Zea Mays
aggcaggcccgcatcgcgttcgatttccaaccaatcacactccgaccactgtgaccacacgctcgcgcgcccatggcggcgacctcgccgacgccgacgctggcgaagcctgcagccgccgcgcacgcccgagccccgtccgcgggtcccagacgtgtctccttgacctcctgccgctgccaccgccgccgctctactccgtctcggtggaggagtctcccacgatgcagtcgccgtggtgggaagccggtcgtcacagaggtcatcgacgcggcggcaccggataaggggccagagactgggagcaagggagaggaagagaaggaggccgtagcggggcgcggggcgccggggtggctcaggcttgacggggttgcagcggacatcctcgccatcgccgcgcctgccgtgctcgcgctcgccgcggaccccatcacggcgctcgtcgacactgccttcgtcgggcatatcggttcagctcaacttgcggctgttggtgcatctacttccatattcaatttggtatccaagctgtttaatgtgccgctacttaatgtcacaacatcctttgttgctgagcagcaggcaaaggatggcaattcgaacactggaggtgaaagagatgaatttttgacgccactagagaaggcaaggcaaccaaagaaggttcttccggcagtgtcaacatccttggctctagctgctggcattggattactggaaatggtagctctgattgttggatctgggaccctgatgaacatcattggtattcctgttgattcaccaatgcgagcaccagcagaacagtttcttacactgagggcacttggtgctccaccgatcatagtggcacttgcagctcagggtgcatttcgtggatttctggatacgaggacaccattgtatgctgtgggtacttgacagcaatcatcctcctttggaagttgaatgatgaagtagatctattgtcatggaatataattgaggatggagtcatccgctacctgaaatctggtggtctactaattggcaggacaattgcagtattcttgacactgacactagctacatccctggctgcaagggaagggcctgttccaatggcgggctatgagatatgcttgcaagtgtggttaacaatttctctgctcaatgatgctctagcccttgctggccaggctctacttgccagcgaatatgcaaaagggaattacaagcaagcccgcacggttttatacagagtcctgcaggttggtggtgtgactggttttgtccttgctgcttccttatttgttggatttggatctttgtccttgctgtttacagatgatccagcagttttagatgttgcacggtctggagtgtggtttgtcaccatttctcagccggtgaatgctattgcattcgtggctgatgggctctactatggtgtttctgactttgcctatgctgcatattccacgttttttgcgggagcggtctcatcaatattcctactattagctgctcctaattatggtctcggtggcatatgggctggtcttactctatttatgagtttgcgtgcagttgctgggttctggaggttagggagcaaaggtggaccttggaatgttatcttatctggtcagatagtaagtaaaacaaagatatgaccagattcgattgttcaattgatctcccaccgctagcaggtcggtagcaagaaatgtgcatcctgctgcaggtcatatatagctgacaagcaatatatagcaaaaaatgtgcatcctgcgtgacagggagctgatgcatctctgtggaagatatacgcttgtagttggtgttggatagctgggctatcttgtggctgttgtaggggctcacagctttcaactgtgttgtaccatatactgtataagaaagatctgttcagttataacgaaagaaagaaaactggcttcaaatagaatacaaaaggctgtgtaacgaaagaaagaaagccgagttcaaatagaaaatcccttcatgtaaatttcgttctggaaatcctccttttgaatgaagctttatccaacattctaggattggtaaatccggtaatcatttgtggcattatgtaactcaatgatggtcagaaatataataatctgagttggtttttccgatatgcatcataatcggacattgtatatttgctacgaatttgggtgaacccccagcttcagacaaaagtaatgtgataaaagaaaaggaaagaaatacagaaaaagattaaag

SEQ ID NO: 10555 - DNA, 2359 bp, Zea Mays
aggcaggcccgcatcgcgttcgatttccaaccaatcacactccgaccactgtgaccacacgctcgcgcgcccatggcggcgacctcgccgacgccgacgctggcgaagcctgcagccgccgcgcacgcccgagccccgtccgcgggtcccagacgtgtctccttgacctcctgccgctgccaccgccgccgctctactccgtctcggtggaggagtctcccacgatgcagtcgccgtggtgggaagccggtcgtcacagaggtcatcgacgcggcggcaccggataaggggccagagactgggagcaagggagaggaagagaaggaggccgtagcggggcgcggggcgccggggtggctcaggcttgacggggttgcagcggacatcctcgccatcgccgcgcctgccgtgctcgcgctcgccgcggaccccatcacggcgctcgtcgacactgccttcgtcgggcatatcggttcagctcaacttgcggctgttggtgcatctacttccatattcaatttggtatccaagctgtttaatgtgccgctacttaatgtcacaacatcctttgttgctgagcagcaggcaaaggatggcaattcgaacactggaggtgaaattctcacctaggagatgaatttttgacgccactagagaaggcaaggcaaccaaagaaggttcttccggcagtgtcaacatccttggctctagctgctggcattggattactggaaatggtagctctgattgttggatctgggaccctgatgaacatcattggattcaccaatgcgagcaccagcagaacagtttcttacactgagggcacttggtgctccaccgatcatagtggcacttgcagctcagggtgcatttcgtggatttctggatacgaggacaccattgtatgctgtgggtgctggcaacctattaaatgcattacttgatgtggtacttatttttccacttggtctaggagtaagtggtgctgcactggccaccgtgacctctgagtacttgacagcaatcatcctcctttggaagttgaatgatgaagtagatctattgtcatggaatataattgaggatggagtcatccgctacctgaaatctggtggtctactaattggcaggacaattgcagtattcttgacactgacactagctacatccctggctgcaagggaagggcctgttccaatggcgggctatgagatatgcttgcaagtgtggttaacaatttctctgctcaatgatgctctagcccttgctggccaggctctacttgccagcgaatatgcaaaagggaattacaagcaagcccgcacggttttatacagagtcctgcaggttggtggtgtgactggttttgtccttgctgcttccttatttgttggatttggatctttgtccttgctgtttacagatgatccagcagttttagatgttgcacggtctggagtgtggtttgtcaccatttctcagccggtgaatgctattgcattcgtggctgatgggctctactatggtgtttctgactttgcctatgctgcatattccacgttttttgcgggagcggtctcatcaatattcctactattagctgctcctaattatggtctcggtggcatatgggctggtcttactctatttatgagtttgcgtgcagttgctgggttctggaggttagggagcaaaggtggaccttggaatgttatcttatctggtcagatagtaagtaaaacaaagatatgaccagattcgattgttcaattgatctcccaccgctagcaggtcggtagcaagaaatgtgcatcctgctgcaggtcatatatagctgacaagcaatatatagcaaaaaatgtgcatcctgcgtgacagggagctgatgcatctctgtggaagatatacgcttgtagttggtgttggatagctgggctatcttgtggctgttgtaggggctcacagctttcaactgtgttgtaccatatactgtataagaaagatctgttcagttataacgaaagaaagaaaactggcttcaaatagaatacaaaaggctgtgtaacgaaagaaagaaagccgagttcaaatagaaaatcccttcatgtaaatttcgttctggaaatcctccttttgaatgaagctttatccaacattctaggattggtaaatccggtaatcatttgtggcattatgtaactcaatgatggtcagaaatataataatctgagttggtttttccgatatgcatcataatcggacattgtatatttgctacgaatttgggtgaacccccagcttcagacaaaagtaatgtgataaaagaaaaggaaagaaatacagaaaaagattaaag

SEQ ID NO: 10556 - DNA, 2111 bp, Zea Mays
gcccccgccaccgccattatcagcagcttcgacttctccggccgctccgtccttttggcatttcctcccgtcttctctcgctgcttttcattacctcctcccgcgccgcccgtagtaccgattcgcactcggatggcgtcggcggcgttcaagtccaccacgcgccgcgccctccacgccaccaccacctcccgctccgacccgcccccgtgcccgcgccgcacccgctcgcgctccgtcagcgcggcgccccgcgccgcccacgaggactacgccaacacgcgcaccaacccgctcttcgactccgcggcctccccgtccgcctcgccatctccgccccccggggcggctgctgctactggtgctacctccggccgtggggatgcggcgggccgggagagggggcgtgagccgcggctcaagagcggggggcgcggcggcggtggagggagggcgcggtcggcctccgtcgcgccgccgcagcggcgccacaccgcctcggtggcggactctgctgccgatgtcggcgggaggaaggcttcgcgggcgcggtcggtggccgacgtcgcacgcacctaccggggctccgagaccgatgcagaagccaggggtgtggcaaggaaactgcagtcatggaggagccagcattcagttccagaggggaagcgtaagggaactgatgcaagttgttcatcccaggggtcaacaaccggagcggggtgccggcaaatggatgaaactacacagtcagaatctagcactgttgtttcttcacctggccatctcgagcataatatggaaagaaaaatgttgtggaaatttctcttgagtccaggaacagtgcagcaaaacagcactgggagcaaatggaaatttctcttgagtttgatacagatgcttctgagctggtttcagacacatggcaccatggagcaaaccagcaacggggggaattggaagcttctcttgagtttgatcctgacacctctgagctcgctcctgacataacagaatatacattaaaactaaaacagtcacatgaacgtgctcgaaagcttagggcagatttggcagttgaagagcagcgggaacaagaactgagcagaatgctgaagggcatagtaacagatccaaactttactgagacacataaaaaacggccaagaagaaagagtagcatagaaagactgaaagtgtcaaggcgtttagctgaagaggcaatgaactattttgaggaatgcgtttcaatttcaacaatggatagcactgatttctcatcacctgaggatcctcaaccaaattcagttgtgaatgtcccaccaaagagcaatagtagatttttccacaaagggagatcaatctttcaagaaccccacactctggctgatcaacatggatatcatgtggaatctgacaagcaaactcagtgctcaattagcgcaactggatccgatgtgtctgacagtgttatctttagtcacacaaatggtgctggtttgaaaatcaggagcgtctccagcgatgatcctgatggctttgacactccgcggagcagaagttcttgtttctctttcacccacgagccagtaaaaaagctcgaaaactgcgatgttcggcaataccttgggaatttcggaagggggaacaatacagagctaaaggagacgaggtcaagttattttgccgatgactatgcctcacagaaagttgatccggacttactgaaggatatggtgacctttcagaatcggatagagtatggagggctcgttatatgtaacatcagaacattctgacagtgaacagagccactgtccgaagaagctaagtatagcattgtgcaattatccttttggcgaatgtggttttttggtgactgctataatcttttgtcatgtttctctactaattatcaatgctatgctataatctgtgtggctgtgtgcgtcgtatcttgtatgcgatccacccggattcataatccgtatttctaacgagacagaacaactcctatccagtggtatatattagttagattccttaggccgtgcttagcagatcgtgcaaaactctttttttttactatagactgtattgtttgtatgttggag

SEQ ID NO: 10557 - DNA, 1414 bp, Zea Mays
gtagtggcgtcaagcatctgatgtgctatgtgacaagtgggtaccacagaagctaaaagttaatgtaagcgctggagatgttgcttctctcatatatttgtggaacccttgggcaatagtcacttgtgtgggatcatgtacatcaccaatcgagaatctaatggttgtaataatgatctacggatcctgttcacgtctggctcctcttgctgcttttggatatgttatggccacacacctctctctttatcctgcaattctcatagtaccggtcattctgttgctgggttatggtctagatgctcctcctccaaaagtatttgttataaaagggtcaattgccagaaaaagtgatgtgtcagacaatgataaaacaagcagacagagagttgttcagcagttttcatggaaaccagtacttcactttatattttggctgttcatctggtcgtgccatgtgttgttattgagcagcgtgattttgaagaaagttggtggcctccacgagatgtttgaaaagacgtatggttttatacttacagtgaaagacctatcaccaaatattggtgttttgtggtacttctttgctgaagttttcgacttctttagaaatttctttcttatggtattcaatatgaacatcatttttatggtcttaccattggccatccgattgaaacatcgtccgtgctttcttgcatttgtttacacggcaattgtggcaatattgaaatcttatccatcggctggagattcagccctgtatcttggtcttctgggcttatttgtcaacgaattagcagttcacattcttcttgttttttggatatattggagtctccctacttagccctgtcatgcataatctgtggatctggaggggcactggtaatgcaaatttctacttcgccactggtttggcttatacttgccttcagactgtgttgctggtagagagtgtaagttcaatgataaagcacgacagaaagttaaggctacttgttacaagctaatttggtcctcataatcagaagctcaagtggtggacagctccgatgcttgcaattccctacatggtgctcttgattcttgaacacaaacagctcctcatcttggagttcgtagatgtaggtcatattcgatgtagcatgttgtactgtagaccccacacttgtacaatactaggaccgcaactctttcaacaaagacaaggaacacggtagggctcgtccttggtgactagtacgtagttgtgttcgctaccgagaattgttgtggatcctggctgtgatgttcagtgatccagcttggttgaactgccctcacgtacatttaattccgtcagtctgatggatcaacaaggaaaccaacatttgaacgtttaaccaaactgatatctaattttcgtttcttc

SEQ ID NO: 10558 - DNA, 1384 bp, Zea Mays
cgaattcgcccttgtttcataaaggtcagttggaacttagacacgcttggtgatttcgtgattatgagaagcaatggacagcctgtgtataacttttgtgtgacagttgacgacgctaccatgcaaatatctcatgttatcagagctgaagagcatctaccaaacacattgcgacaggctttaatttacaaagctcttggattcgcaatgccttcatttgctcatgtttcgcttattctggctcctgacaggagtaaactgtctaaacggcatggagctacttctgtcgggcaggcaatggtcaattatttagcactactgggctggggtgatggcactgagaatgagttcttcactattgatgacctagtccagaaattcactataaaccgtgtcaataaaagtggagcagtctttgatgcaacaaaattgaaatggatgaacggacaacatctaagatcatttccccatgatgaactcatcaaagcttttgaagatcggtggacggacacaggcattctccaggaatctgaaagtggttttgctaaggaagctgccgagcttttgaaggatggtatcgatttgataacagatgcggacgcagctcttacgaatctgttgtcatatccccttcatactactctaagcagcgaggaagctaaacctgtggtgcaagacaagatctccgaggttgcttggagtcttatttccgcgtacgacagcggcgaactcggccaagcgctagctgagggccgtgatggctggcagaagtgggttaaaggtttcggcaagtctatcaaaagaaagggcaaggggctcttcatgccgctccgggtactgctgaccgggaagcttcatgggcctgacatgggtggcagcatcgccctaatacacaaggccggcgtctgctgcgctgtgactccgcagtccaacttcgtgactctagacgagcggttcaggatgctcaaggacgtcgactgggagtcgctggcgaaggagcaggaaacccctgctgtccctgccgccgcttcctagactgccaggaggaggacgacgttgcgcgcaatgtcgctcttgagtttttttttaaaaaaaaaatccattttggcgtgtttttgtcaccgttcgtttccatggagtaggagaggagctcagtggtttggtcataggtcgttggtgctgtaatgtgggcaataatattgaattattattattagatgatgatgatgatgcctgtaatctgcgtgtctacagcttctcgtttgctgaatacttcatctttttttttgacaagtgaatacacgattattacaggtgttcatacgcatgataaaactgttgggcactcgggcgctgcccgtgatggacatagattgttgggcct

SEQ ID NO: 10559 - DNA, 2097 bp, Zea Mays
gcgaggtcgaggcaaagaactcatcgcgtggatcctccatttgggtcaacacggctggacgtggaatccaacccggggtgccagcgcacacgacaccggtcaccgcccgcctccttgtaggcttgtctgccagatcgaaggcaagcgcgggcgccggcgtggccttgcgatggagagccccacgtcgacggcgtcgcgccccgacttctacgacttcctcgaccgcatgcgccgccccgccgccgccgacctattccgctccatcaagagcttccttgtctccttctccttccacgcgcccaacgccgaggaggacggcagcaaggtccaggccttcctcgcggagatggagagcgccatcagggaccacccgctctgggccaacgccaccgatcaggagatcgaccacgcgctcgagggcctggagaagtatgtcatcaccaaattgttcgaccgcacgtttgggacttccactgaggatgccgttaccgacatggacatctcggagaagattggtctcttgcagcagtttgttaagcctcatcacttggatatacccaaggtcctgcataacgaggcatcgtggctgcttgcagtgaaagagctgcagaagattaattcctttaaagcaccacgtgagaagcttctgtgcatcatgaactgctgtcaagtcatcaataacttgcttctgaacatatcaatgtcaaatgatcgaacattatctggggctgatgagttccttcctattcttatctatgttactatcaaggccaatcctcctcagctgcactcaaatctgaagttcattcagctctttagaagagaaacaaagctaatttcagaagtcgaatattacctgactaacctcatttcagcaaagatgtttataatagatgtcagtgctcactcgctctcaatggaggaaagcgagtttcagaaacatatggaatcggcaagactagctactcaagtatctgttgcaagcccaagtagctcacaggggcttcccacatctgcaagggcaaatcaggaggaaactgatatggcaggttccagattccctttcatggactcagaaactgaaagcttgactccaggggaagtcaagcagctgcatgatctgtataagcgagttgtcacaagatacacgctgttgtctgaagccttaagaaagtcatccatagacgaggatcagctccttaattcagtgcatgatccatgaggtgatgtgaagatgatgtctaggcatgatggtattaatcataagcaggcctcgtttccattagttgcaggccttataggggaaagaacgaggtcctagataacgaatgttccagcaagtcctacgcaatgcagggcacaacagctgtgagttgagcattacgcatgggaaggatggatcttctgaaatcagtgctgaaggaactggaaattggcacacatgacatattgccttctaactcatacaatctgccaccagatgtctcacagttttggtgccgatcggcttcctgcaatggagaatgtgaaaatcgaacctggaatgtagggcagaaaaccactactgaggcaggcggggataaagatggagtaacataggctgggaaatgtctagatctcttgccatactacacatgggagtatgcgttggatcccaatgttctgtagttagtgttgagccttgaggttttagagctgtagtgttggggaaaatgtgagcgggtaacactgatttttaacagctgatgtgctgctccgggcaaattcagtcgggcgttatgctaatgaagattatgtcaaaggaaaatatgaccaagggtgaaaggagatttatgtagttcccttttagttacacatctgattttattttaagcaagtacggatgagggatatccgtggtcaagtttgatgcttcaggttgaggtgaaatttcgttatttggcgactcagtatgcccacctcactgtgtaatctttatatctcaagcgtgtaaaaggatgcccaaaatacaactgtatagatcatcgtggatcactcgatcagctcatatttattctatcaataaaggcaaatataagactaactacattctttata

SEQ ID NO: 10560 - DNA, 1344 bp, Zea Mays
acttggttatccatacgatagatatgtccccaaggtggccatgaactgagtaagtcaacaggaaacgcaggagctagaattggatgtggtatcattggaattcagtcatcagtttgacaaataacggcttagtagcaccagaaaaagagggggacatgattccacagtccgtgcagtgtcgtggtttagggatatggaaatggtgttcgttgttctggaccgtttgaagactaaatatctccagtcatgtatacaataatcttacagtcggtgaggaaattgcttgtaaaatcttgcattgacttatatcactggttaccagcagcaataagtctatatgtaaaacttctcgatttgtatatgctatgcttcctgtggagcagggaagcgaacacaagtcagccttttgtgagtgcattctgtccagtttttacttggtcatctcgtattctcgtgtgtgtcatgaccaagtggcaagctcaatcctggtattgttgtcttgtctcaaattaaatcgggttccacaagttaaccagggaatcatttttcttccctaggatggcaaatttggcggtggatttacttgcagtgtccactgatacgtgtccgtcttattcgcttgcacctattataccaacttcaaactagcttgcggtagatgccggtgctaactggttttaaaatgtccattcactgacccacccccttttatttttgtcagccttcttgttgcacaggaatcaaacggcaggcaggaggcagcttatgacgtccaagcaccagctagcctagccggccactcatccttgcgaggcaggaaaggattacagtcccaagacactgaacaatacagcttcgcaagggatcgagaagcagacaagaagaagagaacgggcaacgtcgatacggctaaaaggacggtaactggtaccaaggtcagccctcgcaagaaatgcctcgacgggaaccggacacccgggaagacgtcaggcgcgagccgtgcccgcccgtcccgacccaggcgtgcccaaacaacgatgcacgccgtctcggcgcgacgcgcgcacccgtcggcatcaaactgtgcgctggacgggaccggtcggctgagcccgggaggatcggtggacggccttggagccttctcccttggccccgggcggacgccgtgcgggcgcaacgggatgccgcggggccgcgacgccggctacggacaccgcccgcgccccgggccgatgccgccacggagaagcggctcgtggactttccgcgttcgagatgaaccaagtcacgagccgacgcgcccagctcgcgcgcgctactcggaacggacggagcggaggc

SEQ ID NO: 10561 - DNA, 2810 bp, Zea Mays
ccaaatcccctcccccctgctcggccacaaacccacaatcccgtgtctccggccaccgtgctgcgcaggccgaggcccgagcttgagcgtttggtctgctgccatggatgacgaatctaagtctgctcctaaatcggatgtgaacaccgacgctggcgcggaagccgcggcggccgccgctccgctgccgccctcgagctcagaaacggcggagacggaggcaagggttgaggcggcggatggggagagccaggtggttgagcggttggtcgagcttgtgagcgagatcgcggccatctcggacttcaggaactcgtaccggcgtcagttctgcaacctgtcgcggcggatccggctcctcgtgcccatgctggaggaggccaaggaagcgcccacgccacttacggtggcatcggaggccgcgctacggcggctcagggaggcgctccacgccgccagggatctgctccagctcggcagcagcggcagcaagatcttcctggttcttgatagagagaaaataatgaagactttccaggatgtcactgcaagacttgaacaagccttagctggtatctcgtttgatgaacttaatatatctgatgaagtaagagagcaggttgaattggtgcatactcagttcaaaagagctaaggaacggtcagattcatctgatgatgatctttttaatgagctgatgtctctatgtaattcaagcagcagtgatagtgttgacccagatactcttcgaaggttatctgagaagttgcagcttgtcacaatatatgacctcaatcatgaatctctgaccttgcatgagatggctagtggcggtgatcctggtgcagttgttgaaaagatgtcaatgctcctcaaaaggattaaggattttgtgcagacagaagaccctgagatgggtgcccaagcaagtacagcaaccatttctacaaaagacaattcagcatgtcctgttattcccgatgatttccgttgcccaatatcactggatttaatgaaagatccagttattgttgccactgggcagacttatgagcgggggtacatagagatgtggctggaggctggccatgatacctgtccgaagacacaacagaagcttgccaataaatccctgaccccaaattatgtcttacgtagtctcataactcaatggtgcgaggcaaatggtattgagcctccaaaacgccctgctcaacttagggatgcaccactgtcatgtagtgctgctgagcatagcaatgttcttgagcttcttcagaaattgtcttcccaaaaccttgaagatcaacgtggctctgctggtatgcttcgtcaacttgccaagcgcagtgctgaaaatcgtgcttgtattggagatgctggtgctattcctattcttgttagtctgctatcaaccactgatgttagcacccaggaacatgtggttactgctctcttgaatctttccatctacgaagagaacaaggcaagaataatatcttctggagctgttcctggaattgtgcatgtgttaaagaggggcagcatggaggctcgggagaattcagctgccacacttttcagcctatctattgtagatgagaacaaggtgactattgggtgttcaggggcaattcctgcacttgtgcagctattgagtaatggaagccaacggggtaaaaaggatgcggcaacagcactatttaacttgtgtatttaccagggcaacaaggggaaagctgtaagagctggattggtacctatactactagaactgctcatggagactgaaagtgggatggtagatgaggcccttgcaatattggcaatcctctcaggccatcctgaggggaagacagctatcggcgctgcttctgcaatacctgtacttgttggagttatcagaaatggatctccaaggaacaaggaaaatgctgctgctgttatggtgcatctatgcagtggtgagcagcagcaacagcatcttgctgaagcacaggagcagggcatcgtgtctttgctggaggagctagcagaaagtggcacggacagaggaaagaggaaagctgtgcagctgctcgaacgaatgaatcggttcctaaagcagcagagtcaagccgaagccgaagcagaggccatggcacaggctcatgcacaagcacaagcacaagcacaagcacaagcacaagcgcagcctcagatcctggttcaagctcaagcacatgcagatatgcaagctgaacgatcactacttcccacatcatctgacatttcggatagatgaggtttttgatcagcagcttgttttgtttctggtttctgttgaacactgcaaattaggaggtctgggcagcgtgatttaggtccatgagcatgttgacaggtgggttctgagtcagtttttaacctgcgtgtgttcgtaaaatgtaccggtgattgaaggtagtaagtatatcctcgagttttaggaggtatcgttgaacttgtacccggtacgagcccagtacaggactaattctggcgccctaggctaagtgcctgacaaagttgcaggaaagctttagttcagaaaaatgtttgttcatcgagtccggtgcagttggttcagctgtcttctgtgagttgtttgcgttgaaaaaaagcggttggttcagctgtcttgtgtgggttgtttgttgtgaaaaaactgccgcaagctgtatgctgtgaaaagttaaaaatcgtttggcttaagctgctgtgaaacagtagacttaacaagatttggctgtgttgtccctgagattgtttatatgcaaattgataataca

SEQ ID NO: 10562 - DNA, 755 bp, Zea Mays
cgtcttcattctttctccctgcccctgccctcgcctgctgaaggaagccgcctttttggagtttggactcgggaggacagcctccgcactttccgtccgtcgcgaggaattcctgcccgggcgggcgtagagcagggatggctggaaaaggaagctatgtacctccacaatatattcccttatacagcctagataccgaagaggatcgtgtccctgccgtggaagagaaccatgctacgcgccctaaactaaaccaggatccaacacaatggtcatctggcatctgtgcctgttttgatgacccccagagctgagtacagggagatccgtgagagaacaggcagtggctcctcaccagctcctaatgtgactccacctccagttcagacgatggatgagctttgatctttaactgatatgaatgtatgttatctgacaaactttggtgtgtggcctggtgactagtgctgcctttgcctgttggcattttgacatatttttgttcttgggctctcacaacgctgctatgttgtttgtagagttgtaaacacgttttgaactagtgaaccactgacagttcacggaagttgtaacacagttgtaccatggaactgtagtagaattaagtgtatttttttgctatttatataggtgagaggatgagaagggaaaagaaaagaaatgcgcttatcatgcagaatgtttcattgtgtttagttctatgaacaatccaatattgtggtgagtggttgttt

SEQ ID NO: 10563 - DNA, 1338 bp, Zea Mays
cgtcttcattctttctccctgcccctgccctcgcctgctgaaggaagccgcctttttggagtttggactcgggaggacagcctccgcactttccgtccgtcgcgaggaattcctgcccgggcgggcgtagagcagggcgaagcattcgttggggacgaacgtttagggccggggatcggggaacacgaggctgcgcgttggcgcaagcaagcaaattttgggtcctagcttgaaggactgccatctttttttttgctccactcgagaatttgaaggaattttaccaacgtggggagctgaattttttttctgctcctcacattttccactctccacccgcgcctgactgcagctggctgcgatccccctatctaccacctgattcatctttgtctccgtcggtgccgccctctccgccagcctgaccccagggatggctggaaaaggaagctatgtacctccacaatatattcccttatacagcctagataccgaagaggatcgtgtccctgccgtggaagagaaccatgctacgcgccctaaactaaaccaggatccaacacaatggtcatctggcatctgtgcctgttttgatgacccccagagctgttgtattggtgcgatttgcccctgtttcctttttggaaagaatgcacaattcttgggatctggaactcttgctggatcatgcactacgcattgcatgttgtggggccttctcacaagtctatgctgtgtatttactggaggtctagtattagcagttccaggatctgccgttgcttgttatgcttgcggatatcgcagtgcactaagaacaaagtacaatcttccggaagcaccctgtggcgatttgacgacacacttattctgtcacttgtgtgctatatgccaggagtacagggagatccgtgagagaacaggcagtggctcctcaccagctcctaatgtgactccacctccagttcagacgatggatgagctttgatctttaactgatatgaatgtatgttatctgacaaactttggtgtgtggcctggtgactagtgctgcctttgcctgttggcattttgacatatttttgttcttgggctctcacaacgctgctatgttgtttgtagagttgtaaacacgttttgaactagtgaaccactgacagttcacggaagttgtaacacagttgtaccatggaactgtagtagaattaagtgtatttttttgctatttatataggtgagaggatgagaagggaaaagaaaagaaatgcgcttatcatgcagaatgtttcattgtgtttagttctatgaacaatccaatattgtggtgagtggttgttt

SEQ ID NO: 10564 - DNA, 1358 bp, Zea Mays
cgtcttcattctttctccctgcccctgccctcgcctgctgaaggaagccgcctttttggagtttggactcgggaggacagcctccgcactttccgtccgtcgcgaggaattcctgcccgggcgggcgtagagcagggcgaagcattcgttggggacgaacgtttagggccggggatcggggaacacgaggctgcgcgttggcgcaagcaagcaaattttgggtcctagcttgaaggactgccatctttttttttgaacgcatttttgccggccagctccactcgagaatttgaaggaattttaccaacgtggggagctgaattttttttctgctcctcacattttccactctccacccgcgcctgactgcagctggctgcgatccccctatctaccacctgattcatctttgtctccgtcggtgccgccctctccgccagcctgaccccagggatggctggaaaaggaagctatgtacctccacaatatattcccttatacagcctagataccgaagaggatcgtgtccctgccgtggaagagaaccatgctacgcgccctaaactaaaccaggatccaacacaatggtcatctggcatctgtgcctgttttgatgacccccagagctgttgtattggtgcgatttgcccctgtttcctttttggaaagaatgcacaattcttgggatctggaactcttgctggatcatgcactacgcattgcatgttgtggggccttctcacaagtctatgctgtgtatttactggaggtctagtattagcagttccaggatctgccgttgcttgttatgcttgcggatatcgcagtgcactaagaacaaagtacaatcttccggaagcaccctgtggcgatttgacgacacacttattctgtcacttgtgtgctatatgccaggagtacagggagatccgtgagagaacaggcagtggctcctcaccagctcctaatgtgactccacctccagttcagacgatggatgagctttgatctttaactgatatgaatgtatgttatctgacaaactttggtgtgtggcctggtgactagtgctgcctttgcctgttggcattttgacatatttttgttcttgggctctcacaacgctgctatgttgtttgtagagttgtaaacacgttttgaactagtgaaccactgacagttcacggaagttgtaacacagttgtaccatggaactgtagtagaattaagtgtatttttttgctatttatataggtgagaggatgagaagggaaaagaaaagaaatgcgcttatcatgcagaatgtttcattgtgtttagttctatgaacaatccaatattgtggtgagtggttgttt

SEQ ID NO: 10565 - DNA, 2199 bp, Zea Mays
acgtgtgtcgtaattctttcaaccgttcgattggacatccacggcatgtcggctaacatgcagcgcccaaatccgtcgccttccattccaagctgtcgccactggattcttcgagagatagctcactgcgctgcggcgataccgaacgtggaaaccctatcggccgctgctccttcaaggcgtcagcgtcatcttcgtcgaactgccagcaaccgtgcgttctacggttcttcggcgccgtccacggccccatcccccatgcaccctatcgccggctgcttcttcaacgcatcgtcatcgccgtcggctgcttcttccacgcgtcatcgtcgtctccgtcgaactacccatgatcgtgcactccttgcttcttcagtgccgtccatagtcctccgcaacctatcggtgcctgcttcttcaacacgtcgtcatccccgtccaactgtcggcagcggcgagctctacacaaagcttcggtggaatttctgtgcgacacaggaatttggatggtccaatccatccgaccaaataaactggtgtgagaatcggcagcagctgctattgcagctataccatgcgcatcttcaatgtgacataggtattgaacttcatttacatttcctccgaaatgcgaacaatttgtttgaatagtctaaaatttatattcatagtacttatagtttccttttttgtccaccatacacaatctgttacctatttgcatactttaattttatgctcctagcatatcactaatgcgctgcgacatgcagttacactaccggaatcgccgtctttgccgagtgcctgaagcactcggcaaagtcttaaaaacactcgacgctataaatctgtttattgctaattagctccttttgtaatctttaagaccaatgcttctaagattaagaccaccctgctcctaacctgcttctgtggtcattaacaccactgcttttgatccacattcatatagctacgcctactgtattgtaatctctaagctcttctataatataatctctaagaacttcatgctgttacatttccagaacttgaaaacttcattactacaaaaaaaagtacaatccaagttggctattatagctaccttacgtcatatattgataccttatcaaattgaactcagcgctacaaatctgtttattgcatttggctacaatgttccatcaatgctaagcttcagcacttgcattttacgtacacttagatttgtatgccgttgtctacccatctttgtccaaaaccatgaaacgctttgatttatgttgatataatgttcacaaaaaaaatttagttactatccagtttgatacaagttaattcaactgtgctcatgtaccgtttgtaccactcgcgagtttctagtaaagattaaggcccttttcgtttgttctggaacattccagctagaatggtatgtttatttatattaacatagattagccagaatagctcctggtctcaaaccgacgaggagctagactatctacagtgcatgcttcttccattcgtcctcctgtagaggcttgtcgcttcgtgccctccatggagcacactactttgcggaggtcactctctctctccaaggtgctatcgacgccaccatggctggggtggaggatgaagacaagttcaaggacgctccagcagtcgccgatcgccatcgcaacgatgcggcggttgtgtgggcggcgccgcgccacgacacccaatcagcattcgcagcccaccacctgcggcgccggcggagggggcgccaccctcgagcgccactgcaagtggccgttgttgacctcgtcttgagagccaaagaagaggaagttgtcgatgctgacctcgtctcgagagccaaaagaagaggaagttgggggactctgggtcggcctcgggtatgtggagtgggaacaaatggttttttttgttgacgatgatgcaatcggggtttaagaatcgattaaattttgctcctgacaatattatttagtaacaatgtcaaaataattacaattaacaataaatgtgtaaccatgtatatgatacactatttgtttatgttgaattaaaagaaagagagaaagataatagttagggtagttgagataaaaatgttatgctcttgtctgatactcaaagaaaaagcaaagaacgatcaaatttcatggtcgaattactata

SEQ ID NO: 10566 - DNA, 2631 bp, Zea Mays
ccgcctcctcccctactccggccgcagccgccgacgtcgccattcgcattctgcggcgccaatcgataggggtcagcgagtggctgggatggcgtcgtcggcgtccgcgccagcgtccacgggcccgcgctacgccccgccggatccgacgctgcccaagccgtggagggggctaatcgacggcaacacggggtacctctacttctggaacccggagacaaaggttacgcagtacgagcgtcccgtcgctgccgtgcccgccccccaatcgcagccgcttgtctactccaggcccgatgatgtgccgagaagcagcgcacctgccgagcagcgctcggaagctgcggtgagccgcccgcaatttgtgcctccctccgataacaggacaaggattgatcactcagagtcaagctctgcatctggagtgaacctttcacaaagtgctctgtccaccaatcaagtttctcagtatgccaatgggagccaaatgtcaacagaagcatatcgtgccaagcatgagattactatcgtcggcaatgaggcacctgcaccattcatgacatttcaatccacaggcttcccatcagagattctaagggaggctcttcaagtcaacaatccaagtcgtggttcgacctgtttgttgtcttgtacagcctcctgtggttctgcaagcaggattctctgcaccaactcctatccaagctcaatcatggccaattgctctaaggggtcgtgatatagtagctgtggcgaagacagggaattggcgacacaaattcaagatgaagcaatcaagtttggcagatcttcaagaatatcttctacttgcttatatggaggtgctccaaaaggccctcagctaagagagttggagcgtggtgctgacattgttgtcgcaactcctgggagattaaatgacattttggaaatgaatagagtgagcctgcaccaagtatcatatcttgtccttgatgaagccgaccgtatgcttgatatgggatttgagccacaaataaggaaaattgtgaaacaaataccaccgaaacggcaaactcttatgtatactgccacatggccaagagaggttagaaaaatagcgtctgatttactggctaacccagttcaagttaacattggaaacactgatcagctagttgcaaataagtcaattacacagcatgtggaagttatcccacatatggagaaatcaagacgacttgatcagatcttgcgctcacaagatcctggatcaaaaagcataatattttgctccactaagaggatgtgtgatcagttagctcgaaacctatcacggcagtatcgtgcttctgctattcatggtgataaatcacaggctgagagggattctgtgttgaatgactttcgaagcggcaggtgtccagtacttgtagccactgatgtggccgctcgaggcttggacataaaggacatcagggtcgtggttaactatgatttcccaactggtgtggaggactatgtccatagaattgggaggacaggtagggctggtgcaacaggatctgcctacacattcttcggtgaccaggattcaaagtacgcttcagaccttgtgaagattttggagggtgcaaaccaatctgtgccgccacagttgaaagaaatggctcttcgtggaggatatggtggaagatcacgtcggtgggcatcttctgatgactcttatggtggtcagggatatggtgctaaaagatcaactgatagcttcaataataacaacttcggcaaccaggctggaggtggttcaagctttcactcgagctccagtggcggtcagtttggtgatactacgagcttccatggcagcttcgataacagtgtccgcaacaatcagacgggggacaatgcgagctttccacccagctccagcaacaatcaggctggcgatggtctcagttttcatgaaaggttctatggatcacgtggaagggaccagagcagaacaagcaatgatggattccgtgccaggagcagaagtcctcctggcaagcccgtggaagtttccaactggtgattgcatccactaggtgcaatccaatttttgcgatggtgacgaaaccaagtagaagatggcaccctaacaagttatattatttccttttcttatcctgcttagatccaaggatgtgatggtctgaaccctaacggtctcctgctatcttgatttgacgtctgggagacgcttgattccgtgcctgtgggttgtaaagcgttaaaacttgactttgctagtgtactcccaatgatataacccaatcctgggtaaacaaacgcatggggatgaattttggacgaaaccatggacaactgatgtgtgtttaatgtcatgtacaatctatgtcgaaggctgttgtaaatgccgtccgcatagtttatattgagatgagtgtctgttattgcatgtgttcgccgtggtttgtaaacgcatgtgttgtagacagccacttgacgtagctgttcgccgtggtttggaccttggaggttgtactaaattctaatcgtatggatggctggaacacaaaagtccacgagtctagtcgcgtaaggatgcaccatagtcacaaaaagtttctggatcgatagaatcga

SEQ ID NO: 10567 - DNA, 2743 bp, Zea Mays
ccagtctctcccgtgtctctgccgacctctttccctcactcgcgtcgtgttgttatcgtcgtcgccgtcaacccctctcttgcgctgttgtcaccatcgtcgacaccttctccttttaggatcatagcgttacgcctttttattgttcggtgacgaaaaaaaaaccccaattgtgtccgcctcctcccctactccggccgcagccgccgacgtcgccattcgcattctgcggcgccaatcgataggggtcagcgagtggctgggatggcgtcgtcggcgtccgcgccagcgtccacgggcccgcgctacgccccgccggatccgacgctgcccaagccgtggagggggctaatcgacggcaacacggggtacctctacttctggaacccggagacaaaggttacgcagtacgagcgtcccgtcgctgccgtgcccgccccccaatcgcagccgcttgtctactccaggcccgatgatgtgccgagaagcagcgcacctgccgagcagcgctcggaagctgcggtgagccgcccgcaatttgtgcctccctccgataacaggacaaggattgatcactcagagtcaagctctgcatctggagtgaacctttcacaaagtgctctgtccaccaatcaagtttctcagtatgccaatgggagccaaatgtcaacagaagcatatcgtgccaagcatgagattactatcgtcggcaatgaggcacctgcaccattcatgacatttcaatccacaggcttcccatcagagattctaagggaggttctgcaagcaggattctctgcaccaactcctatccaagctcaatcatggccaattgctctaaggggtcgtgatatagtagctgtggcgaagacagggaattggcgacacaaattcaagatgaagcaatcaagtttggcagatcttcaagaatatcttctacttgcttatatggaggtgctccaaaaggccctcagctaagagagttggagcgtggtgctgacattgttgtcgcaactcctgggagattaaatgacattttggaaatgaatagagtgagcctgcaccaagtatcatatcttgtccttgatgaagccgaccgtatgcttgatatgggatttgagccacaaataaggaaaattgtgaaacaaataccaccgaaacggcaaactcttatgtatactgccacatggccaagagaggttagaaaaatagcgtctgatttactggctaacccagttcaagttaacattggaaacactgatcagctagttgcaaataagtcaattacacagcatgtggaagttatcccacatatggagaaatcaagacgacttgatcagatcttgcgctcacaagatcctggatcaaaaagcataatattttgctccactaagaggatgtgtgatcagttagctcgaaacctatcacggcagtatcgtgcttctgctattcatggtgataaatcacaggctgagagggattctgtgttgaatgactttcgaagcggcaggtgtccagtacttgtagccactgatgtggccgctcgaggcttggacataaaggacatcagggtcgtggttaactatgatttcccaactggtgtggaggactatgtccatagaattgggaggacaggtagggctggtgcaacaggatctgcctacacattcttcggtgaccaggattcaaagtacgcttcagaccttgtgaagattttggagggtgcaaaccaatctgtgccgccacagttgaaagaaatggctcttcgtggaggatatggtggaagatcacgtcggtgggcatcttctgatgactcttatggtggtcagggatatggtgctaaaagatcaactgatagcttcaataataacaacttcggcaaccaggctggaggtggttcaagctttcactcgagctccagtggcggtcagtttggtgatactacgagcttccatggcagcttcgataacagtgtccgcaacaatcagacgggggacaatgcgagctttccacccagctccagcaacaatcaggctggcgatggtctcagttttcatgaaaggttctatggatcacgtggaagggaccagagcagaacaagcaatgatggattccgtgccaggagcagaagtcctcctggcaagcccgtggaagtttccaactggtgattgcatccactaggtgcaatccaatttttgcgatggtgacgaaaccaagtagaagatggcaccctaacaagttatattatttccttttcttatcctgcttagatccaaggatgtgatggtctgaaccctaacggtctcctgctatcttgatttgacgtctgggagacgcttgattccgtgcctgtgggttgtaaagcgttaaaacttgactttgctagtgtactcccaatgatataacccaatcctgggtaaacaaacgcatggggatgaattttggacgaaaccatggacaactgatgtgtgtttaatgtcatgtacaatctatgtcgaaggctgttgtaaatgccgtccgcatagtttatattgagatgagtgtctgttattgcatgtgttcgccgtggtttgtaaacgcatgtgttgtagacagccacttgacgtagctgttcgccgtggtttggaccttggaggttgtactaaattctaatcgtatggatggctggaacacaaaagtccacgagtctagtcgcgtaaggatgcaccatagtcacaaaaagtttctggatcgatagaatcga

SEQ ID NO: 10568 - DNA, 1165 bp, Zea Mays
aacacagaagcgtcgctcacatcaacatcacatgttcacatccatcttcgaaccccttcttcctctcttcagcgccgcacccgcgcccgcgccgtcgaaggcggcgcctagtctcgaggcttgcacgctgccgcggaggatcgcctcgctactgcgcgccatcgcctccgatctcctctatctccaatctgctccctcatcgccgtgcagtggaaactaggggaccgattcctcttctcgtttgtcgcatatttctcgctgcgtgccgcgtgctgcggtgagtgattctccaagaattctggggacgctgatctgagtccgcacagaacgcagcggcagcaatgatgatgtcggacgatgacgatgctgagccccagctcaacgcggtggagggctactacttcgttgactccaagaacgagaaggagcctgtctgcttctccaccctgcctttctggttcggggacactgatgatcttcctgacggcaagaagaagctggtgctgcgcgggactggtgacccgggcgtcaaggtgtacgatgaggtggtggcctgcaggctgggtctcgaggggaaacaacccgagtttgcagtgctcacagcaaaaggcagacgttggatacgtctcattaggcccttgaacagctacgaggaaatgatcaggactgtgttgatcacagcgcagatgctgcattttctaaggaggaagcctcatgagccagaaaaaaccttgtggaaccacctttgcaaagtttttaacaagtttgacgttccaccctcagaggacgatttcaggaaccactgctcactgatgaagcagtttgcggcaaaagatcctgtcttagcaaaatcagagattttgcgagtatttattgaaggaaaatctagaaaaaaattcactgaggttggtgcagaccatattgatgtcaagcagccgttcatcactgatgatgagggcatagatgaaatgaatgtggaagatgtcgataatgaatctgatgaagatgacgatgaatatttgtttgattcaatatgtgctatttgtgacgatggaggagacatattatgggcactgacatgctggttatacatgagcccactggccactcacttgcccaatctcagcggaatgtatatcaatcatctgtctggaatctgtggttg

SEQ ID NO: 10569 - DNA, 813 bp, Zea Mays
gccaattgttctgcatgcggcttgatttcctctagactgtagtagtttcacttcctcttgagttttaggcccaggataaacaaagctttcctttttccctgcaaacaagtactcctaaccattggaattgacagcatgacagggaagccaagaaagaagcgttcaggaagtatcttgaatccagtggcgtgctcgataccctcacgaaagctcttgtggcgctgtacgaggagaacgataagccttcatctgcagtcgaatttgttcagcagaagctgggtggcccgtcaatctctgactatgaaaagctcaaggcagagaagctggacttgcaattgaagtatgataagcttttagagacccacaaggaaacatgcagacagctggaggaacttaagaatatgaagtacggtgcaccctggaactgaaataacgtgtgttgacattgtaaatgtatcatgaagcatgtactttttacacctctctgaagcattgctaagctctttatacaatggaaacatctctcatgtatctgattttagccatctggatcccttttggattatgaagacacccaactcactgtaggtcccaggtatcagatatcaccaatgcaggataaaggatgtgacaactatcatagttgaaccatgagcaattgtttaaccagtaatacagtatcgacaaagagtgtggtctattgacttgagacttctcttggcatggcttgtaagcagattttagtagatttcagtggaagagatatggcgtgcaacgatacgtgtcaagatcgttgggaaatttcgaataaaa

SEQ ID NO: 10570 - DNA, 1181 bp, Zea Mays
ggtaaaagctctcgaacaaagaggtgtaccggcgccaccgccagtacacaccagctcgccggagatcacaagaagatacaagaccgtgctcctcgacgccgcccgacatggcggacgccgcctctggccgcggccacgtcgtctaccctccccgctccgccgaggacatcttcaaggactaccgcgcccgccggtccgccatcctccgcgccctcactcacgacaaggagaacctgtgcctgtacggctacgcgaacgaggcgtgggaggtggcgctgccggcagaggaggtgcccacggagctgccggagcctgcgctgggaatcaacttcgcgcgcgacggaatgaaccgccgggactggcttgcgctcgtcgccgtccactccgactcgtggctcctctccgtcgccttttactatgccgctcggcttaatcgtaatgaccggaagcgcttatttggtatgattaatgaattgcaaactgtttttgaagttgtctccggtgcgagacaacaacaatctaaagagaggtccagtatggacaatggtggtagagccaagcctgtaaagatagaaaataatggaaaagtcacagacgaagcatacgaagatgacagtgatcacggtgaaaccctatgtggaacctgtggtgggatatacaacgcggatgagttttggatcgggtgtgacatgtgcgagcgatggtaccatggcaagtgtgtcaagataactcctgccaaggcagagagcataaagcattacaaatgcccgagctgcagctccaagagggcgaggcagtagcaaaacccatgaacgcaggaagcctccgaatgtgggatgtatggtgcagaagaggcgcattgcaaagtttgcaggcaggagaaggccaagaggcctccatttacaagattagaactatattgctatcttcccagtgccttatgcttgcgtttacctatgataagctgatgtgaggaaagataagacatttggcaaccagaggcacttagttaaatgccccttgatatacatgggggtaaaagaagaggaactcatgttttgtcgaatatatggaatctttttttcccctcttacagtaacatgtactccatcatacataatttatcacgcagatcaatgttgaggacaaaagacctgcgtgcccctacgagaagaatgatg

SEQ ID NO: 10571 - DNA, 643 bp, Zea Mays
atgaggctgccatatgcttgcaagcttttgttaaagatgggagacgtgttgattccaagcctgcagtgtgggaacttatttgtgacgatatgcgtccgtgtttctcgtttttgggacttttctgatcctcaggatgatgcaaggctgctacactgtgatatggtgctgctcgatgaagagggaaatagcatacacgctacgatatacccacccttcatagagaaattcaggccactcataaaagaaggcagcgtgtacaacatgacatactttcgagttcgagcatcgaacaacttgtacaagccagttccaaatgatatcatgattaccttcacgaattggacaaagttagagcaggttattgagattcctcctgcatttcctacacttacctactccctcacccacatagagcagatccattcgcgcgtcgaccataaagactactatacagatgccattgggatagttacttcagtctcgaatgtttcgccacatcgctccaaaggacaataagcttctagcttgaagaggaacatttccatatgcagtgcaagaggtgcttcggtcaatgtcgtgttgtggggtgcccaagccaccctattcccaggagagcgcatatacgaagatgggcagaattccc

SEQ ID NO: 10572 - DNA, 933 bp, Zea Mays
cgagtttaggcggcattgttccaggtttactttgttcagttcaatttgtctagattttacatattcatgaatagccctttattattggtgcaactaatattcagtcgctaaaatatcaatggcctaccaaatttcgcaaaaaaggatgagcactacacgaaccattcctgtactttgtaagccttccctcctaaaagcttcagaatcttaacatgttacagttagttcttagaagattttatgtgcatcataattctaaaactttagccagtttacacctgttatttagtctactccttgaaaaaagtttttccctttgatctaaacatgaatgcttccttttactccaacatcacagcaaaaaaaaatcaaaagcattgcacttcttactactgatacccctatgtcactactaccatacaggaaaataagagtacgatagaagaacttgaagcgcattcactggtctcttatttaaagtccataaagcaaagttccaaaaaaacaaaaagaaacattgagttgccttcacccggcttctcttgagaaaatacaaggcgttaagaaattctttagaaaggcatattattactacatatagagctaggagtagatcttcatccgaacccctccaacgacgactaggtcggcgttttctctccctgctgtttcagttccggtatgcaaactacacgaatgatgcctacaacaagagtgggaacgaatccttgtggctgcagctgataaaccagagagcatagacttaacctttgtgctcttctcgacaggcttctttgctgttagactttaaccaattcatctcatgtcccaagttcaattttatgtaatgaggattgcatggtattttttggcaatttatctttaatgaactataatgtatagctgaagttggttgcagtttgaaacaatgcg

SEQ ID NO: 10573 - DNA, 1462 bp, Zea Mays
cggcattgttccaggtttactttgttcagttcaatttgtctagattttacatattcatgaatagccctttattattggtgcaactaatattcagtcgctaaaatatcaatggcctaccaaatttcgcaaaaaaggatgagcactacacgaaccattcctgtactttgtaagccttccctcctaaaagcttcagaatcttaacatgttacagttagttcttagaagattttatgtgcatcataattctaaaactttagccagtttacacctgttatttagtctactccttgaaaaaagtttttccctttgatctaaacatgaatgcttccttttactccaacatcacagcaaaaaaaaatcaaaagcattgcacttcttactactgatacccctatgtcactactaccatacaggttagtgcacgatccttacctttatgttctacatgtctttgggtttctctttttttcaagtgcgttctattattgtttatatgtccaccttcacactgattagctgttccttgttcctacacagttattatctgttatgtacatttttatacctttccaaattagcttattatctttaaaaaattgtattttcttggctactttacatttgaatgaccaatggcaacatcttcaaacaaacatagctaacttagaggaaagaaaacataatctttaaattgctcataagagagaatgtcatttttcagaaaaaaagaaaaacagtattgatgctttagaaaatcttaaactgatgcatgttaatattatcatatcaatgccaacaacatatgtttaagctggtttcatccttcctagcagctctacttgcttcatctcgctcttcactgctattttttaaattggaaggaaaataagagtacgatagaagaacttgaagcgcattcactggtctcttatttaaagtccataaagcaaagttccaaaaaaacaaaaagaaacattgagttgccttcacccggcttctcttgagaaaatacaagtaggcaactcagaagagacaacaactgtactttctcaggcgttaagaaattctttagaaaggcatattattactacatatagagctaggagtagatcttcatccgaacccctccaacgacgactaggtcggcgttttctctccctgctgtttcagagactgaatttagtcgagtgggttcacctgcagttccggtatgcaaactacacgaatgatgcctacaacaagagtgggaacgaatccttgtggctgcagctgataaaccagagagcatagacttaacctttgtgctcttctcgacaggcttctttgctgttagactttaaccaattcatctcatgtcccaagttcaattttatgtaatgaggattgcatggtattttttggcaatttatctttaatgaactataatgtatagctgaagttggttgcagtttgaaacaatgcg

SEQ ID NO: 10574 - DNA, 1480 bp, Zea Mays
agttttgtgaccgccatcaaaatcagacctgagatctggttgtgtgcgagattcagcacgttgagggacaccaggctgtcgagtttaggcggcattgttccaggtttactttgttcagttcaatttgtctagattttacatattcatgaatagccctttattattggtgcaactaatattcagtcgctaaaatatcaatggcctaccaaatttcgcaaaaaaggatgagcactacacgaaccattcctgtactttgtaagccttccctcctaaaagcttcagaatcttaacatgttacagttagttcttagaagattttatgtgcatcataattctaaaactttagccagtttacacctgttatttagtctactccttgaaaaaagtttttccctttgatctaaacatgaatgcttccttttactccaacatcacagcaaaaaaaaatcaaaagcattgcacttcttactactgatacccctatgtcactactaccatacaggttagtgcacgatccttacctttatgttctacatgtctttgggtttctctttttttcaagtgcgttctattattgtttatatgtccaccttcacactgattagctgttccttgttcctacacagttattatctgttatgtacatttttatacctttccaaattagcttattatctttaaaaaattgtattttcttggctactttacatttgaatgaccaatggcaacatcttcaaacaaacatagctaacttagaggaaagaaaacataatctttaaattgctcataagagagaatgtcatttttcagaaaaaaagaaaaacagtattgatgctttagaaaatcttaaactgatgcatgttaatattatcatatcaatgccaacaacatatgtttaagctggtttcatccttcctagcagctctacttgcttcatctcgctcttcactgctattttttaaattggaaggaaaataagagtacgatagaagaacttgaagcgcattcactggtctcttatttaaagtccataaagcaaagttccaaaaaaacaaaaagaaacattgagttgccttcacccggcttctcttgagaaaatacaaggcgttaagaaattctttagaaaggcatattattactacatatagagctaggagtagatcttcatccgaacccctccaacgacgactaggtcggcgttttctctccctgctgtttcagttccggtatgcaaactacacgaatgatgcctacaacaagagtgggaacgaatccttgtggctgcagctgataaaccagagagcatagacttaacctttgtgctcttctcgacaggcttctttgctgttagactttaaccaattcatctcatgtcccaagttcaattttatgtaatgaggattgcatggtattttttggcaatttatctttaatgaactataatgtatagctgaagttggttgcagtttgaaacaatgcg

SEQ ID NO: 10575 - DNA, 4651 bp, Zea Mays
ggtgcttcttccccctcccaaaattcttctcctcgcggtctccctcgccgccacgcctgcatccgccactctccgcgctcgcacacgccgcctcctcctccccgtcaccccttcgccgtggtggctcccgtcgtcccacgcctccctcgtctgcaagcgctgacgcctcctcctctccaaccctaccttcgtccgccgcttccatgtcctccacagggcgcctcacctcctcagcttcttcgccgaccacaacaccggcgctccccctccctccctccggtcgtcgtcacgctgcgtcttggcccaaccgttcaggtgctcggtgcttaactctcctattgcacacccatgtttaacttttcttgaattttcttaggaattgaggctgtagggtatatatgaggggttaattcagccgaactgttcagtaacgtggtaactgttcttcagggtgcgagtttgttgtactataaaggtttggtaacctgaataaaacaaatgaacttctgttctagtttcactatcaccaggttgcgggtttgaaggccaaaaccttcagcactggtcctccaaaaccttcagcgctggtcctgcctatgctagtttcatttgcatggataagttatgaatgaagaaaacatacattttaatatctaggcgaccatttcagaagacgtgtagttagaaatcagtaactaagaacagatcttaaccttatacattcttggtctttctttttgtcctgtatttttttattgtttgggtgtaacaccattattacatagcttggttgatgcatacactactacatggtatttatatcgtcctgacgattgttacatcaaccacattacacattatatatagcagtatagaataaatgttgtacatgtctaataatgcacactaataattgtaaatttgcaacccacttatccagctgattgatattgtgatcagttcacgttgcaagagtttctataaggtggtctgttatccacactacaatctacaaacttcatcagtacatcctcatacaagtgcagatcaaattgcatggtgaaatgtgtacttacaaattcgtttgtaagtgaacttagctaattatatggatactcacatagttttttggataccgatcataccaataatttacgaggaggtgcacccattcagcttcccagtatctaattgtactatacactccttccataggtaagtttataaataaagcttcgttttccatacaatatgattatgctcctttttatgtgaactgcaatattggtcactctatatcagtaaagattgagtgttgcacatgtctaacaatgtgcagtgactgtaaatttgcatcccgcttatccagctgatcaacattgtgattggtttacattgcaggaatttctgtaaggtggactgttatccagagcacgtacttcatttgtacagccttatacaagtacagattcgaattgcatgatgaaatgtgtattttcaaattcatctttaagtgaactcagctaattatatgtgcactcatatacttatttgttttggattataccaataatttatgaggagttgcacccatttatttcctagtttttaatagtgctgcacacttcttctttaggtaagtttataaataaagcttcattttcatgcaatttatgattttatgagattttcccatacacttgcacgttcccatgaaagattcctctcacaaaaaaaacttaaatttcatttaatgtgtaactctctaactcctttcttacatccattgagttatattgcaggttgctagatctattacattttcagacgacgacgacactagtagaaaaaacaattcaaagacgaatgttgaagcgtcacatgaggtataatttataaccttaacagaacaagcttatattcagttatacttaactgttaaaataaacctcatcgtatggtacaaatgttttaccacccaacactcccgaaagttcaagaacattagaatcactagcgaaaaggttcttcaaacttttcttttttcttttaactttgaacatctgttttatcatgacaaatattgtgtgtttaatacattcctcatcaaacaaatttggtgtcatatgctcaaaccaaacccttcagcagtccacaaccctagttctgcaaatccacctacaagacacgaataaggtatttcctttagcactttctacaatttatcaatacgaaattgacatacaaaatataatttagcatgcctgctccattttctttcttggtatctaaaatagaaattttatgaacaatttgacctttatgagttctactaaaacttgaaatttatataaactaattgtactccagttatctcgttgccgtcttttcgtaataggtttcttaaacgtatatgttcacctatttcaagagtaatttttttaccaaacatgtatacatacataggagtatatgtgaatagtgtggtatacaatacatcgacactcccactattttaattatggcccattaattcatgcatgcattcatttattcccttgctgcattttttctatatatttgccttcatctaattttgactgttcatttgatcaaacaacaatgtgtgttgaactaaaatagaggcattagtagaccaggatgaaaaaatagcgttaatacatgttaactaaaagtttaagactccatcctggtccgattctatagtggtacacttttttcttgactaattgcttcgtgctttcagtctttttagtttaaactttcagggatgtgtccactgagattgttgctgctcaagtccagcagactctgcgactattatagcttgccgatatccgaagggatcagaccggacagcacgttgagggacaccaggctgtcgagtttaggcggcattgttccaggtttactttgttcagttcaatttgtctagattttacatattcatgaatagccctttattattggtgcaactaatattcagtcgctaaaatatcaatggcctaccaaatttcgcaaaaaaggatgagcactacacgaaccattcctgtactttgtaagccttccctcctaaaagcttcagaatcttaacatgttacagttagttcttagaagattttatgtgcatcataattctaaaactttagccagtttacacctgttatttagtctactccttgaaaaaagtttttccctttgatctaaacatgaatgcttccttttactccaacatcacagcaaaaaaaaatcaaaagcattgcacttcttactactgatacccctatgtcactactaccatacaggttagtgcacgatccttacctttatgttctacatgtctttgggtttctctttttttcaagtgcgttctattattgtttatatgtccaccttcacactgattagctgttccttgttcctacacagttattatctgttatgtacatttttatacctttccaaattagcttattatctttaaaaaattgtattttcttggctactttacatttgaatgaccaatggcaacatcttcaaacaaacatagctaacttagaggaaagaaaacataatctttaaattgctcataagagagaatgtcatttttcagaaaaaaagaaaaacagtattgatgctttagaaaatcttaaactgatgcatgttaatattatcatatcaatgccaacaacatatgtttaagctggtttcatccttcctagcagctctacttgcttcatctcgctcttcactgctattttttaaattggaaggaaaataagagtacgatagaagaacttgaagcgcattcactggtctcttatttaaagtccataaagcaaagttccaaaaaaacaaaaagaaacattgagttgccttcacccggcttctcttgagaaaatacaaggcgttaagaaattctttagaaaggcatattattactacatatagagctaggagtagatcttcatccgaacccctccaacgacgactaggtcggcgttttctctccctgctgtttcagcttaaaaactagatgtaccaaacatgctatctgagcaccgcactgatacaacctttgatagtctgcgttttctctccctgctgtttcaggtttgttacatttcaacctgtggggtttctttcagacaattgcatttcatctagcattcacatgggaagctctcaaatctgccagcttaaaaactagatgtaccaaacatgctatctgagcaccgcactgatacaacctttgatcagtatttagtactacttgctcttccatattaatactactggtactactatttcattgcacgtttacatgacatggaacagagactgaatttagtcgagtgggttcacctgcagttccggtatgcaaactacacgaatgatgcctacaacaagagtgggaacgaatccttgtggctgcagctgataaaccagagagcatagacttaacctttgtgctcttctcgacaggcttctttgctgttagactttaaccaattcatctcatgtcccaagttcaattttatgtaatgaggattgcatggtattttttggcaatttatctttaatgaactataatgtatagctgaagttggttgcagtttgaaacaatgcg

SEQ ID NO: 10576 - DNA, 771 bp, Zea Mays
tttttgttttcagagatacttttgtcagtttgctcactcttgattttaccttgttttgcagtcaagagagattatgatccattatgattctaggttattaccaatttcagagataaactcaaagatatcatagaagcaggtcctacataggacctactgttaaggtcaaaagggggaagaagagattgtacaattaagaaagcgtcttgttgattactctacgaaggaatcacaaatactcgatgataaatacaagttaaggattatttttgggctccaagctgcagctaccctccccatccccattctgattccaagaaaagcaccggtggccacgaggaggaagggcattgccaactggcacgctaagaagctagctaagcagcacagggtggaccttgccaaggttactagcaccgggacatatgatcgaattacgtcgataggtattgagacggttgtcggaatccagccaaagtctaagcccgctcctggtggtgttcatgggtattacggtcttgtagaagataagtatgatatacaatgtggttcaagattttaggttttagaattagttttcaagctgttcataccactattttgagccttcaatgaaatggatggctgctcacttctattgttactgctctcgcaaatccaatttccacttgtgtgaatgaccaagcgatgatcctatcgcatatggtgtggcatgagcctacagtttcactgtagttatgaaaattgatcagtcaatgatgatgaatcata

SEQ ID NO: 10577 - DNA, 595 bp, Zea Mays
ataaaaggcatgtaaatttggacttgaggtgcacttccagtcggcgtggcaggccaagccatggtctgcggtgcctgggtggtgggtccgccactgccagagatagtgagatgtagttcctcatttcataacttttatatttgtatgtcaggaaattgtggagaagcaagctcctggattgatgaaggaagctgagcggtttctaattctcagcaatattgataggctgtggaaagagcatctgcaggcactaaagtttgtccaacaagctgttggtttaaggggttatgcccaacgagatccccttattgagtataaacttgagggatataatcttttcttagacatgatggctcaaatcaggaggaatgttatttattctgtatatcagttcaaaccagtagtgaagaaccaagaaggggaagcatcccaaaaggtgtcaaaaaagaaactggacaaaggagctaacaaacttggtgctgcccaagctgcgtcatgatcttccttttttgcaggattagcatgaacaggcacgcagaattccgaatgtactagtagaagatatttgctggtagcagtgccaactgactagaat

SEQ ID NO: 10578 - DNA, 1478 bp, Zea Mays
ctcctctccacctctcaatttcccaaattgaatcctcctcctccccgcctagggttccgattccgcaccgtccgagaaccacccaagcggcggcaactgtcccttctcgtcggccaccgccgcacaactcagttgcttgttcagccgctccgctgccgacccgcctatcgcctgaggttcttacggtgccacggagttgcaactgcacaaaggccttttgtggtcacaaagggtgctattgtgttacaacaacagttctagttgaaagaatcattacaacttagcagtactgtatcccatgattgtaatggaatgtctatgacactgaaggcaaccaatgagaacctcccaccaaatgtcatcaggcaattggctaaagaactgaagaatcttaatgagtcacctgcagaaggaattaatgtgactgtcaatgatgatgacttcactactatttttgctgatattgaaggccctgctggaactccatatgagaatggagtgttcaggatgaagctattattgtctcatgatttccctcaatctcccccaaaaggattcttcttgacaaaaattttccatccaaacatagctactagtggtgagatatgtgtaaacacactgaagaaggattggaatcctagccttggattaagacatgttcttctggtagtgagatgccttctggtcgaaccatttcctgaatctgcacttaatgaacaagctgggaagatgctactcgaaaattatgaggaatatgcacggcatgcaaggttatacactggcatccatgccctcaagaataagtccaagactggagctatatctgagtcgaccacagctctgaatgtcgacaagtcaagcactgctcccaacgagaacgcaccatcgatgccaccggcaatacctacctccgctgcatccagagcacttggcacaaatttgcaggatcagagccctactgtatctgatcctactgtaggagcggcggcggcggcggcggcacgaaggaaggatggcccaatgccttccaaagtacctgttgataggaaaaagatggatgcacggaagaagagcttgaagagattataggcggaaccttcatagtccagcatttaaatctgtcggaaatttagcagatgcctagcgaagctgggagagagacaattagttgggaggcatctgatgacctggcttccgggaggtaggggtcctgggctgggacaaaagtgaataatgtggcctgggtgagtccttcgggacaactgtatgtgcaatgtccaatcatttggaagaacacctgcctatttccttctgtcctctgtattttgttagcttagcggtagtgttagctagctcataggggcaattccctgtctagccatgggctgctgctccgtactctgcttgaataataatttgtccgtgcaattacagctattgttttgtttggaggaatagttgcctttttctgttgattc

SEQ ID NO: 10579 - DNA, 1946 bp, Zea Mays
ctggtcacacacacgcagcaaccaccgagcccagcgcccggcccagccagccagggccaacggcaaggcaacaccctcctcagcccgacgccgacgctcgccgtcatcctcgtaaatccacagcgcgcgcctcccgtcctcccaggcctcacccctagcgatgcgccactcccggcgctcgtgatccatggcctcactccccgttcctcacactcttccgcgggtctcgccagcgatagtgggcgccgcgagggggagggccgcggtgcgcgtacgcactgccaccgcggcattgggcggtgggtgcggcggcggcggcggaatggagcagcgccacggggatgccccgcacagcccagaatccagagggtgacgtgtcggacggggccgggtggttgttcctgtacatgaggttatctacctgctgcatctgcttcactggtcatcagccactgccgctaacctttgtgtcctggcgatcatccggtaaggatgatggataagtaaatacgtgtggaactggatctcgaactggagccgattggacgtttgacagcgatgttctactcctgttctagtatatttcccccctctttaagaagggcagtaggaaggttggtattgtcattctgacggctcgcgttctgttcttttgatgattgttcctggtcgctcggagggttgtcatcattcatcaatatcgtggcggcagataattctgtgatgaggaatcttataaatacatgggatgggacgggtggtgttttcaaataaacttgaaacgtgatgcctcaatggcatacatcttatgaattgagtgaaggagaagcctgtaatgtcaaacattgggaaatcgactaatattttatggcacaattgcttgattggacaatctgatagacagaaattgctgggacaaaaaggctgtgtcgtatggataacaggactcagtggttcagccttttggcacacccttcacagcttggcgccaccagctttgatgatggctgatgaggaactgaagccaatctgagcttctgtaggattatgtaccaaacctggcagggaaaagtactcttgcatgtgcactgagtcgtgagttgcattgcagaggccacctcacgtatgtacttgatggtgacaacctcagacatggcctaaatagagatttaagctttaaggcagaagaccgtgcagaaaatatacgaagagttggtgaagtggcaaagcttttcgctgatgctggtgtcatatgcattgctagcttgatatctccatacaggagagatcgtgatgcatgccgtgctctacttccacattctaactttattgaagtatttattgatttgcccctaaaaatttgtgaagctcgtgatcctaaaggcctatacaagcttgcacgtacaggaaagattaaaggtttcactggaattgatgatccatacgaaccaccaattaatggtgaggtgagcctgaagagcatgccttccttcataatcacgccgtacaattgctagagtaaactgaaactctgaaatacaaagtcgtcatcagccactattgatgtggtgcttccttcatgatcacaccgtacaattgctagagtacactgaaactctgaaatacaaaacccttcattatgctgtgactactgaagtttagcacaaacaatcacttcgtttctacactcttattccttaacattgagaaataaaaaataactgccggtgataagacagctctgggcattgtgtgatagagaggacctctcacgcaatctaagaagacctctgtgttagagtgtgtgttcctatattatccatgtatccgtagatgggctggcaccgctgttaggctgctggcctattagggttagagttttttggatctatatatgtagccctcctctatgcaatacacaaggattctcactctcttacactctg

SEQ ID NO: 10580 - DNA, 1881 bp, Zea Mays
cgtcatcaagcacgcccgcccgcagctcgcatcgtctaccctgcgcggctgcgcctagggtttaaccactcacagcagccgccgtgactctcgaaccatgtcagcgccgccgtcgctcaagcccccagcaacctccgcagcggcctatccgcgggcgtccgccgccccgagagccaccgggattcgcggcgcctgtgctcttccaactcggcgcctccaatgctcagcctccgccgccgtcgccggagcttccactgagatggctgatgccccgctggactgggctggaaggtcgctggaggagttgcgcagcttgccggaccacgacacgttctgcctgatggcgctctcgccgctggacgggcggtacgaccgcttcgttaaagagctgatgcctttcttcagcgagttcggcctaatcagataccgcgttctcatcgagatcaagtggttattgaaactttctcaaattcctgagatcactgaggtgcctcagttcagcaaggaagcccaagccttcttgattgctattattgagaatttttgcattgatgatgcaaaagaaataaagaaaatcgagaaagtaaccaaccatgatgtgaaagccgtcgagtactttctgaagcaaaggtgcagctccaatccagagattgctaaggtgtcggagttcttccattttggctgtacctctgaagatatcaacaatttgtcacatgcattggctctgaaagagggggtaaatagagttatgttccctgccatgattgacatatgcacagcattatgttccttggcgacacaaaattcaggctaccctatgttggctcgaactcatgggcagccagcatcaccaacaactgtgggaaaggagatggcaaacttcgcggccagattatctgatataggaaagagtttctcagaggtgaagatactagggaaatttgctggcgctgttggcaattacaatgctgatgtggttgcatatcctgaagttgactggcctaaggtggcagaagagtttgttaggtccttgggtttgcagcttaatccctatgttactcagatcgagcctcatgattacatatcaaagctcttcaatctattcacccagttcaacaatgtgttgactgattttgatagagacatgtggtcctatatatcattaggctacttcaagcagcgtgacctgacagactcaactgttttgagaaacttgggtatgggattgggtcattctctattggcttacaaggccaccatacgtggaatcagcaaggttcaggtgaatgaagcgcgtttagctgaagacttggagcaaacttgggaggtccttgctgagccaatacagacagtgatgcgaagatatggaatacctgaaccttatgagaagctgaaggaacttacgagaggccaagctgtcaccaaggacagcatgcagcaattcattgatggtctagacataccgggggaggttcgagcaaaactttcgaagctaacccctcattcttatactgggctagcggaggatttggcaagatacatcgagaagtgggttgatcttgaatctggatttcaaatcaagtgaccttcctttttaaaaggataatcttctccacatttttttctttttgacaacgacggagaaaaaaaataacagacgggtgcgtcgtggcctctaattgtcgaccaagatgatttacgtggttctcattaatgatatttttggcacatgtaaaatgcgcctcaaggaattatgctaactgtatgttggaggtaatttaacgagctaaaaaagttgcttgctgggtttcttatgagtacggagttgttttgcaacgcctagtgcgagaagctaaaaaaatgctttgtgttgtgctgcct

SEQ ID NO: 10581 - DNA, 1959 bp, Zea Mays
atggccgcctcttccattcctccttgccaggttcaggagcaagatgacgaggtggtggacaggaacatcctcccctactgcagcatcgacaggaagcagaagaagacgctgggagagaggaagcagaagaagacgctgggagagatggagcaggagttcctgcaagccctccaggccttctactatgaccagaaggccatcatgtccaacgaggagttcgacaacctcaaggaggagctcatgtgggaggggagcagcgtcgtcatgctaaacgaagatgagcaaaagcttttggaagcttccttggcctatacctccggcaacccaatcatgtctgatgctgagttcgacgaactgaaacttagattaaagacagacggcagtgtcattgtgaaggagggtcccaggtgcagcctaaggactcataaggtgtacagtgacttgaatgttgactacctaaagatgttcctcctaaatgttccagccaccaccgtagctctgggactgttctttttcattgatgaattgactggttttgagatcaatgtgttccagctgccagagcctttcggattcattttcacatggtttgctgctttgcccctaatattgttcttagcgcagtcattgactaaggctatagtccaggattttttaatccttaaggggccatgtcctaattgtggtactgaaaacctttccttctttgggactatactgtcagtctccagtggcggtacaacaaacaaagtgaaatgtgcaaattgcagtaccgagctggaatatgactcaaaatctcgggtgatcacacttccagaagcatcaaatgcataaacataggtgactctacatttacgccagtaactataaatggatgctctttggtctatattccaaatgtgggagacatcacaccagctttgaagtattgcccgtctccattgtgaacactctgcagcatatgtagcagataaatgagtgaaactatttgtactgcctgctctgcaaattagtatgaacacccctcaaaaagatttggcccacactctggtctctctgtttgcagctgggaacagggagctccagagcttgtgaattctatagaataaaggtggttgtccgcacagtatagcaaactgcgaagcctgcaactactagagtttggtctgtagcaggctcagttgggaatgtgtagcagagcatgatccatggtgtggatgaattgcagagtactgtgctgtgtgtgtaggaaggaaaagctgccgcctgccgattgtgcagtcagtctagtacgttggtatgcgaccatctcaagtctgggctttgattttaagcaatgatttttggcaatgaatgaacaagctatctactgtacactgtttttgtacagttatgtttgcaaggcccaagtctactgaacggccacggccaggctgactgatgacctgaagcccggcccacggcccacggcccacagcccaactggttgcacatactgcgagagaatttctctcaaccaagcgtctgcatcttccttctctagcttgtgtcatggagtatatgcatatgcatccctgacctctttcatgcatgcatgtttaaatgactttgttcctcaagcaacctgcaagcagaattaataccattccaaatcgatcgatgagcagaatcagaattagcgagcattttgcattgctccaccaaacaaaaaaattcggccacctcaatgcactagtaggaaacggagttagtcctgattgagaacccgaactacggattcaggactaaagagcactttagaggctttttttattttttgcacaagtttctctccacccttgtgattcctgggactcaaactcatgagcattgtcttgtatatgggattagatgatgctctggaccgatctattagatctactggactttcaatttattttggtctaaagttaagtaata

SEQ ID NO: 10582 - DNA, 2760 bp, Zea Mays
cctgctggcctggaacaccgtcgtctactcgctcacgttcctgagtgctgcatctgccttgcgtagtacggggagaaggaggaggttcggcagctgccgtgcacacacgtgtttcatctcaagtgcatatacaggtggctcaggatcatctcctcttgccctctctgcaagcaagagctcaagtgaactttatattcattacacacatgacattctcgcttattctttggatcaaggtgttagtatcctagacacaacagatattttccagctaacaagggaaatcaaggaagaattgatctttatattagcaggcggatgcaatcactaatcaaaaccacgatgcaaggtaacctaaatggattttaaattttattttggattgttaaatctttatttctgactactattgttttatgtcgtggatgccctcgtgaggttctacgccgacgccttcaggagggattcacagaggccatggtgaggatggccagcttgagtcggctcaccgggagcagcgcgagatccgctacaactaaatgataggaggtttcgctgccatttgcagcgactgtgttccagttcgaccgtttggggaaaaggtgagtcctcccatttcatgtagatgcatgggttgataaacatttgggagaaatgtcccctctttaattcgaaaaatagttgtgtatttgttcgacttatctgcggcgatgtacctttgtacgcgtacaaacatctatagacaaaaacaaaatgacacttcatggatgtagcaagagcgggctacgagaaactagcagatcatgcctaaaattcaattagcattagggtcagacaaaatactacattttctggattacaataatgtataggtgcatgaaaaaaacttgattccaatgtgtgacaaagtgtgaagatgaaagtgcactttcacgctgtcataacgcggatttgttttccttgctcatggaatgtgcatttgtgtgtttgcgtctactgtgcggctacaggcaaggaaacaggatctgtcacggaaggtatgtacacattacagtaaacgttgttcgtagaacatgcactttgtggagtggtctttgaatgagatgcgtttagaattaccttttcatgcagatctcttgttcagaacctggttgcttagtccattcttgttttgggttgctactacaaaaaagcggcaatgctttatatgaatcgcctcttactaatatccagggtcaaatggtggtccttcagtgaccagactaatatttgagcattaatcttatttgtttcacagtcatttcttgtttatcaatatgaatgctatttttttgcgagtggacttgttaactaataagctcatagatatttgaacaaaaaatagtgttttgttctaaaactgtcataaagagtgcatacatcatagctatggtttcaactgtgatttgatgtcctataatattgagtgtcctatagtgtgttgttctgaaacagtcacaaagagggcctaagaagctgatggaatcctcattcaccgccgctaaggagtttgagcgggatcggagaggagacgtcagttcttcctcctctgctcaatgcggccattcgccctgtcccccaaccctgaactccacactgccactccgtgctcattttttctgaaggggaaatattcatctccttgttgttttgtaccatggatactttagcatcattctcatactactaggagtgtaggcgattcccatttctcagtgatgtcgatgtcctgtactcctgtatatttggattcaacaatatgccattagtatgctgtcaagcgtcctatttgcaagagataaatggcttacgcccgaggggcttattcttccttatcatggtcggtcgtgactttggttatccactgaaaagatatgcttggtggtgctttcttgtgttgaagaacaagtatcccacggaaccacaaccgtttgtattatctggtgatttcctacattattagctggcctaactaaaccatgcgctcagaccctaaaccagctgtaagtctgtaacttaaaagcacagtgcactagcggaatggggttccttgctttttggagcgtttccccagtcagatcggcggcagggcaggtcacgtggacggggctccttgttgctggaactaaataccgtggagagtttgaagtgagactaaagaaacttatggaggaaattaagcaaaatgaagacattattctctttattgattaagtgcacacactgattggagcaggtgcagcagaagtgcattggtgccacaacactggatgagtataggaagcatatagagaaagatcctgccttggaaagaaggtttcaaccagttaaggttccagagcctactatggatgaaacaatacagatcttaagaggacttcgtgagagatatgaacttcatcacaaactgagatacacagatgatgctttaattgctgctgcacagctgtcttatcagtatatcagcgatcgttttctgcctgacaaagccattgacttgattgatgaagctggatctcgtgttaggctgaggcatgcgcagctccctgatgaagccaaagagctggacaaagagctgcggcagataagcaagcagaaaaatgaggctgtacgtggccaagattttgagaagaatctgtagcaaatggctaacgatgaggatatccattactttgtttatgacaataaaactgatatgttcaagattccgtagcaacgcac

SEQ ID NO: 10583 - DNA, 644 bp, Zea Mays
ctcatccctcccaagtcccaactccgctgctacgccttcttctacatcgcaatcacgcgcccgtccggctctcccccttctccctcgccctcacgcgctcacgccctcacctcagtcctcatcgctctcggccgcctgcttaaaccctccgctcgaaccggaacccaaccaagaacagatccaaaacgcaagccgcaccatgtctcgtgtcgcgggctcgcgcctcctccctaggatctctgcgctctccttctgcaccgcctccccggcaaccgccgccgcttcctcctcctcatccacagcggcggtggcagcggcagccgccaccgcctccgaggcttcctccaccgccggagacccatcctcccagccgccccagactgcccgcaagccgtggggcgcgctcaagttcgccgccttcgccgccgtgtccaccgcggttggcggcacgggctacgtcagctacgcttattctctagaggaagtggatcagatgacgcgggagctccggaagaagtcgaagcagcccattcctgaggatgcttctggctttgagaggtttcaggctatggcttattcagcagctatgaaagggaaggagcatgatatgagcttactattaatctactcatcctggatactgg

SEQ ID NO: 10584 - DNA, 1029 bp, Zea Mays
ctcatccctcccaagtcccaactccgctgctacgccttcttctacatcgcaatcacgcgcccgtccggctctcccccttctccctcgccctcacgcgctcacgccctcacctcagtcctcatcgctctcggccgcctgcttaaaccctccgctcgaaccggaacccaaccaagaacagatccaaaacgcaagccgcaccatgtctcgtgtcgcgggctcgcgcctcctccctaggatctctgcgctctccttctgcaccgcctccccggcaaccgccgccgcttcctcctcctcatccacagcggcggtggcagcggcagccgccaccgcctccgaggcttcctccaccgccggagacccatcctcccagccgccccagactgcccgcaagccgtggggcgcgctcaagttcgccgccttcgccgccgtgtccaccgcggttggcggcacgggctacgtcagctacgcttattctctagaggaagtggatcagatgacgcgggagctccggaagaagtcgaagcagcccattcctgaggatgcttctggctttgagaggtttcaggctatggcttattcagcagctatgaaagttcctgttgccgctattgaggtatacatggatgtgaggagccaaattgaagatcaaattcggggatttagcgaaccagtatcagacaaacttcttccagatcttgctcctcaagagcagcatgtattgactctagttctggatctgaacgagactcttgtatactcagattggaagcgtgagagaggatggaggacctttaagaggccaggagtggatgcttttcttgaacatctcgggaggttttatgaaattgttgtgtattctgatcagcttagtatgtatgttgatcctgttgttgataggctggatccaaagggcaatattcgacataggctatcaagagttgcaactaagtatgaaaatggaaaacattatcggattttcaggaagacatggagaagatccatcaagcacacagcgattctggtgcttcc

SEQ ID NO: 10585 - DNA, 1564 bp, Zea Mays
cgactgccgtcccggcatcctgttgttgcccatctcatcgcccgcggccggccgcccagtgccgcacaaccaccatatctccctcacagtcacagcctcactccatgacgctcgttgcctgccagccagcctaatctataagctcatcgccgtcgaggcagtgcccagctgctctcttctatttctacaagcggtcaggtagtattattagtatgttgtatggctaatggctaatggctaatggccgatggcctgcgagacaacaccaactgcgccgagctgccgcagacaacaccaactgcacactgctgcataggaggtcaggagaaggcgctccagcgcagcacggcagcagggatttctggacggatctgattgaataaaccgtgaaggagatgccctggaatagattcatgcccttcctttcaaaatgttgtacttctaccgttcagacatcttcatcatattcatctttttcctcgtccttctccccgatacaaccatggttatttgtgggtcttggcaaccctggtgagaagtatcaatccaccaggcacaacgtgggttttgatatgatagatgcatttgcgcaatcccagggtatacccctgactacacattacttcaaagcactctttggtgaagggatggttgatggagtccctgttcttcttgccaagccccagacttatatgaatctcagtggagaatctgtcggcccacttgctgcctattataaactgccacttaatcgtgtcctagtggcgtttgatgacatggacttgccatgtggagttctccgtctacagccaaaaggaggttctggacgacacaatgggttgaagagtgttatataccactttcgtaagaatcgagaattttgccgattaaggattgctggccagatggatcctaaagcctttgttcttcagaagttcaataggactggtcgtgaacggatcgattcagccgtgagagagggtgtcgatattctgaagatggtggctgcgaggggtttgacagaggcggcaaaactgacaaatgcggaccagaagtataagcatctgagatcacatggtatccagactaacgatgactagacaaagcttactaggggggctactcttttcagcacatctctcgatattcagactaaagacgaaactcgttttatggcctgttgagaaacaggcgttcgatgagcccctttagaccgtcgctgaacgtgaacgcgtccttgttgtcaccgtacatcaacggcatgctggcggttatgtcggcaactcgctgcactgctggaagtagtttgctgttctcaaagcgtgctccgtttatagttttccatgcatcttcaatcagggagcttatctgtgcaaaggcaacctcagctgtgacgccatgctcactgatgtagcattcgaccgagctgtccacgtcgtttttgttctttccacgctgcgaaagaacacatccatttatttatttatttattactgggcaacaatccaaaggacaagaatacttaatggtcttattaaagaattaatcagggacatgtaccagt

SEQ ID NO: 10586 - DNA, 1638 bp, Zea Mays
aagcaactcaggcatccacctacgcgcctgctctaccctagtgggcattcctgccggctgccgactgccgtcccggcatcctgttgttgcccatctcatcgcccgcggccggccgcccagtgccgcacaaccaccatatctccctcacagtcacagcctcactccatgacgctcgttgcctgccagccagcctaatctataagctcatcgccgtcgaggcagtgcccagctgctctcttctatttctacaagcggtcaggtagtattattagtatgttgtatggctaatggctaatggctaatggccgatggcctgcgagacaacaccaactgcgccgagctgccgcagacaacaccaactgcacactgctgcataggaggtcaggagaaggcgctccagcgcagcacggcagcagggatttctggacggatctgattgaataaaccgtgaaggagatgccctggaatagattcatgcccttcctttcaaaatgttgtacttctaccgttcagacatcttcatcatattcatctttttcctcgtccttctccccgatacaaccatggttatttgtgggtcttggcaaccctggtgagaagtatcaatccaccaggcacaacgtgggttttgatatgatagatgcatttgcgcaatcccagggtatacccctgactacacattacttcaaagcactctttggtgaagggatggttgatggagtccctgttcttcttgccaagccccagacttatatgaatctcagtggagaatctgtcggcccacttgctgcctattataaactgccacttaatcgtgtcctagtggcgtttgatgacatggacttgccatgtggagttctccgtctacagccaaaaggaggttctggacgacacaatggtctatcaggttgaagagtgttatataccactttcgtaagaatcgagaattttgccgattaaggattggaattggacggccagctggccagatggatcctaaagcctttgttcttcagaagttcaataggactggtcgtgaacggccgtgagagagggtgtcgatattctgaagatggtggctgcgaggggtttgacagaggcggcaaaactgacaaatgcggaccagaagtataagcatctgagatcacatggtatccagactaacgatgactagacaaagcttactaggggggctactcttttcagcacatctctcgatattcagactaaagacgaaactcgttttatggcctgttgagaaacaggcgttcgatgagcccctttagaccgtcgctgaacgtgaacgcgtccttgttgtcaccgtacatcaacggcatgctggcggttatgtcggcaactcgctgcactgctggaagtagtttgctgttctcaaagcgtgctccgtttatagttttccatgcatcttcaatcagggagcttatctgtgcaaaggcaacctcagctgtgacgccatgctcactgatgtagcattcgaccgagctgtccacgtcgtttttgttctttccacgctgcgaaagaacacatccatttatttatttatttattactgggcaacaatccaaaggacaagaatacttaatggtcttattaaagaattaatcagggacatgtaccagt

SEQ ID NO: 10587 - DNA, 1728 bp, Zea Mays
agttcacctttctcttctaatggcttcaagccggcgacagcagcaacaatgcgacgttcatttcaccgtttgcttcccgagatacggtcatacggagccacagtttgtcgttactgctcccagccagcgtgaaccgatcccacggagctcatcccacaggccacagcactcctccggtactcccctcgcacgacttcacgagcgcggtcgactgccgccgccaccaccgccgatctgcaaggtcccgtcgaccaccgccactctgcaagtgaggggaaagaggcaagattgaggagggaagcatcgctggtgtatccgccgccacattcgtcgccgggagccagcccatattcgagacgaggtcgagctttgctgccttggcgagcttcagtcgaatcaaggttgagcctggcggcaggccagtaaacagagcaacgcaaaacccttcgaatcaatggagacctccgcagcaaccccgacccggccgccccacccggcggccgcttccccatcgccgtcgccctcgtcgtcgctgaggctgtggaggtcagcggcgcagcgcaacgtgcgcaatcagtggtcccgtctgagcgccgccaaggagcagtggctggccgccgttgctgatggccgcgcccacgcctccgcgctcgtcaacgcccacctctgccgcaggaacatgccagcgacggatttgggggtgctcaaggatatgccggggatccgcgataaggctaactccaagttggtgcttagagaggagcaatacagtgggatgcttctgtcggcctacaaggagatggtccgtcagctgtcctacttggttgaagcttcccattctatgcgctgtttttctaaagcagctccaaattgctccatcacacagttttctgaccgccaagataatttgaatgattcaggggatggtggaggagccccagtattcaaatggttctccatattagaatttgagactcttgcccaggagcttgttcagatgtttgtttcagagcaaaagttgaagaggctgctactcttggaatttctctcgattgctttaaaggaaggtgtagaactccagacatcattaaattgggaacgtttagggagtcagcgacctggcaatctccctctgcatgaagttttacaggtttatttaaccacttggcatgctaatatgaacatcaaccggagtagaattggtgaaatatttgagcttgttgaggaggagatgaagattaaactgtcttgaagattccgattcattttgtttggctattcatcaaggaagaagaaatggaaaagaaagatcaatcagtttactattcaccaggtttctctatccagtgtctttatctgccttagtagaagtcttcagagcttacctatcatcttagaatatagtactggtctccttgtaacccataatatatttttttaatccaatgttcggttaccctggaatcatattgggaggagagcgttggaccaacatatgttattgaaatgagatttccaagttatcaggatcattcgcctagcttcaggtttgttctgtgctgttgtagatgtgtaatatttacttcattcgcctgctgtacagatcttggtgacatgctcgtggaaaatgcatattgcttttagtggtttttcattacgcttatggattgtagatcttctgattattattatgaacacggagaaaataaagctgtggattagtccatg

SEQ ID NO: 10588 - DNA, 2081 bp, Zea Mays
agttcacctttctcttctaatggcttcaagccggcgacagcagcaacaatgcgacgttcatttcaccgtttgcttcccgagatacggtcatacggagccacagtttgtcgttactgctcccagccagcgtgaaccgatcccacggagctcatcccacaggccacagcactcctccggtactcccctcgcacgacttcacgagcgcggtcgactgccgccgccaccaccgccgatctgcaaggtcccgtcgaccaccgccactctgcaagtgaggggaaagaggcaagattgaggagggaagcatcgctggtgtatccgccgccacattcgtcgccgggagccagcccatattcgagacgaggtcgagctttgctgccttggcgagcttcagtcgaatcaaggttgagcctggcggcaggccagtaaacagagcaacgcaaaacccttcgaatcaatggagacctccgcagcaaccccgacccggccgccccacccggcggccgcttccccatcgccgtcgccctcgtcgtcgctgaggctgtggaggtcagcggcgcagcgcaacgtgcgcaatcagtggtcccgtctgagcgccgccaaggagcagtggctggccgccgttgctgatggccgcgcccacgcctccgcgctcgtcaacgcccacctctgccgcaggaacatgccagcgacggatttgggggtgctcaaggatatgccggggatccgcgataaggctaactccaagttggtgcttagagaggagcaatacagtgggatgcttctgtcggcctacaaggagatggtccgtcagctgtcctacttggttgaagcttcccattctatgcgctgtttttctaaagcagctccaaattgctccatcacacagttttctgaccgccaagataatttgaatgattcaggggatggtggaggagccccagtattcaaatggttctccatattagaatttggtgggtaaatcatctcttctatggattaagtcactactatgatctttcgtctgttgggtgtgacaatgatctccaaacccatctgattgccttttaaaagttcaaaaggtcaaatgagtttgatttaggaagactactcagagcactatatattctcatatttgaggatgccggtcaatatctgagacactgcacatattaatgtttacatgttttaaatccacatgataaaaagatattatgtttcctttaatcacctcagagactcttgcccaggagcttgttcagatgtttgtttcagagcaaaagttgaaggctgctactcttggaatttctctcgattgctttaaaggaaggtgtagaactccagacatcattaaattggggtgatgaactatatgatggtgaatcaaatgaacttcagagtattggccttcagtcaggagatgcctactcaccgcctgaaaattggtgtgcagaacgtttagggagtcagcgacctggcaatctccctctgcatgaagttttacaggtttatttaaccacttggcatgctaatatgaacatcaaccggagtagaattggtgaaatatttgagcttgttgaggaggagatgaagattaaactgtcttgaagattccgattcattttgtttggctattcatcaaggaagaagaaatggaaaagaaagatcaatcagtttactattcaccaggtttctctatccagtgtctttatctgccttagtagaagtcttcagagcttacctatcatcttagaatatagtactggtctccttgtaacccataatatatttttttaatccaatgttcggttaccctggaatcatattgggaggagagcgttggaccaacatatgttattgaaatgagatttccaagttatcaggatcattcgcctagcttcaggtttgttctgtgctgttgtagatgtgtaatatttacttcattcgcctgctgtacagatcttggtgacatgctcgtggaaaatgcatattgcttttagtggtttttcattacgcttatggattgtagatcttctgattattattatgaacacggagaaaataaagctgtggattagtccatg

SEQ ID NO: 10589 - DNA, 4460 bp, Zea Mays
ccgccacccccgcccaaaaaagaaaaagaaaaaaaacaccctcccttctccttgcttgtcagctcgcacccatggaaccctcgtcgccggccaccacggccaccttccctgctgccgtagaagaacatgagacgtaccctcccatggtgtcatcctctctattcccacttttccccttcgccgcctccacctcctctgctccccccgccgaatcccaatggctttcaaaccctagcttctccttcgatgcctcctccctgaacatcccggctaccacctcatcgtcgctcccgtcgccgcagagccactcgtccgatgaggacacgccgctgcaggccgctcctgcgaaatacgagctggtgccttcttcgccgtcctccgacgaggagagggggtcgcggaggaagagaagtgggaggaggaaacggaagcgcgagaaggagcgctatgatggggcagcgacatcgcggaaggctgggattcgtgcctgggctggattggagacgaagccagccaaggattactatgtcgacgcgaagggcgaccatgataacctggcttttggatccctctacagaatggatgttgcacgctacagatcccagaatatgatggaggcatttggtttaaatcatctgaggtttggttcatcacatattgatttggattcagacttggatggaatggataacaaagtaagagctggaggccgttactattctgcaaaaaatgcagtttctgaaagaaataaaggtttcaaacatctgaaaatatttaagggaaacacctctgtaatgctcgctgaagattttgtcccatttggtacacaatcacttcctttgaaaagcacaactgtggaacaagagctagaggagtcttgggaagatgaaatacttcgccggactagggaattcaataagatgtctcgtgaacgccctcacgatgaaaaagtttggctggctttcgctcaatttcaggacaaagttgctagcactcagccacaaaaggctgctcgtttacaaactaccgaaaggaaaattagcatattggagaaagctgtggagctcaatccagatagtgaggaattattgctttgccttctgaagtcatatggcaagagggacaacactgagactctattgactaaatgggagcaaatacttacgaagcacccagatagctctacgttgtggaaacagtatctgcttctgtgccaaggggaattctccagattcaaagtttctgaaattcggaagtcctacgtgtatgctgtacaggctctatctgcagcttgcaccaagttatgtaggcaggataataaaagcatggattccaaatcttcatccttagttcaactagaagtggggttggtggatatatttgttaatctgtgccgatttgagtggcagacaggacatcgggaactagcaactgggctatttcaggcgcagatggagtttagcttatttgcccctcctttgtatctgacaacaagcagtaagcaaaggctctttgaacacttctggaacagtggtggtgccagaattggggaagatggagctcttggatggtctgaatggttagcaaaagacgaggagagtagacaaaagttgtctatgcaagaaaattcacaagagactgaaacaggaggctggagtggttggtttgatccttctctgggtaatactgagacaaatgatttatcaaacaaatcactggaaccatcattgaccgatggaaatgatgctgaagaccttgatgctgaggactcaccagcacaagatgatgttgaatccttgctgaaaaagcttggtatcgatgtagatgcagagtccaatagtgaagttaaagacgcagaaacctggaatagatgggcctcaatggagctgtcacgggacaatcagcaatggatgcctcttcatgaaaattatgtaggatcaattcattgtggtgatgctccatctggggaagacaatgaccagctttccagagtaattttgtttgaggatgtaactgagttcttgttttctctatcttcagaggaggcccgcttttctctgatgtgccaatttattgatttttatggtggcaaaatctcaagatggacatcaacaaacagtccaagttggctcgatcgaatattgagcttagagaatattacagatgacatcctggaagatctaggtgctgtatctgacgttgtaaacaagaaccaaagttcatatagttgtaaatataaattggaatcattactgggaagcatgtgtgacctttcacaaaggccgggcctgatgaaatttctcaaaaatgcgatactgcttctgcttggtgttttccctcgtaatcatatcctggaggaagctgttcttgttactacccaaatgtttactcctcaagagaactcttcctccattcaaactaatgcatcacgggctttggccaaaagtatgttgaagaaagaccgacaggattttttgctttgtgggatatatggacgaactgaggcaatgaatgggaacattgaacaagcaaggaagatatttgacatggcactgttatcaactgaagcaacttctgaggatcttaggaagaaggttcccatcctttatctttggtacgccgagatggagattacagtgtccgcttcaagaaacaactctgactcaatgcatcgtgcagtttacatcctatcctgcttagggagcaatctaaaatattctccttttgttggccctatttcaaggcttcaggtcttgagggctcgccaagggtttaaagagcagattagaagctcacgatctgcattttcctgtggtgctataaacaaagaatcagttgctctgatctgctcagcttctttgttcgaaagcatgacaacaggctgttactcgggtcttgaagtgatagaggagacttttccaatgacattttcagagagcaataatttggagtgtgaggatttgtgggtgtactacatcaaaatgcttcaaaaaaatcttaaccaattgaatctatcaagggtctggccaagcatatcacgcggagtgcacaaatatccctacaatccaaaatcatattcagcgacgttaaccctgagttatctttacagtgtatccaacaatctccgtctcacactcgacaaatgtagtcaaagggacccttctgtaatcaccttgctctttgctttgtcctttgaatggggtaaagctggatctgacaatagaatacacagcctgtttgagagagctctagctgatgataagttgcagaagtctgtcctattgtggcgctgttatctagcctatgaggcagaaatagtctgcaactcttctgcagcacggcgtgtgttcttcagagctatacatgcctgtccatggtctaaaagattatggcttgatggtttccaaaagttgggctctgttctgacattgaaggagttgtcagatctccaggaagtgatgcgtgacaaggaattaaacatccgcactgacatctatgagatactcctagaagaagaaacaaatacatgattctggtttgtgtgaagatcccgaaactgccccgcatgacatgctctgcagttataagtttccaaaggttcatgaaatattggttctgcattgctgttttgtggcctataagcatcgaactctgaagtctcaatcaagaacctgctatctatcatcaaataagatggatgggaagtacaatgggcatgccttggattgacaatcttgccaaatatgaccatgttttactatttttgttctttcaagatggaccttgttggctgccgttctgaatatctcacatgattcattatcggtatatagatagaagtggcttcagtgggcccttcaactgcacgataagatcaatgttaggaaggcctattacaaattcctgtacggaaatcatgccacgaacaaaaccgaaacatcaaaagcagcatatatttttgtttgactatcagtaaagcaactgcagccaggttaggggatcctgcagtgtgcttgagtgtccaaacaaaaaggcttcgaatgtatagcttcacctggcgttttgttgaaggtccccaaagttatggactttaagatgctggtatatactggctgggagcacagataagagaagtagcagcactgacatgacggcctcaggatatggccacatggctatgtacgccataggtcaacctgcattacagggttgttaatgtatctcatcctgggttgcgccttgataatgtgacaggcacgaaatggtagtgtaatttgatttaagtagttgagttttgtagaaacacagttcctggcacgatggtttgttgagtgcatgacagcatgagacaccaagctcagggatgcaggcatcctcatgaaattatgaaaccacgctgctgtggtagctggtatgttggacaaagttccgaggctgcagcttatgtacgtccaatttaa

SEQ ID NO: 10590 - DNA, 4556 bp, Zea Mays
ccgccacccccgcccaaaaaagaaaaagaaaaaaaacaccctcccttctccttgcttgtcagctcgcacccatggaaccctcgtcgccggccaccacggccaccttccctgctgccgtagaagaacatgagacgtaccctcccatggtgtcatcctctctattcccacttttccccttcgccgcctccacctcctctgctccccccgccgaatcccaatggctttcaaaccctagcttctccttcgatgcctcctccctgaacatcccggctaccacctcatcgtcgctcccgtcgccgcagagccactcgtccgatgaggacacgccgctgcaggccgctcctgcgaaatacgagctggtgccttcttcgccgtcctccgacgaggagagggggtcgcggaggaagagaagtgggaggaggaaacggaagcgcgagaaggagcgctatgatggggcagcgacatcgcggaaggctgggattcgtgcctgggctggattggagacgaagccagccaaggattactatgtcgacgcgaagggcgaccatgataacctggcttttggatccctctacagaatggatgttgcacgctacagatcccagaatatgatggaggcatttggtttaaatcatctgaggtttggttcatcacatattgatttggattcagacttggatggaatggataacaaagtaagagctggaggccgttactattctgcaaaaaatgcagtttctgaaagaaataaaggtttcaaacatctgaaaatatttaagggaaacacctctgtaatgctcgctgaagattttgtcccatttggtacacaatcacttcctttgaaaagcacaactgtggaacaagagctagaggagtcttgggaagatgaaatacttcgccggactagggaattcaataagatgtctcgtgaacgccctcacgatgaaaaagtttggctggctttcgctcaatttcaggacaaagttgctagcactcagccacaaaaggctgctcgtttacaaactaccgaaaggaaaattagcatattggagaaagctgtggagctcaatccagatagtgaggaattattgctttgccttctgaagtcatatggcaagagggacaacactgagactctattgactaaatgggagcaaatacttacgaagcacccagatagctctacgttgtggaaacagtatctgcttctgtgccaaggggaattctccagattcaaagtttctgaaattcggaagtcctacgtgtatgctgtacaggctctatctgcagcttgcaccaagttatgtaggcaggataataaaagcatggattccaaatcttcatccttagttcaactagaagtggggttggtggatatatttgttaatctgtgccgatttgagtggcagacaggacatcgggaactagcaactgggctatttcaggcgcagatggagtttagcttatttgcccctcctttgtatctgacaacaagcagtaagcaaaggctctttgaacacttctggaacagtggtggtgccagaattggggaagatggagctcttggatggtctgaatggttagcaaaagacgaggagagtagacaaaagttgtctatgcaagaaaattcacaagagactgaaacaggaggctggagtggttggtttgatccttctctgggtaatactgagacaaatgatttatcaaacaaatcactggaaccatcattgaccgatggaaatgatgctgaagaccttgatgctgaggactcaccagcacaagatgatgttgaatccttgctgaaaaagcttggtatcgatgtagatgcagagtccaatagtgaagttaaagacgcagaaacctggaatagatgggcctcaatggagctgtcacgggacaatcagcaatggatgcctcttcatgaaaattatgtaggatcaattcattgtggtgatgctccatctggggaagacaatgaccagctttccagagtaattttgtttgaggatgtaactgagttcttgttttctctatcttcagaggaggcccgcttttctctgatgtgccaatttattgatttttatggtggcaaaatctcaagatggacatcaacaaacagtccaagttggctcgatcgaatattgagcttagagaatattacagatgacatcctggaagatctaggtgctgtatctgacgttgtaaacaagaaccaaagttcatatagttgtaaatataaattggaatcattactgggaagcatgtgtgacctttcacaaaggccgggcctgatgaaatttctcaaaaatgcgatactgcttctgcttggtgttttccctcgtaatcatatcctggaggaagctgttcttgttactacccaaatgtttactcctcaagagaactcttcctccattcaaactaatgcatcacgggctttggccaaaagtatgttgaagaaagaccgacaggattttttgctttgtgggatatatggacgaactgaggcaatgaatgggaacattgaacaagcaaggaagatatttgacatggcactgttatcaactgaagcaacttctgaggatcttaggaagaaggttcccatcctttatctttggcttcaggtcttgagggctcgccaagggtttaaagagcagattagaagctcacgatctgcattttcctgtggtgctataaacaaagaatcagttgctctgatctgctcagcttctttgttcgaaagcatgacaacaggctgttactcgggtcttgaagtgatagaggagacttttccaatgacattttcagagagcaataatttggagtgtgaggatttgtgggtgtactacatcaaaatgcttcaaaaaaatcttaaccaattgaatctatcaagggtctggccaagcatatcacgcggagtgcacaaatatccctacaatccaaaatcatattcagcgacgttaaccctgagttatctttacagtgtatccaacaatctccgtctcacactcgacaaatgtagtcaaagggacccttctgtaatcaccttgctctttgctttgtcctttgaatggggtaaagctggatctgacaatagaatacacagcctgtttgagagagctctagctgatgataagttgcagaagtctgtcctattgtggcgctgttatctagcctatgaggcagaaatagtctgcaactcttctgcagcacggcgtgtgttcttcagagctatacatgcctgtccatggtctaaaagattatggcttgatggtttccaaaagttgggctctgttctgacattgaaggagttgtcagatctccaggaagtgatgcgtgacaaggaattaaacatccgcactgacatctatgagatactcctagaagaagaaacaaatacatgattctggtttgtgtgaagatcccgaaactgccccgcatgacatgctctgcagttataagtttccaaaggttcatgaaatattggttctgcattgctgttttgtggcctataagcatcgaactctgaagtctcaatcaagaacctgctatctatcatcaaataagatggatgggaagtacaatgggcatgccttggattgacaatcttgccaaatatgaccatgttttactatttttgttctttcaagatggaccttgttggctgccgttctgaatatctcacatgattcattatcggtatatagatagaagtggcttcagtgggcccttcaactgcacgataagatcaatgttaggaaggcctattacaaattcctgtacggaaatcatgccacgaacaaaaccgaaacatcaaaagcagcatatatttttgtttgactatcagtaaagcaactgcagccaggttaggggatcctgcagtgtgcttgagtgtccaaacaaaaaggcttcgaatgtatagcttcacctggcgttttgttgaaggtccccaaagttatggactttaagatgctggtatatactggctgggagcacagataagagaagtagcagcactgacatgacggcctcagtaagtaataatgttagttttcattcgctgaggatgggtattattgctagctgtgttttgtttgtgcatactgtattgactgttcatttctcgaggattcgagccatctgttgttcatgtgtgcagtgtgcttgtgcatactgtattgagtgttcatttctggaggaatcaagccatctgtttatgtgtgctagctggataaagcgctgcttgatgtacctacagggatatggccacatggctatgtacgccataggtcaacctgcattacagggttgttaatgtatctcatcctgggttgcgccttgataatgtgacaggcacgaaatggtagtgtaatttgatttaagtagttgagttttgtagaaacacagttcctggcacgatggtttgttgagtgcatgacagcatgagacaccaagctcagggatgcaggcatcctcatgaaattatgaaaccacgctgctgtggtagctggtatgttggacaaagttccgaggctgcagcttatgtacgtccaatttaa

SEQ ID NO: 10591 - DNA, 3549 bp, Zea Mays
aacccaacgcaacccaatctgtttcaatctgtagaacaaccacgtggcgtccacttgaaccactctgtagagcaatcgccaatcggcagcttcgtcatccctcgtcgtcggattgtacgctccagctctccaagatttgccttggcttgccgtgccctgcgggagccaagccaaggacggctagcgctcgccacgcgcgatgtccgggcttcctccggccgcgcgaccgctgctaccgtctccctgcgcctcttcctccgttgttcgggcgaaggcagcgtcggcatgctgctccagcctaaagcagtcgcgcccaggccgaagtgctgccgcccgttccaccgtcgccgcgcgtcaggccgcgccgctcttggctgcggcgctcgtccttgtagcggcaccccctggcctgcctgctgctatctcaccagcatttgcacagccagtttcagaaggcgcagcgctgttccggaaggcttgtattggttgccatgacatgggaggaaacattctacagccaggagccactcttttcctgaaggacctcgagagggttttggagagaaatgcaccccaagaggacagtgcaccttcggcccccggctatcggaagacgacatcaagatcctagcttcgtttgtcaagtcgcaagcccagaacgggtggccgaagattgagggggatggagattgatcaaactgaaaaaacgatgagaagacggtgcttgttagtcagatgaaaatggtgacgggaagatagtgtttgtatagtttaggaatctggtctttctgaacttgtaaccttttagtctctgtttctgaactgaacttgtaaccttctggtccgtgtttcagttttctgaacttctattccaggcagagtccacaccttttccagccagccgaacaaggctgacactgacagagttcagtgctcaggcagggtccccaacaagtcgcagtcgcagctcagctcctctgatcgagggttggtgagttcggttggtgacgccgcgcgaactgctaccaggcctggcgtggcgtcggcgtggtttaaacacgaagaaacccacgccctccgtcgcgcggctgctgctggtgcggaggggaggtggtggggaaggaaaacggcgtcgcaactcccccgcccgcctcgaaccgacatgttgccgcgcacgcactcccaccaggcgcggcggcgctccggcctgggcccgcagctctgcgccgcagcggccgcgctcctgctgctcctctccctcgccgtcctccactcgcgcctctcctcctcgtcctcctcccgcttccccacatccgcatcccgctcccgcccctccacgcccgcggccgactccaactcctccgctctcctcgccgacgaggaggacgaggacgtggccgccgcgctcgacccgctgctcaccgtcaccaccaccgccgccgagggcgattctctcgccaaccccgacgacgaccgcatcgatgagctcgacgtgttggacgaggacgccgcgggcgccaacgaggctgactccgcctccgcctctacggtgggggccgccacgcccctcgtatgggaccacgtcaccggcgccgctcgcctgccgttccgcctccccgcctccgtcgaatccctgcccgcggggctgccgcggcttgactccccgcgccggatcgccgccgcagccttcggatcggacgacgagctggtggatctggaactgcgggtcgagatctcgtccatcgccggtatcgaggacgcgcttctcctgaagcccgcctctggtaaggccgccgagacgcggctccgcgccgggtgggcacgctggctggaggggaaggccgactacctacggcgcgatcggatgctccgctccaacctggaatccctcaatccgcgcaaccacccgcttctccaggatccggacagccccggcctcacttctctcacccgcggcgaccgcatggtgcagcgaatgctactagccgagctcgacaagcccgcgtccaagagctttgagcggcgtaggcttctatcttacgagaacaagcagagcatgacaacaactgtgaaggagaagccgcagacgggaaggaggtggggatatttcccggggatcgatccacatttgggattctcagagttcatggagaggttcttcgagcatgggaagtgttccatgagagtgttcatggtgtggaacagcccgcagtgggcgtatgacatcaggcaccagaggggactggagagtctactcaagcagcacccagatgcctgtgtagtcatgctatcggagacactggaactagagtccttccaccaattcgtcaaggaaggatataaagttgctgttgcagtgccgaatcttgatgagcttttagaaagcactccaactcacgtatttgcatcagtgtggtatgaatggcggcagacaaaatattaccatttgcactacagtgaactagtacgccttgctgccctttacaaatatggtggaatataccttgactctgatgttattattcttaaacctttaacatcgctccggaattctattggtgccacaaatcatgtctctggaaattcccgttttggtggggctgtgttagcatttgaaaaacagagccctttattggaggagtgccttagggaattttattcgacatatgatgataccctcgtgcagtggaatggggctgaacttatgacaagagtgataagcaatatttctagcagagcagatgaaaacagggggcatcttgacattaagttggagccctttgttaaattttaccctataagctctactgatattatacgatatttctcagagcccgataacatggtccaaaaagcacatcatgatgcaatcttttctaggatcgtgaatgactctaccactttccatttttggaatggcatcacatctgctctagttcctgaacccggcagtcttgtttcgaaaatccttaaccgttactgtctccattgccttgatgttttatagttgcaacagtctgaagctcctgctaagagctttattttggtttagaacaggtacacagaagaaatctttcaatgaggtactcagaatggctagtattgctgaatcttgcaaaacattgtgatggggggaaaattaccggcagcactgtgtatatattcttttcactaaggtttgtgccggagctgcgcctgcaaagtccaagcatgttgacttgactagttattgtcgatagcaaaagtcttcctcctggcaatacagaatgcaacaactgaagacacttggaactagagagttttgactagttcggtaccccttctatatttgcacatatactgataattttcacaatttgatattttgaaaataacatgattcgtgtaagacagtagaaattgaaggaccatataccgaattcactgggtttatctagatgtttggtaaacttttatttctcagagcatgattttgtctgaattaacgacttgggaacgagaatgtcagcgttgtaagcatctgcataaaattatagtgcaggtcttggc

SEQ ID NO: 10592 - DNA, 1517 bp, Zea Mays
ggctgagtgcgcgcccatcagtcccgggttcccgccacacccctcccatccccctctcaatcctgtccccaaatctctctcttctctctagcggcgaggcgaggcggtgaagacgagcgagcggcgaggatgttgtgggtagacaagtaccggccgaaaaccctagacaaggtcaccgtccacgaccaggttgcgcggaacctcagaaagttcgtgtcggagcaggattgcccgcacctgctgttctatgggccgtcggggtccgggaagaaaaccctaatcctcgcgctcatcaagcagatgtttggcgccggcgcggagaaggttaagctggagaataagacatggaaaattgatactggaacaaggacacttgagatagaattggcgatgttgtcaagtgctcaccatgtagagatgaaccccagtgatgctggctttcaggacaggtatgttgtccaggagatcattaaagagatggccaagaacaggccaattgatgccaaaggaaggagagcatttaaagttgacaagctctcaagagaagcccagcattccctccgtaggactatggagaagtatagctcatcatgcagactgatcctatgctgtaacagctcctcaaaagtgacagaggctgtaagatcccgttgcttaaatgtgcgagtaaacgcacccagtgaagatcagattgtccaagttctagaattcattgggaagaaagaaaacctgattcttccagctggatttgctgctcgtatcgcagcacaatcaaaccgtaatctgagacgtgctatactgttttttgagacttgcaaagttcaacaatacccatttacatcaaatcaagtggcgcctcctcttgattgggagcaatacgtgtctgaaatagccacggatatactgacagaacaaagccctaaaaggctatttgatgtacgccagaaattctatgaattactcgtcaattgtatcccacccgaaagtattttgaagaagttgctagcagagttactgaggaagttagatgctgatctgaaatatgaaatctgtcgctgggccgcacactacgagcacaagatgcgccttggatcaaaggctatttttcatctggaagctttcgtggccaagttcatgagcatttacaaggagttcctggtggctacatttggttgagcaaaacctcgagctacaattagggttgtcacgttctgtcaggggctatcgcattgtatcggtatagttttgtactaatctcgtcagcgactatccttctgtcaacccgggtgacccctctgacttcatcatagcgtctgcttgcacgttgacgttcgtgacgacattatcagacgtcattacgcttggttaacaaacagcctgaaagcgggacaggctcggaagttagaaataacagcctgtgaagacgtagacgttgatgacgacacgataagaaatcatttcgctcggttaaagagaatatccttaatgtgcggcagactcagaattcagaaccaaat

SEQ ID NO: 10593 - DNA, 3585 bp, Zea Mays
gaaacatctcgacccaaccgacgccccgcctcttaaaacggcgaccttcctccatggccaaatcgttgtcctcctccgcttccctccaaatccaccctggatccaaccccgattttccccagcagaagcaaacccgagcaaattgagcgcttgcagcttcacccggcgaagcagaatcgaatcggagccgctcgccactccgcgatggggatcctcctccggtccctcctcgtcgcctcgctcgtcctcagttcgctcgtcttgcacgtcgcagcggctaaaactatagatccttacaaggttctaggagttgacaagaatgctagccaacgggatattcagaaagcctttcacaacatatgagattctatctgatgaagagaagaggaaaaactatgacctctacggggatgagaagggtaaccctgaatttggtggtggaaattttggaaatcatgggggttctacatacttcactggtggtggccctaagtccagtcaattcacatctggtaatggatggcagacgatgggtggtcaaggaaatacaaaaacgttttcattttcatttggtggtaaacctggggccagtggtggaaacccgtttggtggtggttttgatcttggtgatgttttctcgaacctttttggtggtggaccaatgggtgatagccatattggtggatcaagtggctcagctagagccaacactggaacttctggtcagcattctggcactaccaagattgaggatatcaccacacaagttttcaataaagaagtagctgatcaaggaactacttggcttctgttattttatactccccaatctaaaagtcagtttgtgctagagagtgtcatgcaagacgtggtccattcactagatggtgttcttagggctggtaagatcaactgtgacaatgaaaaatctctttgcaaaaggtctggtgtttcaatagggaaatcggcccgtctcttcatctattcatatgctactgcagagaaagggtctttgcacgagtattctggggaacatgatgctaagagcttgaagacattttgtcaagaacacctgccaagattctccaaacgggtagatattagccaattcagcttccctttaaatgttctaccaaaccttcctcaagtgctcttactatcgagtaagaaggacacaccagcaatgtggcgtgctatcagtgggatgttccgcaatcggataatcttttatgatgctgaggttcacgatgtttctcatcctctgctgaaaagtcttggcgtgaagaatctcccagctgtaattggccgaaccgtgaatggtgaggagctccttctgaaggatggcatttcggtgaaagatctcagatctggtgtcaaggaattgaagacactgctagatagttttgagaagaagaataagaagttattatcgaatctagctaataagaaaccttccggtcaatgggaagaaatcaagaagattcctctcctcacagcttccaactttgaggaaacatgtggagagaagacttcagtatgcatcattggtgttttcgggtcaaacaaagccaaggggcagcttgaagcagtcctgtctgagatatctatgaagactttgataagggggcagaactataattccagaaatgctgtctcctatgctttgctggataaggacaaacaatctggattcctgtcatcgtttgacaagtctggatacaggtcatctgacaagctgctcatcgcctacaagccccgccgggggaagttcgcggtgtacgacggcgaggtgacactggaagaagctgaaaggttcgtgggatccgttttgaacggagacgttcaactgtcgccgacgaaacaaaaacctgtccttcggtagacgattattgcaagttgcaagggttttagatctaacacttattatcttaattaaggccttaattaaggcttgtacatagatggacgaagagagtaaaatcatagagcgtttgctggacagtttagtcgttcggtaaaccagagttgctacatctctccctcaaccgtgccaatgtaaattgtgcaaatgctgcagtcctgtcgagatattgaatatatacaggcatacagcggaccatttctatactagccaagtctactaccttttgtttccacaatatcctgttgtcttgttcaaagtatactagcaaacatttttttttcttttggtctgccttgagatagagttgcttctgagaacatgacgcgactgttactcacagaatcagttgtgaggaatcaacccatttcacagcaaaattgtatgaaaaaaaaaaacatatatttactggaatcagcttattttacagaaaaaatgcaggaaaaaatcatatgttccaaaagggagccttaaatgccgtggagatcgaagaagaaatgaattgctgttgaatttatgccaaaattgctgtcgatttgattgtataccgaaagacaactctgggcttacggatgatacaaaattcggcccagcccaacgtgcttgtcggatctatccagtcgcacgccaccgcctcacaccacacggctctacacggctccctcttcgacagcctaattctcagacgaatgctatcttcactggcctcgacctcgagcacaaaacgctgtggccgagcggatgagaggaggatggcttccaccagcctcagctcctccttgcgcagggctactgcaaactagcaggagtcccaagatcttcgtcgtaccacacccagctgacctgttgctcgaggaatccctcccagaacgcggaggcagagctcctccggttgagctacccggcgaggaaataacaagcatgcaaaagaccagctgccggcgggccacggatggcgaccaagcggcgccgtccgcggcgcaagaaacaaccgacacccctcctcctcctccggcctttcacgttcccagcgccgagagattcccggtgacgcctggcaacggacagccgccgcagtagttagccaacgccaacggcgtcgcgccgagcgagccgctgacggcgcgggagcggctgcgggcggcgcgcgtgctgggcaagtacgcggagccgccggcgtcgaaaccggccaagccgagttcgggagcggcgtgctggacgcgctgcggggaggcggacgcgaagaaggccggggggtgggggcgggcggcgcgggtcgcgtcgcggatgcccgaggcgccgccgcgccgggcaacctgttcgacgacagcaggcgtgggatgcccaaggaggggtggacgtcttcctcgtcctcgtctccttcacgctcatcaccagcgtcatgttcgacaccgccttcctcgtgtggaagtggaagctcggcgcaatacacttcaacgagtactagctagccttttgactgactatagattggggaataaaagggcgattatgcagtgattcttgcggttgacaacaagggcaaccttgagccgccacaatctatatgtatactgatctggcgcagattgttgagagaacataaaaatgttgcaattaaacaaaaccgatgtcatatctacttgattcataggtaaacgtta

SEQ ID NO: 10594 - DNA, 1548 bp, Zea Mays
tggaaagccaccgctcaccttctcgctcgctcccccaccgaacgcctcttggtgggagaagaattggccgaaaagcttcgcgttggctggccgggatctctccgtctttaattaccggacccctggggggattccctgctgcctcattagaccagaccagacagggagacagggagagggttggggagggaggagaggagagacacaaacaacgggtggtcgctgggaagaggaagaagaggcccgcggggaagcggagggatccagaagaagatgaggcagtgggtcctggccgtcgccattctcgccgctgcttcggcggcggcgctcctcctcggggccgaggcccagcagcagggccaccagacagagaggatctcaggaagcgccggcgacgtgctggaagacaaccccgtcgggaggctaaaggtgtacgtgtacgacctccccagcaagtacaacaagaagctgctgaagaaggaccccaggtgcctgagccacatgttcgccgcggagatcttcatgcaccggttcctgctgtcgagcgccgtccggaccttcaaccccgaggaggcggactggttctacacgcccgtgtacaccacctgcgacctgaccccgtccggcctcccgctccccttcaagtccccccggatgatgcgcagcgccatcgagctcgtcgccaccaactggccgtactggaacaggtcggagggcgccgaccacttcttcgtcacgccacatgactttggcgcttgcttccattatcaggaagagaaagcgatcggacgcgggatccttcccttgctccagcgtgccacgctggtccagaccttcggacagaagaaccatgtctgcctcaaggacgggtccatcacaatcccgccgttcgcgcctccccagaagatgcaggctcaccttatccctgcggacaccccgcgctccatcttcgtctacttccgcggtctgttctacgacaccagcaacgatcccgagggcggttactacgcgaggggcgcacgcgcgtcggtctgggagaacttcaagaacaacccgctcttcgacatctcgacggaccacccggcgacgtactacgaggacatgcagcgctcggtgttctgcctgtgcccgctgggctgggcgccgtggagcccgaggctggtggaggcggtggtgttcggctgcatccccgtgatcgtcgccgacgacatcgtgctgcccttcgcggacgccatcccgtgggaggacatcggcgtgttcgtcgcggaggaggacgtccccaggctcgacaccatcctcacgtccatccccaccgacgtcgtcctgcggaagcagcgcctcctcgccaacccgtccatgaagcaggccatgctgttcccgcagcccgcccaggcgggagacgcgttccaccagatcctcaacggcctcgcgcgcaagctcccgcacggggacggcgtcttcctcaagcccggggacgagagggtcctcaactggaccgcaggaccgcctggcgacctcaagccttggtagcatcgacttggatcgacg

SEQ ID NO: 10595 - DNA, 1238 bp, Zea Mays
cagaggtttccggacataacttgttcagttcatgtctattgattcaaagcagatctacagctgtgtctgtaaaccacatccgagtatcattgcataacccagaatcaaataatgaaaggcatgtcaccttattttggctgcatagttggccgtgtcgcgaataggatcaaggatgggaagtttacactaaacggacttgagtattcattacctgtcaacaatggacctaacagccttcatggtgggttgaagggatttgataaggtcgtgtgggatgtcgtggagcacaaagatggcgaatgcccttcaataacttttcagtatcacagcaaggacggggaagaaggtacacattgctagcattcttgttctgatgtctgcatcttaaacaactcacccaattcagcatcccccaggctatccaggcgatgtaaccattcgagcaacatactctcttcctgaagctactactctaaggcttgacatggaagctacaccagagaacaaagcaactcctataagcctggcgcagcacacctactggaacctcgcaggtcacgcctgcggcgacatcttaaaccactcgctgcagatctggggcaagcacatcactccggtcgacgagaacacaattcccaccggcgagataatgcccgtcgatggcaccccttttgacttcacgacggagcgcaggattggcgagcgcatcgacggtgttcctggagggtatgatcataactacgtgctggactgtggcgacgagaaggacggcctgaagcgtgcggccaggctgaaagatccgtcgagcttgcggaccctggacctgtggactgacgcacccggcatgcagctgtacactgccaactacgtggatggcatcggtggcaaggcgggcgctgtctacgcgaagcatgctggagtgtgcttggaaacccaggggttcccgaatgccatcaaccagcctgagtttccctctgtggttgttcggcccggtgagaagtataagcatactatgctgtttgagttctcgggatgttgaatagtgactggacagcataaattgatgtaaaacatgttgaatgaataaacaagcagaaggataagctgtgataataatgcactagtttgcttcagattattgtagaggggtaatcttgtccagacctagccatccttttctgtgacattattgcaatgactgcgtgtttatgctcaacaacaaatacatagttcgccaa

SEQ ID NO: 10596 - DNA, 1044 bp, Zea Mays
ccagagtgccacctgccacggacacggagggagggaggtgtgccatcagcgcgcagcatcctccagccgatagcctctcactgcctcacttcagcctcggacctgaacagacctcaggaaaggggagacctggaacgaccgtcgagctagagcggctgcgcgctgcgccgagagctggggagtggggactggggaccgaattgaaggcaagaaagtagaaacgaaccaccacaggcggcgcggcaatggatgagcgcggggagaaggaggaggagcacggagtagtggaggaggagacggcggcggttgtgctcaaggaggtggaggtggagatggagatggtcggcggctctgaagaagcctcggcggcgccgctcctcctcgcgcacccgtgctcgctgctgcagctcctgctccgcgcctgcgccggctgcctggtgcgcctgctgcacggccactgcagcgacggcgccaacgacgacccaaaagctgctgccgacgacgacgacgctgcgcctgaagctgctgctgctgcggcggcggcggcgggcgatggcggcgacaaggcagccaccgaggtgtgggcagtgaggaggaggccgacgacgcccggccgtccgagagaaggttccggtggcaatggagggaaccaccactagctagctagctctctagcgcgacgccgctgcaaccgatccgaatgaaatcaccttggggccgggggcaggtcgggtgtttttattgaaacgaaaaggacgacgggaggcgaaaataaagcatacccgatcgagagggcagaaacgacagcgccaaccttgcactgcactggcgtcttggcagttggcacaacccatgcatgaccgaaactacttctgatgaaccacacgcgcgcgtgcacagctgcgcaggacgtacgcgacgacgaccaccaagtacgacgtgtgccccggcctggctatatgtcgtcgttgttagaaagttaggcatttttagttttaatttaatccagataatcagtgcgatatatgtaatgacatgtatatg

SEQ ID NO: 10597 - DNA, 2532 bp, Zea Mays
aaatagcgcgcctcatccgcgccgcccccgcgctttttctctctgctgacgccgccgccgccgggagccgtaccccgggagagccccccagcccttatcaaaccctaaatcaaaaactatccaaaaaaatccgcaaaaaactagaaaaaatcccaaaaatcaccacttgattggagatggcggcgcaagggcaggcggcggctggatccgcgtccgagtctggcggctcaccggctgcctcagctgctgcagcggcggcggctgcgttcccggcgacttctctctacgtgggtgacctgcacgagagcgttcaggacgcacagctcttcgacgtcttcagccaggtcggcggcgtcgtctccgtgcgcgtctgcagagacatcaactcccgcaagtcgctcggctacgcctacgtcaactacaacaacactagcgacgctgcacgggcacttgaactgcttaacttcactcctatcaatggaaagcctatcaggatcatgtattctaaccgtgaccccagctcgcgcaaaagcggtgcaggaaatatatttattaagaatcttgataagtcaatagacaacaaagctttatatgacacgttctgtgcatttgggaatatcctttcatgtaaaattgcaacagacccctcaggagaatcaaggggatatggttttgttcagtttgagatggatgaatccgctcagtctgccattgataaactcaatggtatgcttatcaatgacaagaaagtgtatgttggaccttttgttcgtaagcaggacagggaaaatgtctcgaacaatatcaaattcagtaatgtgtatgtgaagaatctgtccgatactgttactgatgatgagttgaaggagatgtttggaaaatatggaaccataacaagtgctgttgttatgcgggatagtgatggaaattctaggtgttttggatttgtcaattttgaaaatgcagatgctgctgctcaggctgttcaagagttgaatggcaagatattcaatgataaggaactgtatgttggaagagcacaaaagaagtctgaaagagagatggagttgaaggagaaatttgaaaagaatattcaagaggtagctgagaagttccaaaacactaacttgtatctgaagaacttagatgataacattgatgatgaaaagttgcgtgaaatctttgctgagtatggcaatattacttcttgcaaggttatgcgggattcttatggtgttagcagagggtctggatttgtttctttcaaatctgctgaagatgctaaccgagctatgaatggcaaaatggttggaagcaagcccctttatgtagctcttgcacagcgtaaagatgacagaaaggcaaagctacaggcacagttttcacaaatgcgtcctgttgcaatggcaccttcagtaggtcctcgcatgcccatgtttccacctagtgttcctggagttggtcagcagctgttttatggtcagccacctccagccttcatcaaccctcaggctggatttgctttccagcaacctatgatgcctggtatgaggcctggtggtccaatgccgaactttatgatgcctatggttcagcagggacagcaaccgcaacgtcctgctggtaggcgtgctgggtctggtggaatgcagcagcccatgccaatgggtagtcagcaacagatattccctagaggtggtcgtggctaccgctatgctactggacgtggaatgcctgatcctggcatgcataatgttggtgctgtgatgccatctccatatgagatgggagggatggcaatgagagatgctggtgtctcacaacctgttccaattggggcactagccactgcgcttgctaacgcctcaccagatcagcaaagactgatgcttggtgagaacctgtatcctcttgttgaacagctggagcgtgagcaggctgccaaggtcactggcatgcttttggagatggaccagacggaggttcttcacctgctggagtcgccagatgctctcaaggctaaggttgctgaagccatggaggttctccgctcagcccagcatctccagcagagcaatgcctccaccgagcagcagctggctaatctatcactgaatgatggcgtcctctccagctgaatgtttctgatgattcagaaattgctggcaatttttgcttgatacctatctctagaatgcaattactttgtttactttattggaattttaggtgctgctctataattagctgaactagggggtggatttaattgccttgaattggttattttggttatatgaatatgttatgtcggagctcaggtctgtcattttggtatatggttatgttagcccttgtccgtttatcacccgaattatcacagattgaattttagagcgtcattgcttttctagctgatattttgttaagcaactcgttgcctcgagatgatcgattaggctatgatttttttctagcagcgtactaatttttatcttttatttcaaaccctagtataaaatggtatataaa

SEQ ID NO: 10598 - DNA, 2556 bp, Zea Mays
aaatagcgcgcctcatccgcgccgcccccgcgctttttctctctgctgacgccgccgccgccgggagccgtaccccgggagagccccccagcccttatcaaaccctaaatcaaaaactatccaaaaaaatccgcaaaaaactagaaaaaatcccaaaaatcaccacttgattggagatggcggcgcaagggcaggcggcggctggatccgcgtccgagtctggcggctcaccggctgcctcagctgctgcagcggcggcggctgcgttcccggcgacttctctctacgtgggtgacctgcacgagagcgttcaggacgcacagctcttcgacgtcttcagccaggtcggcggcgtcgtctccgtgcgcgtctgcagagacatcaactcccgcaagtcgctcggctacgcctacgtcaactacaacaacactagcgacgctgcacgggcacttgaactgcttaacttcactcctatcaatggaaagcctatcaggatcatgtattctaaccgtgaccccagctcgcgcaaaagcggtgcaggaaatatatttattaagaatcttgataagtcaatagacaacaaagctttatatgacacgttctgtgcatttgggaatatcctttcatgtaaaattgcaacagacccctcaggagaatcaaggggatatggttttgttcagtttgagatggatgaatccgctcagtctgccattgataaactcaatggtatgcttatcaatgacaagaaagtgtatgttggaccttttgttcgtaagcaggacagggaaaatgtctcgaacaatatcaaattcagtaatgtgtatgtgaagaatctgtccgatactgttactgatgatgagttgaaggagatgtttggaaaatatggaaccataacaagtgctgttgttatgcgggatagtgatggaaattctaggtgttttggatttgtcaattttgaaaatgcagatgctgctgctcaggctgttcaagagttgaatggcaagatattcaatgataaggaactgtatgttggaagagcacaaaagaagtctgaaagagagatggagttgaaggagaaatttgaaaagaatattcaagaggtagctgagaagttccaaaacactaacttgtatctgaagaacttagatgataacattgatgatgaaaagttgcgtgaaatctttgctgagtatggcaatattacttcttgcaaggttatgcgggattcttatggtgttagcagagggtctggatttgtttctttcaaatctgctgaagatgctaaccgagctatttctcccatttagcttaccgagatgaatggcaaaatggttggaagcaagcccctttatgtagctcttgcacagcgtaaagatgacagaaaggcaaagctacaggcacagttttcacaaatgcgtcctgttgcaatggcaccttcagtaggtcctcgcatgcccatgtttccacctagtgttcctggagttggtcagcagctgttttatggtcagccacctccagccttcatcaaccctcaggctggatttgctttccagcaacctatgatgcctggtatgaggcctggtggtccaatgccgaactttatgatgcctatggttcagcagggacagcaaccgcaacgtcctgctggtaggcgtgctgggtctggtggaatgcagcagcccatgccaatgggtagtcagcaacagatattccctagaggtggtcgtggctaccgctatgctactggacgtggaatgcctgatcctggcatgcataatgttggtgctgtgatgccatctccatatgagatgggagggatggcaatgagagatgctggtgtctcacaacctgttccaattggggcactagccactgcgcttgctaacgcctcaccagatcagcaaagactgatgcttggtgagaacctgtatcctcttgttgaacagctggagcgtgagcaggctgccaaggtcactggcatgcttttggagatggaccagacggaggttcttcacctgctggagtcgccagatgctctcaaggctaaggttgctgaagccatggaggttctccgctcagcccagcatctccagcagagcaatgcctccaccgagcagcagctggctaatctatcactgaatgatggcgtcctctccagctgaatgtttctgatgattcagaaattgctggcaatttttgcttgatacctatctctagaatgcaattactttgtttactttattggaattttaggtgctgctctataattagctgaactagggggtggatttaattgccttgaattggttattttggttatatgaatatgttatgtcggagctcaggtctgtcattttggtatatggttatgttagcccttgtccgtttatcacccgaattatcacagattgaattttagagcgtcattgcttttctagctgatattttgttaagcaactcgttgcctcgagatgatcgattaggctatgatttttttctagcagcgtactaatttttatcttttatttcaaaccctagtataaaatggtatataaa

SEQ ID NO: 10599 - DNA, 72 bp, Zea Mays
tcccacacagacacatacacaaatccgtcaacaaaacaagtgcacacaaataaatacctggctcgctagatt

SEQ ID NO: 10600 - DNA, 428 bp, Zea Mays
tcagctcaaataggtagctagatattatcagcaaataaagctccatcataataggttcacaaaacgactgtctgatttatcttagtggcaaacgctggattcaaatacaactagaaccatgaaaagtggcctactgaagtgcaggcaagacgttcaactgatggcggaccgtgacaccatggcaggttgacatctctccacaggcacaccaacgcatccgaagaaatgtatgtacccacgcatgtcatcaggtccacaatccatctcgatctgcctacttggatctctgcctcatctttctgcgcttcctcttgagcctcctcatgcgcttcttcttccacggccctcatggtcgcttcttcgcgtgctaacctcgatgcgtctcctcctgcggcgtcggcggcggttcccgatgtggggaggggatt

SEQ ID NO: 10601 - DNA, 50 bp, Zea Mays
ctccacaaatttcacctctgactatgaaatacgaatgcccccgagtggcc

SEQ ID NO: 10602 - DNA, 75 bp, Zea Mays
gcggtcggacgacgaggtggcggcgtcggagcgagggcagcttagggttcttctgttggaggcgtggaggcggcg

SEQ ID NO: 10603 - DNA, 69 bp, Zea Mays
ggtagtagcaaacatgaagggggaaccaagtgcaactgaccatgctaaagcaacatgagttgcccttct

SEQ ID NO: 10604 - DNA, 57 bp, Zea Mays
gatttgaatgttgcttttttttttttttttttttttttttttttttttgtattcttc

SEQ ID NO: 10605 - DNA, 720 bp, Zea Mays
gttctgcgtacgccattattatccacaacactcatcgatctacacacatacatagtttcttctactacacgacgacaaacatggggaagcctgcgaagatcggagagtggggtggatacgccggcgatcgtcgggatctgagggctactccggaccggctgatcgaggtgaaggtcacggcggacaacagcagctgcatccgctccatctccttcatctacatcggagccgatggcaaaccgtacgaggaggggccatggggtttcggccatgctggcacggagtacaagattgatctgtgcaggttcgacgagagcttgacggagatctccgggaccacgggcccagcctacaacattgacaatctggtcaagtctctcaaattcgtcaccaacaaacgcgcttacggaccgtacggcagggacgagggcaccccgttccgtgtcaaggtgatgaacaacggccacgtcgctggcttctttggccgctctggagattgcctggacgcgatcgggctctacgtgaaccccaactaataactaaaacgatggatcggatcatctgcatgcatgcatatgcagtatgcatgctgcttgcctgcctgtaacgaatatgaatgcataaaataacgcccctgctgctcccatgcatcagcagtgtgtaccactatgttatatatatatatattgtatttcgctaccgaataaaaacataaataaa

SEQ ID NO: 10606 - DNA, 62 bp, Zea Mays
cgagcatgcgtcacaaccccaaccccttcgacgagggcagcgccgaagacaaccccttctcc

SEQ ID NO: 10607 - DNA, 658 bp, Zea Mays
tttcgtgtattcgccttttttaaaggaatcgccaccgactggcgcacgggagccacggagagcaaaggcagcacactcagctatccagcaaaagagatcgagacgcaggagtcatggccaccgtcagcgccgccgtggtgaccaccatcgttgcccgcgccgcgatcgccaggcccaatgctctagggctgcctgcgctgagggcgaggagcgagagggtgcggtgcagctacgccaaggacgcggccccagtcagcaccaagggcgcaggcgcgtcgctgctcgccgcagcgggcgcggtgaccgcgtcggcggggcccgcgctggcgctcgtggacgagcgcatgtccacggagggcaccgggctgagcctcgggctcagcaacaacctgctggggtggatcctcctgggggtcttcggcctcatctggtccctctacaccatctacacctctgacctcgacgaggacgaggagtccggtggcctctcgctctagatccaccctctcctgttaatgatctgaatgtaaacatggtggcggtcatcggtgtaaatttagacatggctatttgcatctaagatccatcctctcctgttaataatgtttggagactacgtacgcctgaagcaatgcaatagcaactttgcgagaaaaaa

SEQ ID NO: 10608 - DNA, 955 bp, Zea Mays
tgcaagcttgcatccatacgccgatacgcgtgcatccatccatccaccattatttccattttccaccgatcacacgtacacaggcctatttaaggagcgacatcccactgcaactctcctcaccactcatcaccagctagctctagcaaagcacttgccatctaccgaccgccgcattccaaacagcccgacgagctagcagagcggcaggcacctccctcctcaaggaacatggcccgcatgcagaagttggcagtggcgacggcggccgtggtggccttggtgctgctggcggcggcggcgacctcggaggcggccatcagctgcgggcaggtggcgtcggccatcgcgccctgcatctcctacgcgcgcggccagggctcggggccctccgctggctgctgcagcggcgtcaagagcctcaacaacgccgcccgcaccaccgccgaccgccgcgccgcctgcaactgcctcaagaacgccgccgccggcgtcagcggcctcaacgccggcaacgccgccagcatcccctccaagtgcggcgtcagcatcccctacaccatcagcacctccaccgactgctccagggtgaactgaaccctaaacgacgacgacggcgccggcggccgcctgaagacgatccatatctatcccgccgtcgtcggcgcccgcggatcggaccgtcatgaccatatctacctacgcatgatcacgacttgcatgtctactactactactgaataaaaaacctctccgcgcacgtcgtccttgtgtttgtgtgtgtgagagagagaggagatggagagccggccatgtccttttggctgtttggtttatttttgagttcatgcggtctttatttatttccatgtacgctgcttcctcgtatacccactttaaatttgtaccatgcatgcatgttccttatgatacactcacctctttttgttaagaa

SEQ ID NO: 10609 - DNA, 56 bp, Zea Mays
attttcctttgttcaaaaaaaaaaaaaaaaaaaaaaaaaaaaaggatagacataat

SEQ ID NO: 10610 - DNA, 599 bp, Zea Mays
gtatccgcgaggatccccccacaccttgcgacctgcgttgtcacccacccatcaaggttggggccgccagcaggttcagccgttcctgttcttgataaaacgagagaaggatggcggcagtgtctcagggagctgtcctattcttgtttctcctcctcgtcgcagcagaggtgggaaccatcgatgccaaaatgggagtagccatgcccatgcatgccttgataatggagaacgtgaaacagcaggagaaggagaaggagaaggagaaggaggagaaaagcacggagaaggaagagagtcgatgcttatcgcagagtctccagttcgagggcttctgcttcaacagcgacagatgcgccgaggtgtgcatgaaggagagctttcccggtggcgagtgcaagcgggacgtggccatgcgcaagtgcttctgcaagaagccttgctagttcatcggtcttgctaattgttgatgggtgcttcattaatttgatttgatgggtctcatggctacgagaaacaaaactacttttgataaaataattaagatacaacgaagcaaacaaaaaaagtaactcaaaataaagatcacaacagatttt

SEQ ID NO: 10611 - DNA, 1051 bp, Zea Mays
accagcggatatatatactggagcctggcgagatcaccctaacccctcacactcccatccagccgccaccaggtgcagagtctttcgtcatctcttctccggcgaagaacccccagtcgcccaccagatcacttgttaaactttgttgaggggtgatggcggtttctttcgcaaacctcaactccgaggcagggcttaaaaagcttgatgagtaccttctcactcgcagctacatcactggctaccaagcttccaaggatgacttggctgtctacacttcgttttcggctgctccctcgtccaagtatatcaacgtagcaaggtggtttaaccacattgatgcgctcgtgaggctgagcggaattactgcagagggccaaggtgtgaaggttgaatcctcagcagttccttcagccccaactccagatgttgctgaagcacaggccccagttgctgaggaggacgacgacgatgatgttgacctttttggtgaggagaccgaagatgagaagaaggctgctgaagagcgtgctgcagctgccaaggcttctggcaagaagaaagaatctgggaagtcatcagttttacttgatgtgaagccatgggacgatgagactgacatggccaagctcgaggaagctgttaggagtgtccagatggaagggctgctctggggcgcatccaagcttgtcccagttggatatggtatcaagaagctgcaaatcatgatgaccatcgtcgacgaccttgtctctgtcgacactctcattgaggactatctgtgcgctgagccagtgaacgagtacgtgcagagctgcgacatagttgccttcaacaagatctaggcgtgacttccgatcagtccttcccctggggtgctggcgatggtggtggctgggcaatgcaccagcctaatttatccatagctatatgtctgctttgtgtggccagtgatattgccgtgagtatttttggatcctattcgagtcgaatgtaccagtaccagagttaatttgctttaattcgaaacaccgttccagttggaattcca

SEQ ID NO: 10612 - DNA, 59 bp, Zea Mays
attctgtattcttgattttttttttttttttttttttttttttttttttttttttttca

SEQ ID NO: 10613 - DNA, 190 bp, Zea Mays
tccgccgcccgcactaccacgcccccgctcctctcgtctctatcttcgcctcttccatcgcaggattcagcggccatgggcggcggcaacgcccagaagtccaagatggcgcgcgagaggaacgccgagaagaacaagggcggcaaaggcagccagctggaggccaacaagaaggccatgaacatccagg

SEQ ID NO: 10614 - DNA, 73 bp, Zea Mays
gttcaccacaccatagccagaacattctagggagttgctggcctgtatgaagcttgttccgcaatcatctcag

SEQ ID NO: 10615 - DNA, 2568 bp, Zea Mays
acccgttcgcctctcaccttttcgctgtactcactcgccacacacaccccctctccagctccgttggagctccggacagcagcaggcgcggggcggtcacgtagtaagcagctctcggctccctctccccttgctccatatgatcgtgcaacccatcgagctacgcgcgtggactgccttccctgggtcggcgcaggaggggatcggaaggatggcggcgtcggtttccagggccatctgcgttcagaagccgggctcaaaatgcaccagggacagggaagcgacctccttcgcccgccgatcggtcgcagcgccgaggcccccgcacgccaaagccgccagcattgctcgccgctgagggccgtcgttgacgccgcgccgatacagacgaccaaaaagagggtgttccacttcggcaagggcaagagcgagggcaacaagaccatgaaggaactgctgggcggcaagggcgcgaacctggcggagatggcgagcatcgggctgtcggtgccgccggggttcacggtgtcgacggaggcgtgccagcagtaccaggacgccgggtgcgccctccccgcgggcctctgggccgagatcgtcgacggcctgcagtgggtggaggagtacatgggcgccaccctgggcgatccgcagcgcccgctcctgctctccgtccgctccggcgccgccgtgtccatgcccggcatgatggacacggtgctcaacctggggctcaacgacgaagtggccgccgggctggcggccaagagcggggagcgcttcgcctacgactccttccgccgcttcctcgacatgttcggcaacgtcgtcatggacatcccccgctcactgttcgaagagaagcttgagcacatgaaggaatccaaggggctgaagaacgacaccgacctcacggcctctgacctcaaagagctcgtgggtcagtacaaggaggtctacctctcagccaagggagagccattcccctcagaccccaagaagcagctggagctggcagtgctggctgtgttcaactcgtgggagagccccagggccaagaagtacaggagcatcaaccagatcactggcctcaggggcaccgccgtgaacgtgcagtgcatggtgttcggcaacatggggaacacttctggcaccggcgtgctcttcaccaggaaccccaacaccggagagaagaagctgtatggcgagttcctggtgaacgctcagggtgaggatgtggttgccggaataagaaccccagaggaccttgacgccatgaagaacctcatgccacaggcctacgacgagcttgttgagaactgcaacatcctggagagccactataaggaaatgcaggatatcgagttcactgtccaggaaaacaggctgtggatgttgcagtgcaggacagggaaacgtacgggcaaaagtgccgtgaagatcgccgtggacatggttaacgagggccttgttgagccccgctcagcgatcaagatggtagagccaggccacctggaccagcttctccatcctcagtttgagaacccgtcggcgtacaaggatcaagtcattgccactggtctgccagcctcacctggggctgctgtgggccaggttgtgttcactgctgaggatgctgaagcatggcattcccaagggaaagctgctattctggtaagggcggagaccagccctgaggacgttggtggcatgcacgctgctgtggggattcttacagagaggggtggcatgacttcccacgctgctgtggtcgcacgtgggtgggggaaatgctgcgtctcgggatgctcaggcattcgcgtaaacgatgcggagaagctcgtgacgatcggaggccatgtgctgcgcgaaggtgagtggctgtcgctgaatgggtcgactggtgaggtgatccttgggaagcagccgctttccccaccagcccttagtggtgatctgggaactttcatggcctgggtggatgatgttagaaagctcaaggtcctggctaacgccgatacccctgatgatgcattgactgcgcgaaacaatggggcacaaggaattggattatgccggacagagcacatgttctttgcttcagacgagaggattaaggctgtcaggcagatgattatggctcccacgcttgagctgaggcagcaggcgctcgaccgtctcttgccgtatcagaggtctgacttcgaaggcattttccgtgctatggatggactcccggtgaccatccgactcctggaccctcccctccacgagttccttccagaagggaacatcgaggacattgtaagtgaattatgtgctgagacgggagccaaccaggaggatgccctcgcgcgaattgaaaagctttcagaagtaaacccgatgcttggcttccgtgggtgcaggcttggtatatcgtaccctgaattgacagagatgcaagcccgggccatttttgaagctgctatagcaatgaccaaccagggtgttcaagtgttcccagagataatggttcctcttgttggaacaccacagctaattataatagctgacgtttggtatttc

SEQ ID NO: 10616 - DNA, 529 bp, Zea Mays
gtcggagctgaacgacaagaagaggctggccaccagtggagccaactttgcgcgcgcctacaccgtggagttcggcagctgccagttcccctacaacttcactgggtgccaggacctcgccaagcagaagaagtccccttcatcagcgacgacctcgagattgagtgcgaggggaaggagaagttcaagtgcggctccaacgttttctggaagtggtgaagcagctagcagcagcgtctgatgggaatggaggagatcatcacctgtcttgtcgaccctagatatgtccaaactgcagggaaattaaatcttcatgtgtaattgtgctcattctgtttcaatcatctcaacatccgatcatgaacctcttgcattattaactggctcgatcgtcttctcagtttaagacattggaggctgctttgtttgtttcagaggtccttcttaagatgatgctatattttgtcatggttaatgtgataaacagggtcaggtcggattattcttgaatatataaaatagaatttta

SEQ ID NO: 10617 - DNA, 720 bp, Zea Mays
cccatcccacgcctcgccgtgtccaggctttaagccacacgcacttgagctccaccgccactaccaccagtaccacaccactccgcgctagctgaggacggtacagcggcacagaggtgcgacgtacgacgacgacgacgcaggcgccacacatggcatcccagctctccgccgccgtgccccggttccacggcctccggggctacgccgcgcccaggtccgcggtggcagcgctgccgtccgtgagggtgggcaggaagaggtcgtcgtcgcagggcatccgctgcgactacatcggctccgccaccaacctgatcatggtgacgacgacgacgctgatgctgttcgcggggcggttcgggctggcgccgtccgcgaaccgcaaggcgacggcggggctgaagctggaggcgcgcgactccggcctgcagacgggtgaccccgccgggttcaccctcgccgacacgctggcctgcggcgccgtcggccacatcctcggcgtcggcatcgtgctcgggctcaagaacaccggcgccctcgaccagatcatcggctagatccctacgtcgccgttgttaagatcagactcagcagcctcgatcgcgccgccggccggcaggtgcaggtggtgactttgtaacgtgtgtgcgtgcgtacgtgtacattgcatccatcttggttccaatggacatatagctcctgttgctcctctaaaaaaac

SEQ ID NO: 10618 - DNA, 54 bp, Zea Mays
acccagatccggccaggttgccaagctgcaagcctgcaactcgatacatcaaag

SEQ ID NO: 10619 - DNA, 50 bp, Zea Mays
cagaattatacagttaaatatgctgctctgtccagctctttgcgaaaatt

SEQ ID NO: 10620 - DNA, 887 bp, Zea Mays
ccatatccgtccgttgccctttaaagtgtcccatgggcacatctaggacccggcccaaatcccccgactcctcgcttcctcccgttccgtcgccgccgcgcgcctcggagaagagatagaggcggccgctgcatcgaccccgcgccacccccgcctgcctcccccggcaccgatcgggtttgatcgatggcgtcgaagaggatcctgaaggagttgaaggacctgcagaaggacccgcccacctcctgcagcgcaggtcctgttggtgaggacatgttccattggcaagcgaccatcatggggccttcggacagcccatttgcaggtggggtattcttggtgaacattcacttcccaccggattaccctttcaagccaccaaaggtgtctttccgcaccaaggttttccacccgaacatcaacagcaacggcagcatttgccttgacattcttaaggaacagtggagtcctgctttaactatctcaaaggttctcctgtcaatctgctcactgctcacggacccaaaccctgatgatcctcttgtccctgagattgctcacatgtacaagaccgacagggccaagtatgagtccaccgcacgctcctggacacagaagtatgccatgggctagaagcaaggctaaaagctggccaaactggtgaatgtgccggaccccaaatcgttatcacctaaataaccagtcaagtcgcaagtatgaatggacttttgaggaccattgtgccctgttgaactcatgtattaccttgtgaagtccgttgtgtctggtttctacctgaccgtttcgttatctgatgctgtttctttaatatctgatgctgcttcattaaccatacttctatatggtttgtggtgttgctgtttaaa

SEQ ID NO: 10621 - DNA, 1416 bp, Zea Mays
tcacgtcattagcccgcacctcatctcagcgcacccgcacccgcacccggccgccttcgtcttcgtcccgttccctccagtccggctatataacccgcgcgccctcccatccgccgctccattccgtcgtcgtcgtcagcagcttctgcttgctctggggggaaggagagagagagagcgagagagagatctagtagagaggctagctaggtggtcctcgaacgaagatgttggcggtgttcagcgggcaggtggtggaggtgccggcggagctggtggcggcgggcagccggacgccgtcgcccaagacgaaggcgtcgcagctggtggggcgcttcctggccgcctccgagccggccgtgtccgtgcagctcggcgaccacggccacctcgcctactcccacaccaaccaggcgctcctccgccccaggtcgttcgcggccaaggacgaggtgttctgcctgttcgagggggtgctggacaacctgggtcgtctgagccagcagcacgggctgtcaagcaagggcgccaacgaggtgctcctcgtcatcgaggcctacaagacgctgcgcgaccgcgcgccctacccggccagcttcatgctcgcccagctcaccggctcctacgccttcgtcctcttcgacaagtccaccaactccctgctagtcgcatccgaccccgagggcagggtgccgctcttctgggggatcaccgccgacggctgcgtcgccttctccgacgacatcgacatgctcaaaggctcatgcggcaagtcgctcgcgccgttcccgcaaggctgcttctactccaacgccctcggagggctcaagtgctacgagaaccccaagcacaaggtcaccgctgtccccgccgacgaagaagagatctgcggtgccactttcaaggtggtggaaggctctactgtcctgacggcgctgcactgatcggtcatcagctggcggaggcgatgcgatgatgatgcagaactttgtacatgcgttggtggatggtggtgtaacatagtggctgccaacaagtcatgctcatgcaaaccgatgaatctatctctgtatcatcgatctcggttgcttgctagtccagactccagacatggctatatatatatagctggtgctaataaataggagtataatcgtcatatcgatcggttgcgtgtggaatgccaatcatgtgtgtaatctgttggcaaataacaaacctctgttcctccctgctgctgttgtccgtgcgatcatgattcagaactggcgtgggcgccaataactcagaagagagacttgctgtatatgcatgctagtatgcattgtccctctcttgtcaatgcttgtaatcgaactttattatgaaaaccaaaacgagaatccaaccaaataaacactggttattttgtccaaa

SEQ ID NO: 10622 - DNA, 68 bp, Zea Mays
  misc_feature (1)..(1): n is a, c, g, or t
nacggaaaaaaaaaaaaaaaaaaaaaaaaaaaaaaaaaaaaaaaaaaaaaaaacatcaaacagatgag

SEQ ID NO: 10623 - DNA, 50 bp, Zea Mays
tgtgtgtgtgtgtgtgtgtgtgtgtctctgtgtgtgtgtgtgtgtgtgtg

SEQ ID NO: 10624 - DNA, 62 bp, Zea Mays
tgagaactcgcttcgattgcacgaggaagatcgctagcttgtgagttgtgacttgtgattcg

SEQ ID NO: 10625 - DNA, 674 bp, Zea Mays
ggatgcccggccagccacgccctgcccacctcgacggctcctctcccggggacttcggcttcgatccgctgggcctcgcgaccgtgccggagaacttcgacccgctcggcttctccaaggaccccgccaagttcgaggagtacaagctcaaggagatcaagaacggccgcctcgccatgctggccttcgtcggcttctgcgtccagcagtcggcgtaccccggcaccggcccgctggagaacctcgcctcccacctcgccgacccgtggcacaacaacatcggcgacatcatcatccccagatcaatctccccttgagctcagctcagctgctggttgctgtttcctgtgtacgactaggccctgcctgtacaacgagcgacgacggtgacttcccgcccggaaattaaaccctcgtaatgtaaagcttatgttattaagtagcggctactcttgtagtcttgtctgtatcaaatataaactggtttgttagctgaatcccaaggttatttctgagcctaaccaggggaaatttagctcaaaacggagaaaatacatacgagacctttgataactacaaagtattgtatttcatgagctagacacgatgtttttttttaagattcacgagggagagcctctactgagattttattagaaatgacaaaagaaaat

SEQ ID NO: 10626 - DNA, 843 bp, Zea Mays
ttttacctggaagattgttttttttttgaaacaaggcatttcttcttccattttaaatagcaaagggcaacttgcagcagggcacatacacacacaagcacattcgacccatctacagcctacgcatcaccgcatactggtatcaaggtcctgctaaacatcagatcactccagacagtcagtctatgccttcttgggggacttggcggccttcttgggcgactttgcctccttgctccccacactggacgccttctccgccgtcttcttgggcagcagaacagggttgatattggggagcacaccgccgtgagcgatagtcacgccgcccaacagcttcccaagctcctcgtcgttccggatcgccagaagcacgtggcgcggaataatgcgagtcttcttgttgtccctggcagcattaccggcgagctccagaacctggtcaaacaaggaagcaaaacgaatcgggacgcaagaattaatactccgtcgccaaatcagtacaaacaaagaactgggctcaaattgcagtacctcagcggcgaggtattcgaggacagcggcgaggtagacgggggcgccggtgccgacacgctgcgcgtagcggcccttcttcaagtagcgcccgatgcggccgacggggaactggagcccggccttcacggacctcgacaccgacttcttccttggcccgccgaccttgcgcccggccgctcccttcttccccttaccccctgctccggtgccggtggagtccatggccgtatctcggcttcgattggcttgtcggggacgaggagaaagtgctcaggagttggaacgaatgcggaattgcgagttgat

SEQ ID NO: 10627 - DNA, 274 bp, Zea Mays
atggaggcacgtccaggtcccggcaacacaacgcagcagcgaccccaaaggccaggtagagaaaatactacatggcatacctctgggtccaggtcctcgcggtgttctcgtacttgtgccggtccgtcttgtacatgtgagctatctcggggaccaaagggtcgtcggggttcggatcagtcagcagggaacagatggacagcagcaccttggagatggttagtgccggactccactggtccttcaagatgtcgaggcaaatgctcccgttgct

SEQ ID NO: 10628 - DNA, 1105 bp, Zea Mays
tcagccgtcgatagcgtgattcaaacgcgagaagatgccttcctctgcagccgtacacgcgtccgatcgcccgacaaaaccgacggttcagatacgctcaacatatgcacctgaaggcgtccaaccgacatgcgggcccgttttccagcaagccccaagagtcagtgaaacacaccgtcttctctcgggttggaagcggtgggtgcacctgctgttagcggtataaaaagcggaaaccctagcattcgccgcgagcttatcacttatcatccccatccgcacctctctccatctccctgctcctccgcctccttcttgatccagccaagccagggatcgccatgtcggactcggaggagcaccacttcgaatcgaaggccgacgccggagcgtccaagacctacccgcagcaggctggcaccgtccgtaagaacggcttcatcgtcatcaagaaccgcccctgcaaggttgtggaggtttctacctcaaagactggtaagcatggccatgccaaatgccactttgttgccatagacatattcaacgggaaaaagctcgaagatattgttccttcgtcacacaactgtgatattccgcatgtgaaccgtactgagtaccagctgattgatatatcagaggatggatttgtgagccttcttacttcagatggcaacactaaggatgatcttagactcccaactgatgagactcttgtggcccagatcaaggaagggtttgaaagcggcaaggatcttgttgtgactgtccagtctgctatgggggaggagcagatctgcgcgctgaaggatgttggccccaagtaacttccctgccttggaatactgtatctcaaaacctaaatcgaaaaaagaagtgtatcaaggattgctacagagacatccatctggcttgagctggcttttgctatggcaaacacaagtgcagggatcgctgggtgttgcaccgtgtctgcattatgtggttacattctggaccctgtattttctatgcttttatgcccctactgtttagtattaattatcaataaatttgtttgggacggttgaattgcatgcattgcatgaggtttcttgttcaaaaaaaa

SEQ ID NO: 10629 - DNA, 1640 bp, Zea Mays
cgaaacaacagttggacgacaacaaatgcgtactcgccaccggggagaacgccgtgagggcgcccgcagaggcgaagctgaaggtggcgatcaacggcttcggccgcatcggccggaacttcctccggtgctggcacggccgcgaggactcgccgatcgacgtcgtcgtcgtgaacgacagcggaggcgtcaggaacgcgtcccacctcctcaagtacgactcgatgctcggcaccttcaaggccgacgtcaagatcgtggacgacacgaccatcagcgtcgacggcaagcccatcacggtcgtctccagcagggacccgctcaagctcccatggggtgagctcggcattgacatcgtcatcgagggcaccggagtcttcgtcgacggccccggcgccggcaagcacatccaggccggcgcgaagaaggtgatcatcacggctcccgccaagggcgccgacatcccgacctatgtcgtcggcgtcaacgagggcgactacgaccacagcgtcgccgacatcatcagcaacgcgtcctgcacgaccaactgcctcgcgccattcgtcaagatcttggacgaggagttcggaatcgtgaaggggaccatgacgacgacgcactcgtacaccggcgaccagaggctgctggacgcgtcccaccgcgacctccggcgggcccgcgcggcggcgctgaacatcgtgccgacgagcacgggcgccgccaaggccgtggcgctggtgctgccgcagctcaaggggaagctgaacggcatcgcgctgcgggtgccgaccccgaacgtgtccgtggtggacctggtgatcaacaccgtgaagactggcatcacggccgacgacgtgaacgcggcgttccgcaaggccgccgccggcccgctgcagggcatcctggaggtctgcgacgtgccgctcgtgtccgtcgacttcaggtgctccgacgtgtcctgcaccatcgacgcgtcgctcagcatggtcatgggcgacgacatggtcaaggtcgtcgcctggtacgacaacgagtgggggtacagccaacgcgtggttgatctggcgcacctggtggcggccaagtggcccggcgcggcggcggccggcagcggcgaccctctggaggacttctgcaaggacaaccccgagaccgacgagtgcaaggtgtacgaagcatgaggccagggttctttccacgacgaaacgtacagcacgggcgcgagggttctttccatagagaataatatacagattattcgacgaaagagacgtatgttatatatatatatgagttgtatgcagtcaccgaactggcggtacaggcttccgctttccatttcctgttgggagtcgtgtagtgtaatcctggggtgtgtatttgtttcatcaaccatgcctgccgatttgaatctcgtttcaccagcatggcagcattatctgatttgggtatacaagtataaaccgcaacgagcgatcttgtaaaaagagaaacggagttgcagggggttaagggtttctctccaagatagataccttggatagaaaatttcatctcagaagaagacagtgtggctgtaaacgttaaatgacaaaatatgtcatggtttttaaacgaaggaaggctttaggcaagaaggt

SEQ ID NO: 10630 - DNA, 147 bp, Zea Mays
tcgctgtggccagaacgcgaagaagaagtggaagtgactgaagaaaagacatcaccacctttggaatctcaggcagagacttggctctacttcgacatctgcgagtccgagcctgactcacctactaacaaaggcaagccccggtgc

SEQ ID NO: 10631 - DNA, 1528 bp, Zea Mays
cgccagcaccaccaccgtcactcaacacagcacaggcagctcgagagagagagagagagaaagatgtcgtggttcgggcaccaccaccacaaccagccggctcccccggcgtcgggccccaaccaggtgttcaagatcttctgccgcgccaacgagaactactgcctggccgtccgcgacggcgccgtcgtgctggccccggtcaaccccaaggacgaccaccagcactggtacaaggacatgcgcttcagcacccgggtcaaggacgaggaaggcatgccggcgttcgcgctcgtcaacaaggccacggggctcgcaatcaagcactccctcggccagtcccacccggtcaagctcgcgcctttcagcccggaccaggaggacgcgtcggtgctgtggacggagagcaaggacgtgggcaagggcttccgctgcatccgcatggtcaacaacacccgcctcaacttcgacgccttccacggcgacaaggaccacggcggcgtgcacgacggcaccgccgtcgtgctctgggagtggtgcaagggcgagaaccagagctggaagatcctgccgtggggtcccgaggccaactcctccgcggcccacgcgggaggcccgcacgccgtgcgcgtcttctgcaaggccggcggcgaggactacagcctcacggtgcgcaacggcacggcgtgcctggcgcccaccaacccgcgggacgagtaccagcactgggtcaaggacatgcgccacagcacccgggtgcgggacgaggagggctacccggccttcgcgctcgtcaacaaggtcaccggcgaggcgctcaagcactccacggggcagggccaccccgtcaagctcgtgccctacaacccggactaccaggacgagtccgtgctctggaccgagagccgcgacgtcggcaacggcttccgctgcgtccgcatggtcaacaacatctacctcaacttcgacgccttccacggcgacaaggcccacggcggcgtccatgacggtaccgagatcgtgctctggaagtggtgcgagggcgacaaccagcgctggaagatcctcccttggtgaacgaacgaaagaaactactagctggtaccctaataataattctgctggctgcggcgatcccaaaataaaagaggccgggtgcgatgcatctcggacttctcgagtggtgtttgcgtcagacagccagccactgtggggctagtgttccaacatttgtcagcctgcttgcgcgaggaaggggggtcactgactcaagagaagggcctggtcataggctgctgcattatgaatttctgatgatgtcttatgtctgtactctgaatcaactatgtatgagatctcatctcctttctcctactgaatgaatgaatcattattggctttgctttgcttcacctgcttgaaagcaatgcattgtatggattacaaagatatgaccttttcgttgagcgagaaaaataatgttggtgacgagcaaataataaaactatgtataaatggagattcgaac

SEQ ID NO: 10632 - DNA, 65 bp, Zea Mays
tcttgtgcccctaggtattctctacctacccacctgtgtcggtttcaggtacaggtacccttttg

SEQ ID NO: 10633 - DNA, 568 bp, Zea Mays
gcagtcgcgagtaaagaacaacagcaggccaccgctgctataaaaccctccgcctccaccggcggctcgccaaactccgtttcgaattctagggttttgctgctctccgaccccgagctccgaaggccgcagcatcaggcgcggcccccctcgcgtgtgaccgagatggcgctgccgaatcaggggaccgttgattaccccagcttcaagctcgtcatcgtcggcgatggtggaactggtaaaactacatttgtgaagaggcatctcactggagagtttgagaagaaatatgaaccaaccattggtgtggaagttcatccgttggatttcaccactaactgtggtaagatcaggttctactgctgggataccgcagggcaagagaagtttggtggcctcagggatggatactatatccatggccagtgtgcgatcatcatgtttgatgtaacctcaaggcttacttacaagaatgttcctacgtggcatagggacctgtgcagggtctgtgaaaacatccccattgtcctctgcggtaataagtttggtggcctcagggatggatact

SEQ ID NO: 10634 - DNA, 888 bp, Zea Mays
ttgtgattcatcggagcctgattcatgtgattcgggttgcaatggtgggctaatgacgacggcattcagttatctccagaaggccggtggccttgagagtgagaaggattacccttacactgggagtgatggcaaatgcaagtttgacaagtccaagattgttgcttcagttcagaacttcagtgttgtgtctgtggacgaggctcaaatttctgctaacctcatcaaacatgggccattggcaatcggcatcaatgctgcctacatgcagacatacatcggaggcgtgtcatgcccatacatctgtggcaggcaccttgaccatggtgttctccttgttggatatggtgcttctggtttcgcccccattcgcctgaaggacaagccttactggatcatcaagaactcgtggggcgagaactggggggagaacggatactacaagatatgcaggggttccaacgttcgcaacaagtgcggcgtcgattccatggtctctaccgtgtccgcagtccacgcctcgaaggagtagactctggtcagcggtgataatcgtgattccatatattgtagaactataatccctgctagtaatccatttgtgctgtttatgtatcgaaggcagcaaagatgtgtgaagcggcaatgggatgcttgctgtaaggtaatatgtttggcttgctaggcatgctacacgctatttggatgtagcaacgttatcaccagctgtatacgctttttaatcgacaacatttgaataatatgtacataacattatgttgtgctctgttctctgtctgtttgatgtgcttatgggttttgatctgtagcttacataacctgattgtgaaaactcaaacatactgccgagcccgatagatcctacgg

SEQ ID NO: 10635 - DNA, 987 bp, Zea Mays
aagagatgataaacaggtgttcttgttttatacagtgtgtatatatagagagagacaaagagcaagtgaatttgtaggaacaacgcccacggagaacgaacgcaagcctatttcctcatcacaaggaacggaggcatacataggtctcatgtgtgagcactgagcaccgctggttccggatcatcctcatgccttccaccatgggtcctcgccggtcctgaagtcggtctccacccacgggacgaagaggaccttgccgtcgtcgacgtcggcgtgaaccagggccagcgactaggcgccggtccacggaccaccttgccctggttgttgtactgggatccgtggcaggggcagatgaacttgttctcagcgccgttccacggcacgacgcagccgaggtgagtgcacacggcgttgatcccgtaggtggccagcgtcttgtcctgctccaccaccaggtacgtggggtcaccctgcaccccctgcgcgagcgtgcggtcgttgggaccgtgcgtgttgagccacgcctccaccgtgatgtcgttgcccagcttgtccttcgcgtaggtcccgccgccggcgttcccggagctgcgtggacgaagaaggcgccgtaggggacgaccatgccgacggtgggcaacgagatggcgccgaggaggaggaggttcatcagcttccgcttctccatgtcggggacgcggtcggcggagatgctgctcgccgcctggcacacaatgctccgctgggcgcgctcgcggcccatgctcaggccaagccccttcaccggcttgcccagcgaagcaggaagttgctggctcacctgggtgggattggcggcggtggagagcgccgcggaggtcgccatggctgcagcaggcgaggatcggtaggggtcaggagtcgggacaatacggctggtgttcactcactcgcgtccacaggcttgcggatgagcccccggtgccgagcctaactttatctttg

SEQ ID NO: 10636 - DNA, 732 bp, Zea Mays
gcgaccctcccacaggaaaccagtgccctaacggcgccgagggcaggttcgtcaggcgtccaaaaccctagttcccaagtcctatataatcagagagctaggtgaaatcctacggatcggttccaacaccagccgccgtcatgtcgaagcgaggtaggggaggttcggctgggaacaagttccgcatgtcactgggtctaccggtggcggccacggtgaactgcgcggacaacacgggcgcgaagaacctctacatcatctccgtcaagggaatcaagggccgcctcaaccgcctcccgtccgcctgcgtcggcgacatggtcatggccaccgtcaagaagggaaagcccgacctcaggaagaaagtgatgcctgccgtcatcgtccgccagcgcaagccgtggcgtcgcaaggacggtgtctacatgtacttcgaagataatgctggagtgattgtgaatcccaagggtgagatgaaaggttctgcaatcactggacctatcggcaaggagtgtgctgacctttggcctaggatcgctagtgcagcaaatgccatcgtttgagagcttgttggaatgtgtttagacttgagtatgatcatctcaattgtgtgttgcagctgttgtaagggtgctattggacttgatggctccttttatgtttggtcactcaattttgtagtgaacagaaatttgtctaccctggttgcctcaagtttgctgtcaaagaaat

SEQ ID NO: 10637 - DNA, 495 bp, Zea Mays
atataatcgtcaccgcccaccagtggtgtccattcacgcacctagggttttcgcgccgccgccgccgccgccgccgcagccgcaacaatgccgtcgcacaagaccttccggatcaagaagaagctggcgaagaagatgcgccagaaccgccccatcccctactggatccgcatgcgcactgacaataccatcaggtacaacgccaagcgcaggcactggcgccgcaccaagctcggcttctgagcgtcgggattggccggctgctgcgtcggaaggctagggtctaagagctatcttccttctgttttatcaatgtgtcagtttttctgtaagctagcaagtgttgctatgacgcttttattaagattctggtgagcggtgatgttaagagaaaattggcactactgtggtgtaccccaagattccttgcagcattgctatgctaagtaaagaaccctttatcttattatatatgtagtgttgcattgattgagg

SEQ ID NO: 10638 - DNA, 61 bp, Zea Mays
ttttaacagatgtgcgccccccagccaaactccccacctgacaatgtcttccgcccggaat

SEQ ID NO: 10639 - DNA, 908 bp, Zea Mays
ccagcaaactgcaaaccaaccctaaagccaccgatccgacggcggggatcgaccgatcaaaccacaaaaccctacccctggccgccccttttttatataaaaggatcgccctccgcgcgccgccgctccttcgcaaaccctcctaccccattccgccgcccgccccgcgaccccgaggaggaggcaagatgaagacgatcctggcgtcggagacgatggacatcccggagggcgtcacagtgacggtggcggccaagctggtgacggtggagggcccccgcgggaagctcacccggaacttcaagcacctcaacctcgacttccagctgcaggagggcggccgcaagctcaaggtggacgcatggttcggcacccgccgcaccatggccgccatccgcaccgccatctcccacgtccagaacctcatcaagggggtcaccaagggctaccgctacaagatgaggtttgtctacgcccatttccccatcaacgcgtccatcaccaactccaacaccgccatcgagataaggaacttcctcggcgagaagaaggtcagaaaggtggacatgcttgacggcgtgaccatcctccgctccgagaaggtcaaggacgagcttattctcgatggcaacgacgtcgagttagtctctcgctccgccgccctcatcaaccagaaatgccatgtcaagaagaaggatatcaggaagtttttggatggtatctatgtgagcgacaagggtgtgatcgaagaggagcagtgagggacaattagttgttatcgtttgagttggaattattgtttggtttgcaattttctcaaggtgaactttgtaatcggttaggatgtgttgtggaccattatcttatcctacaatattatcgtatctcaaaaaaaaaaaaaaaataac

SEQ ID NO: 10640 - DNA, 70 bp, Zea Mays
ccgtcaacgagtcgggttgtttgggaatgcagccccaaatcgggcggtaaactccgtccaaggctaaata

SEQ ID NO: 10641 - DNA, 65 bp, Zea Mays
ggtgaaattgggatgcgaagagcatagaagagaacattaaatggataaaatcctttattccaagt

SEQ ID NO: 10642 - DNA, 75 bp, Zea Mays
tttttcggttctatttttgtgttcattttttgcattaggcagattaaaggatatctaagtaagatagacgagagc

SEQ ID NO: 10643 - DNA, 985 bp, Zea Mays
aggccacacagaggggcaaccaaagtcgttgccgcagaaaaaaataataatcacaagcgttctaccggtggaggacaaccattaatcagcaggctttggggccaaaagaaacggagaggagaaaagcgggggcggcaagcaaccacgggcggagctcggagcgtcctcctcctcccgtctataaattcccctccttttcttcctccatatataggggccatcagatccaagaagagggaagagcaccaaggaccttcggcgcccgttcaggatccacatcttcccgagcgagttcttggttgacctcttcctcttcggaccacctccaaggctcttggtgtagcttgccactctcaccaatcaagttttcatgtctgatctcgacattcagatcccaactgccttcgatcccttcgctgaggccaatgctggggactctggtgcggcagcagggtcaaaggactacgtacacgtgcgcatccagcagcgtaatggtcgcaagagcctgaccaccgtccagggattgaagaaggagttcagctacagcaagatcctcaaagatctcaagaaagagttctgctgcaatggtacagtggtccaggacccagaacttggacaggtcattcagctccagggtgatcagaggaagaacgtctcgaatttcctcgtccaggccggcattgtgaagaaggagcacatcaagattcatggtttctgagcaaccgccgggtccatagcaaaccaaccctgcatgcagggccagcttattatatataatatctgaggtggagcatatctatctggctgtgtactgcaagcaggcctagtacgccgcctgcgcgttcctcctattacacatataggcccctccctgcgtgtatgcttgttaccgtcgtgtcgaaccttgtactacgaggctccatcgaacatcgatggcttgcttctttatcagaacatgtttgaataaacgctatttggtaaaaac

SEQ ID NO: 10644 - DNA, 1441 bp, Zea Mays
tatgcctctcgtgccgcgtctctctctccacccgtgctgctacgggggcggcctgtccgagttctccgggctcaggagctccgcgtcgctgcccatgcgccggaatgccacctccgacgacttcatgtccgccgtctccttcaggacccacgcggtcggcacgagcggcgggtcgcggcgggcgccgacggaggcgaagctgaaggtggccatcaacgggttcggccgcatcgggcgcaacttcctgcggtgctggcacgggcgcggcgacgcctcgcccctcgacgtcatcgccatcaacgacaccggcggtgtcaagcaggcgtcccacctgctcaagtacgactccacgctcggcatcttcgacgccgacgtcaagcccgtcggcgacaacgccatctccgtcgacggcaaggtcatcaaggtcgtgtccgaccgcaaccccagcaacctgccgtggggcgagctcggcatcgacctcgtcatcgagggcaccggcgtcttcgtcgaccgcgagggcgcggggaagcacatccaggcgggggccaagaaggtgctcatcacggcgcccggcaagggcgacatccccacctacgtcgtcggcgtcaatgccgaccagtacaaccccgacgagcccatcatcagcaacgcctcctgcaccaccaactgcctcgcgccattcgtcaaggtgctcgaccaaaagttcggcatcatcaagggcaccatgaccaccacccactcctacaccggcgaccagaggctgctggacgcgagccaccgcgacctgcgccgcgcccgcgccgccgcgctcaacatcgtgcccacgtccaccggcgccgccaaggccgtctcgctggtgctccccaacctcaagggcaagctcaacgggatcgcgctccgggtgcccaccccgaacgtctccgtcgtcgacctcgtcgtgcaggtctccaagaagaccctcgccgaggaggtgaaccaggcgttccgcgacgccgcggccaacgagctcacgggcatcctcgaggtctgcgacgtgccgctcgtgtccgtcgacttcaggtgctccgacgtctcctccaccatcgacgcctccctcaccatggtcatgggcgacgacatggtcaaggtcatctcctggtacgacaacgagtggggctactcgcagagggtcgtcgacctcgctgacatctgcgccaaccagtggaagtgaagcgttgcattgtaatagcactttgtaactcctcaccctccacagggctttgggattcaccccgaaatgactcactttcggtgaaattcacccgtttcggcgaggtcgtccgaatataccggccaaatgtttccattggatttcaattattagtcaactctagagttgaaacaaacatacaagttcttcattcaataatcaatatagaagtgcatatctgtttcctcttca

SEQ ID NO: 10645 - DNA, 1347 bp, Zea Mays
aggagacgctgaaagggaagtggaaagtcttgagggaatgaaaaggaaagaaagcaaagaggggaaaaaaggcgagcaaaaggaggcggaaacatgctttcagccgtccgtggcgtgattcaaacgcgagaagatgccctgcccctgcagccgtacacggtccgatcacctgaccgaactgacggctcagatttgctcaacatctgcactataagtcgttccaccgacatgcgggcccgttatacatagaaccccacagtcagtgagacacatggtcttctctctggtggaagcggtgggtgcacatgctgctagcagtataaatatgctgaaagcctgaaaccctaggcgaagcttatcgcttatcatccgcgcctctacatttcttctctctctgctcctccgcctccgcctgatccatccaagacagggatcgccatgtcggactcggaggagcaccacttcgaatcgaaggccgacgctggggcgtccaagacctacccgcagcaggctggcaccgtccgtaagaacggcttcatcgtcatcaagaaccgtccctgcaaggttgtggaggtttctacctccaagactggtaagcatggccacgccaaatgccactttgtcgccatagacatattcaatgggaaaaagcttgaagatattgttccttcatcacacaactgtgacattccgcatgtgaaccgtactgagtatcagctgattgatatttctgaggatggatttgtgagccttcttacttcagatggcaacactaaggatgatcttagactcccaactgatgagactcttgtggcccagattaaggaagggttcgaaagcgggaaggatcttgttgtgactgtccagtctgcgatgggggaggagcagatctgcgcgctgaaggatgttggccccaagtaacttccttggctttggagacggaaccctactctatctcaacttaaatcggaaaagaagtgtatcaccaaaggattgctaccgagacattcacctggcttgagctggcttttgctatagcgtgcaaggggttgctgggtgtcgtacctacctgacttatcattatctgtggttacattctggaccctgtattttctatgctttcatgtctctctactttctagtattaattatcaataagttggtttggaatggttgaattgcatccaatgcatgaagtttctttgaaaaaaagaaaaaaattatgttagccacacacatacacaaatggtggccagtaatatgttcaaatcttcttgccttccatatcacttcgtcgtatttgtcttgatatcacttccgtcatattaacgatatcaaacaagtgaa

SEQ ID NO: 10646 - DNA, 962 bp, Zea Mays
aattcaaaaccctagcagcaccacccgtcttcctcttcacccacattataaagatcctccacttcgcactttcgccgccgcctctctccttcccgagcaggaggcggacaaggtaagcagcaatcgcaggaaccctagcgccgccgcacccgcaggaatgggtatcgacctcgtcgccggtgggaggaataagaagaccaagcgcactgcgcccaagtctgacgatgtctacctcaagctcctcgtcaagctctaccgtttcttggtcaggaggaccaagagcaatttcaacgctgtcattctcaagaggcttttcatgagtaaaaccaaccgaccaccaatctccatgcgccgccttgtcaagtttatggaaggaaaggagaagaacattgctgtcattgttggcacagtcacagatgacaaaaggatccaggaggttccagcaatgaaggttactgccctgaggttcacggagacagcaagggccaggattgtcaatgctggtggcgagtgcctcacatttgaccagcttgctcttcgtgctccacttggcgagaacacggtcctcttgaggggccccaagaatgcccgtgaggcagtgaggcactttggcaaggctcctggagtgccgcacagccacaccaagccgtatgtgcgctccaagggaaggaagttcgagaaggctcgtggcaggaggaacagccgtggattcaaggtttaaaacaaattgtggccctccgtgttgccatcagcatagtgcaaccgttgtgtttgatcagtcgacagtaattagtcatcactctgtaccgagattagtagcacaatttgttgtcctggtttgaattttggaagatatttgatgtcgtctccttattatctactcgttactggttgagcacgaagattgttttgtgatactcctacatgatttaagacggttcccgacgttccatgaaaaaaaa

SEQ ID NO: 10647 - DNA, 550 bp, Zea Mays
caggtaatttagcacatgccctatctcccttacataatcctgccccctcgccagtcgcgaaaaccctagccgccgccagaccattcgtttctcgcgagccatcgcttcggcatccggaagaaatggccaagtcgaagaaccacacggcgcacaaccagtcgttcaaggcgcacaagaacggcattaagaaacccaagcgccaccgccagacctccaccaaggggatggaccccaagttcctgaggaacctgaggtattctaggaagggcaacaaaaagagtggtgaggctgaagctgaggagtaggaaggaaagcatggctttgtttcctctgtttttagctcagttccacctttaggacctggggttttgctaaagatggaacttaagttggtgttactgtatgatggcaaggaccttttgctgccgaaggttatgttttgaagttcatgctaccttttaaattacggattaccttgtgctatgttcattatttttgcctttggcagcgaaatttggatttctagactgcgtctgtttttagacaaaaa

SEQ ID NO: 10648 - DNA, 55 bp, Zea Mays
actaaattatatatatgttgctaagttacaatacatacaaaataagtttaccccg

SEQ ID NO: 10649 - DNA, 87 bp, Zea Mays
gacgcatcattcaaatttctgccctatcaactttctttgttggtataggggcctaccatggtggtgacgggtgacggagaattaggg

SEQ ID NO: 10650 - DNA, 725 bp, Zea Mays
gtggtcgacgccccggtacgaagtgggtggggaggcgcagagacaggcgtcttcgtactcgcctatctccgcgactcaaagcttcttccatttcctaccgccgccgctgcagctccaccccattccgtcgacaccatgagggagtgcatctcgatccacatcggccaagccggtatccaggtcggaaacgcgtgctgggagctctactgcctcgagcatggcattcaggctgacggtcagatgcccggtgacaagaccattgggggaggtgatgctgagttcgatgagggcgaggatggcgacgagggtgacgagtactagagaagtttgctgatgacgcagcatcaggccagtgtgctgcccttatcccgtgatctgccgagagttgctcctgctatcgtgttatgtgtgtctgttctgaagtattgtgtggtttacaacacctgatgttgtaagagttgttaattcccctgcattgctaccgggttattgagaataattatggctgtttacgttgttgcttcatctcggagatgctttacatttaccaccttgttcatcttttgtcatcagtaaaatcgagtcggcggatgattttcttgcgtcttgtcatgagtattgagtagtatggattgtttgatgctttatatcacattgcagaagatagtacgatctctagctatatatatgttcacacaggaaagaaaacactgcagaaaataaat

SEQ ID NO: 10651 - DNA, 548 bp, Zea Mays
aatccgaacggcctagcccactccaacgcgcactcttctaggcccatctcacggtctcacctcctatgttccttagcgatcgcaacaaaaccgcacgccctctctctagcccgcgcagtcttcagcacgcacaccaatcgcccacaagcgctcgcaggagaggtcgaaaccctagcttttgcggcggcggcgagagaagatgatctacgacgtgaactcccccctcttccgttccttcctcagccagaagggcggcgccgacaagaggaaaatggaggagcataaaccaaaggagcagaggcccaaggctaacgagaacaagcctgtgatgaacgaatgaatatctccagaagctttgttcaatgtgcaaccaagtccgatgtccgtttgctctggtcagcttaaaaccaacgcttccaataatcctatattggtgacttagtttccccttatagtgttatttgctcggcttgaacatggcaacggaaatgaaacttgaactacctatggtactgtcatcaatttgagactcccatggttgacaaaaa

SEQ ID NO: 10652 - DNA, 795 bp, Zea Mays
agggtttcactcttccgtatataatcctgcccacaacgccgtctcctaaaccttagccgcgcggacgcccaccagcagctgcccccttgctgtcgccgcctctccgcgcgaccgatctaccgccgccgccaccatgtcgctgatcgccggcgaggacttccaacatattctgcgtctgctgaacaccaacgtggatgggaagcagaagatcatgttcgccatgacctccataaagggtgttgggcgccgcttctccaacatcgtctgcaagaaggccgacatcgacatgaacaagagggccggtgagctgacgcctgaagagctggagcgcctgatgacggtcgtggcgaaccctaggcagttcaaggtgccggactggttcctcaacaggaagaaggattacaaggacggaaggttctcacaggtcgtctccaacgccctcgacatgaagctcagggacgacctcgagaggctcaagaagatcaggaaccaccgtggtctgcgtcactactggggcctccgtgtccgtggccagcacaccaagaccactggcaggcgcggaaaaactgttggtgtctccaagaagcgataagctacatatctatcgacaaatctcagatgtactagtgttggttcatgttcaaactgtcttgatgaagggtttctgttgggacagtttcctgaaattatgttttgccctaggataatcttgcagttatggaaccttattatattgtatcctgcaatttgtttttttgcaacttataagagtaattttatttgatgagtctaaat

SEQ ID NO: 10653 - DNA, 56 bp, Zea Mays
gtcaactgcttctactcatctgtgggttcttcagaatcctctgaaggtgcgtccga

SEQ ID NO: 10654 - DNA, 636 bp, Zea Mays
gcagcgagccaggcgaaaccctaccgattgggtccaacaccagccgccgccatgtcgaagcgaggcaggggaggttcggcggggaacaagttccgcatgtcgctgggtctgccagtggccgcgacggtgaactgcgcggacaacaccggcgccaagaacctctacatcatctccgtcaagggcatcaagggccgcctcaatcgcctcccgtccgcctgcgttggcgacatggtcatggccaccgtcaagaaggggaagcccgacctcaggaagaaggtgatgcccgccgtcatcgtccgccagcgcaagccgtggcgccgcaaggacggggtctacatgtacttcgaagataatgctggagtgattgtgaatcccaagggtgagatgaaaggttccgctatcactggacctatcggcaaggagtgtgctgatctttggcctaggattgctagcgcagcaaacgccattgtttgagagcttgttggaatatgttcagacttctatatgatcatcttattatcagttgctagactgcaattgggcttatgtttgttcactcaattttgtagtaaacagaatttggtataccaaggggatctatataacaatgtatgccataaattttctgactaaaac

SEQ ID NO: 10655 - DNA, 343 bp, Zea Mays
atgtcaatattatccgtgcatcacccactcaaaagtcaggacaaatctccacagcaagcaatcactttgtcatgctctcgagagagttctttgaaaataactgggaagaactctttactcctcgacgacaacgctgatctggcccttgtcaagcatgtcatagaaggacctagtcttcctctgctcgttccagtggtgcatcttccacatgcctcccgcgatcagacccagggtcagtccaatgaagatctccttcaccacactcgggcccttgagggtggcatgcgcaaccctgccgcctgccatttgctttcttgcttgttgaggtcagacgccaagcgcg

SEQ ID NO: 10656 - DNA, 882 bp, Zea Mays
ctctccggggctagggttttaacgaagcatataagagctcccacccgtgcagacaaccacacctcctcgaaaccctagcgccggcgcctccacttcgttttcctcactctctcctccagctcagggtccggcggcgaagggaaggcaagatgtacaccgcgaggaagaagatccagaaggagaagggccttgagccctccgagttcgaggactccgttgcccaggctttctttgatctggagaacgggaaccaggagctcaagagcgacctcaaggacctgtacatcaacaatgctatccagatggatgttaccgggagcaggaaggctgttgtcatccacgtcccataccgcctgcgcaaggccttcaggaagatccatgtcagactcgtcagggagctggagaagaaattcagcggcaaggatgtggtaattgttgctacaaggaggattgtgaggccacccaagaagggttcagctgttctgcgccctcgcaccaggactctgactgctgttcacgatggcatcttggaggatgttgtctacccagctgagattgtggggaagcgtgtcagataccgtctggatggttccaagattatcaagattttcttggacccaaaggagaggaacaacactgaatacaagctggagacctgcactgcggtctaccgcaggctgtgtgggaaagatgtggtctttgagtaccctatgaccgaaaatgcataaatatgatgccctctggatatctccactctatttcgttgattctgaatgttatgttgggtctccctatgtacttcaaaaacatagttttgatgctaaagttgcctagcaatttgtatgtttcaataaaatctcttaagaagagtcgatgtccctc

SEQ ID NO: 10657 - DNA, 673 bp, Zea Mays
caagttgaggaggctgtccgcagtgtccagatggagggtctgacttggggagcatcaaagcttgtgcctgttggatacggcatcaagaagatgactatcatgttgacaattgtcgacgatcttgtgtccatcgacactctaattgaggaccaccttacgcaagagcccatcaatgagtacgtccagagttgcgacattgtggctttcaacaagatctagagttcagtttctgagtttgggcaacggcagcggctcagctcgtcaagtttgtgctgggatgccagtttatcccttctagtctattacagaaatgttgttcggagctgagtctattataaacatcttggtctgagtttattgttgagtggtgccagtttttttcaatatacatttatcttaaaaacagcggtactgatgtttttttgtctaaagttaatgagtttgcaatggttctgagtctaaagttcgagtcttcaaatctataccagagtgttaaatgacgttgtgggttttcaaatctatactcggtgtagtaataacgatgaatcaaacaatgacctgacgtgtaaatcgcgtttatgctcaaaccggccaaattctggggtcaaggtttttttagagcaagaggccgatgttctaatctaatgtattgaagttgccagattttctgagc

SEQ ID NO: 10658 - DNA, 1881 bp, Zea Mays
tcccctcgctttcgcttcgccggcactccatccgtccatcgtggcccaggctgtcgttccgttctataaagggcgtcgagaggaaaccggtggaaccctacactgagaaccgcagagacaggcgtcttcgtactcgcctatctccgcgactcaaagctttccccaattcccccccttctcccatttctcaccaccgccgccgctccccccgttcaacaacaccatgagggagtgcatctcgatccacatcggccaggctggtatccaggtcggaaacgcgtgctgggagctgtactgcctcgagcatggcattcaggctgatggccagatgcccggtgacaagaccattgggggaggtgatgatgctttcaacaccttcttcagtgagactggcgctgggaagcacgtcccccgtgctgtttttgttgaccttgagcccactgtcatcgatgaggtgaggactggcacctaccgccagctcttccatcctgagcagctcatcagtggcaaggaggatgcagccaacaacttcgctcgtggtcactacaccagtaagtaatctgatcggatcttaagttggcattgatcccagatattcaatctgtaatgaaaaccatacttaaacttgatttgcttgtcttgcagttggcaaggagattgttgacctgtgccttgaccgcatcaggaagcttgcagataattgcactggtctccagggcttcctcgtcttcaacgctgttggtggaggaacgggctctgggcttggttctctcctcctggagcgcctgtctgttgactatggcaagaagtccaagctcggtttcaccgtgtacccatccccccaggtgtccacatccgtggttgagccatacaacagtgtcctgtccacccactctctcctcgagcacactgatgttgctgtcctgctcgacaatgaggccatctatgacatctgccgccgctcccttgacattgagcgcccaacctacaccaacctcaacaggcttgtctcccaggtcatctcatccctgacggcttccctgaggttcgatggtgctctgaacgttgatgtgaacgagttccagaccaacctggtgccctacccgaggatccacttcatgctttcgtcctacgctccagtcatttctgctgagaaggcctaccacgagcagctgtccgtggctgaaatcaccaacagcgccttcgagccatcctccatgatggttcccaaggacgtgaacgctgctgtggccacaatcaagaccaagcgcaccatccagttcgtggactggtgcccgactggcttcaagtgcggaatcaactaccagcctcccagcgtcgtcccaggcggtgatctggccaaggtgcagcgtgccgtgtgtatgatctccaactccaccagtgttgtggaggtcttctcccgcattgaccacaagttcgacctcatgtacgccaagcgcgccttcgtgcactggtacgtcggtgagggtatggaggagggcgagttctccgaggctcgtgaggatctggcggcgcttgagaaggactacgaggaggtcggtgctgagtttgacgagggtgaggacggcgacgagggtgacgagtactagacgctctactggcgcggcgtcgtcgggcttgtgtgccactgctatcctgtgatctgccctgagtggctcctatcgtgttatgtttctgtcggttcttatctatctgtcgttgtgtggtttacaacttacgttgtaagactttattcccccgctttgctactgggttattaagtttggcgttattgttttcttgatctctgagatgctttgctttcaccacctgttttttttttaaatataacaaagatggcagatgccatgccataaatca

SEQ ID NO: 10659 - DNA, 968 bp, Zea Mays
tttttttgccacgctgccactcgggcacgagcacgagactgctcggccgacgaaataataaagcgcgcgcgcgcacgcggagaggctcggagagctgagtgagatggcacaagccatggcgtccatgaccggcctctcgcagggcgttctgcccagcaggcgcgccgccaacagggccaggacggccgccgtcgtcagggcgtccgccgaggcgcaggcgcaggcgcaggcgggccgccgcgccgtgctcgggctggtggccactggcatcgtcggcggcgccttgtcgcaggcggtgcacgccgagaccgtcaagaccatcaagatcggagccccgccgccgccctccggtggactccccgggactctgaactctgaccaggcgagggacttcgacctccccttgaaggagcggttctacctgcagccgctgccgccggcggaggcggtggcgagggtgaagacgtcggcgcaggacatcatcaacctcaagccactcatcgacaagaaggcgtggccgtacgtccagaacgacctccgcctccgggcctcctacctgcgctacgacctcaagaccgtcatcgcttccaagcccaaggaggagaagcagagcctcaaggagctcaccggcaagctcttcagcaccatcgacgatcttgaccatgccgcaaagatcaagagcaccccggaggccgagaaatacttcgcagcaaccaaagatgcgctcggcgacgtcctcgccaagctagcctagatggaagctaatagatgggttaacgatggccacgtaatttcggacttgtgtttgttcatatggagccggcaaatgtaccgtttcctgttcatattatatcccaagttcttgacaagtacctttgcgggcggatggaacatcagaaacattttccagcagccttaacaagtgatccacgtaatatatcggaaggcgtcaaattggaaaaaaacga

SEQ ID NO: 10660 - DNA, 659 bp, Zea Mays
aataattgctctaattgtttgcattccacctgcattgatctttgaagggccccagctaatgcagcatggatttagtgatgccattgcaaaagtaggtttgacaaagtttgtcagtgacctattcttggttggactgttctaccatctgtataatcagattgctacaaacaccttggagcgagtggctcctctgacacatgctgtcgggaatgtgttgaaacgtgtttttgccatcggtttctcaatcattgtttttggcaacaaaattagcacacaaactggaattggcacgtccattgccatagctggtgttgctatgtactcttacattaaggctaagattgaagaggagaaaaggaaaaagagcgcatgactgctgtgaataatattatcgggaccttcctcggacacaacatcgtcgacaatcacgacctacttctataccttgttttgttttcatcttgagtcagtcggtccattgtttgttcccagtctggtgattaaaagtctgcaaattctgtttgtggaattggcagcgatacaaatttggcttctttaagtaaatccggttgccggtacacagcggtattaattcacctgtaactgaatgtaataccgtaatgcaaagggcacaacactctgcctgactaaaataaaat

SEQ ID NO: 10661 - DNA, 75 bp, Zea Mays
atgctgcaagctgcatcatgaccacaaactgcttgtgcatttcaacgaagaatacaaacaattgaccaattacat

SEQ ID NO: 10662 - DNA, 1396 bp, Zea Mays
agcaacaccgaggcgtatcccactactccgacgtacatgttcaagtacgacaccgtgcacggccaatggaagcacagcgacatcgccctcaaggactccaagacgcttctcttcggcgagaagccggtcaccgtctttggcatcaggaaccccgaggagatcccgtggggtgaggctggtgctgagtatgtcgtggagtccaccggtgtcttcactgacaaggacaaggctgctgcacatctgaagggtggtgccaagaaggttgttatctctgccccaagcaaagatgcgcccatgtttgttgttggtgtcaatgaggacaagtacacctccgatgttaacattgtttccaatgctagctgcaccacaaactgccttgctccccttgctaaggtcattcatgacaactttggcattattgagggcttgatgacaactgttcatgccatcactgccacccagaagactgttgatggaccctcagccaaggactggagaggtggcagggctgccagctttaacatcattcccagcagcaccggtgctgccaaggctgtcggtaaggttcttcctgaattgaatggcaagctcactggcatgtccttccgggttcccaccgtggatgtgtcagttgttgacctcactgtcagaatcgagaagggggcctcttacgaggaaatcaagaaagctattaaggctgcttctgagggcccactcaagggtattatgggctacgtggaggaggatctggtttccaccgacttcaccggtgacagcaggtcgagcatcttcgacgccaaggccgggattgccctgaacgaccacttcatcaagctcgtctcttggtacgacaacgagtggggctacagcaaccgcgtcgtcgacctgatccgccacatgttcaagacccagtagagagagatatttctgcctccctatcgtgggtcgtccccaatggcctttggtcgcagaccatctttgctgcttgtctatgctgagaataaatgtgaacggtgcccctggacgctggatccatgctggttttggacacgttgtctttttgtgtttaacttatctgctaccgtcctgtaacgaattcactaagttctagttcttttgtgctttgttaagaatataaacaatgaggtttcaattttggtggcgccatccggtctgattgcgtactagtatcatgcatatctgagctggtctttccggagtaacagtttttttttgtttcgtgtcaatgattctcagcctgttcatttggtcttaatccatatcggttactactataatgttgtcttgtctctatagattgcagcagtctaacacatgttcttggtatccttttgggtgtgtttaatgctatttgctctgtgttgtctttttcgtt

SEQ ID NO: 10663 - DNA, 98 bp, Zea Mays
ttcattttccggcgcttcctcttgagccttcgcatcctcttcttcttccacttggctcgcatcgcgttggagcaggtggagcgcgcgctcgagctacc

SEQ ID NO: 10664 - DNA, 1374 bp, Zea Mays
ggggcttctcattggccacacacgtatcagacagcatcccgtccgtccgatccgtccgcacggcgtatctccgccgtcggccgcagccggcgtctcctggccacacccgccgccccggcccggcaggcggcagtttaatacaaaccaggcttgctcgtggcggcaaaaaaccaacgtgcttgatctccctccgccactccatccatctcctcgctcccagtccccgggaagcatggcgtccgtcaccgcccgcgccccggtagcggcccttcgcccgtcgtcggcatcgctcaagtcgtcgtcggccttccctccccctcctacctcgacggcagcctggcgggtgacaatggcttcgacccgttgggcctggcggaggaccccgagaacctgcggtggttcgtgcaggcggagctggtgaacggccggtgggccatgcttggcgtggccgggatgctcatcccggaggtgctgaccaaagccgggctgatcaacgcgccgcagtggacatcaagaaccccggcagcgtcaaccaggaccccatcttcaagagctacagcctgccgccgcacgagtgcggctacccgggcagcgtcttcaacccgctcaacttcgcgcccacgctcgaggccaaggagaaggagctcgccaacgggaggctggcgatgctggcgttcctgggcttcctgatccagcacaacgtcaccggcaaggggcccttcgacaacctgctgcagcacctgtctgacccatggcacaacaccatcatccagaccttctccggttgagtcgaggtcgaggagggatacgatccatcgctggtgagctgatatggactggaaggcaaacattgaaaccttaagttcctttctggatcagtttgtgtgtgttgttaatctatctggagggtacagattcgggccgtgttgcaatgcatgcatggtctgaagggagcgagggctgaggagtgactggtatgtacattagctgaaggggatattaagggtagagatcgtttgatcagtatcatctgtatatccccatgcatggggtttcgttttgtgcgcttacttctggcttgccagcgtatggttcaatgtggaaacacatgtattagtacgagaactagtagacttataattaatataaatcaagcacgtacgacttctagctaaaaacaactcaacctactcggaagccctgagaatggtaagcaaccacattagggcttgttcggttattcctatcccatgtggattggatgggattgaaaaaaattgtgaaagattttgacttgtttggaattgaaacccatccaatcccacccaatccacatggattgagagcaaaacgaacaagcccttattcggaagc

SEQ ID NO: 10665 - DNA, 67 bp, Zea Mays
aaaagaataaaataaaatttttaaaaaaaaaaaaaaaaaaaaaaaaaaaaaaaaatataataaatta

SEQ ID NO: 10666 - DNA, 57 bp, Zea Mays
cttttcttttaacagagaacttataaattgtgccaaaaattgtagaaaaatccaaaa

SEQ ID NO: 10667 - DNA, 64 bp, Zea Mays
aattaagatttgaaaaaaaaaaaaaaaaaaaaaaaaaaaaaaaaaaaaaggattaaaaaaaaaa

SEQ ID NO: 10668 - DNA, 610 bp, Zea Mays
ctggcgtcggtccgccgcccgcactaccacgcccccgctcctctcgtctctatcttcgcctcttccatcgcaggattcagcggccatgggcggcggcaacgcccagaagtccaagatggcgcgcgagaggaacgccgagaagaacaagggcggcaaaggcagccagctggaggccaacaagaaggccatgaacatccagtgcaagatctgcatgcagaccttcatctgcaccacctccgaggccaagtgcaaagaacatgcggaggcgaggcatcccaagaacgacctctaccagtgcttcccccacctcaagaactagtaagcagcagaagcatatgctctgctcagctaaaagacaagtactacatatatatatatacgctgtgtgtcaattaatgggttctaggctgctgctgatgcggctgcttcgttcgtgttgccccgtctgattatgtactgtaacccttggctgtcagcctgctgtgctaaaaaccattggttctgtgtggattcatgctgcctgcctgtgctgtgcttgctcaatattttcttctcttttccttgtgttcttcggtgagaatttgggacattgcaaggatgccatttatct

SEQ ID NO: 10669 - DNA, 455 bp, Zea Mays
agccgccgccgtcctcccaatcccctccccacatcgggaaccgccgccgacgccgcaggaggagacgcatcgaggttagcacgcgaagaagcgaccatgagggccaagtggaagaagaagcgcatgaggaggctcaagaggaagcgcagaaagatgaggcagagatccaagtaggcagatcgagatggattgtggacctgatgacatgcgtgggtacatacatttcttcggatgcgttggtgtgcctgtggagagatgtcaacctgccatggtgtcacggtccgccatcagttgaacgtcttgcctgcacttcagtaggccacttttcatggttctagttgtatttgaatccagcgtttgccactaagataaatcagacagtcgttttgtgaacctattatgatggagctttatttgctgataatatctagctacctatttgagctgaaaaaaac

SEQ ID NO: 10670 - DNA, 433 bp, Zea Mays
ttttatttttgaatcaaataaatcatctcattgataaccagaaaacggggcaggcacatgatcgccgccacaaacaatggagcgtcgacgcacgtaccaccacgcgcacacctcctcctccgccaccgactccatacatacagacacacgcccgccgaaacaactcacacagacacgcgcacgacacggactccactcgcgccagacgaatcacaaatcaagcagaaaccacgcgtccagcgcggatctagcagaagaggtagccgaaggcggcggcggcgagggaggccgcggcgaggggcacggcggccgcggcgtcggaggcgggggccggggcgggggccggccatctgcgagtgtgtagtgtagctagcgagtcgggtttttattgggccgcgcgggatctctctacgagagtatgaagcagtagaag

SEQ ID NO: 10671 - DNA, 1839 bp, Zea Mays
ctctaatggttgtgttatataatcatggcctcatgggaagcctatccttgtcaccttgtttcagcaagttcaaggagctcgcacaagcctatgaggttttgagtgatccagagaaacgtgagatttatgatcagtatggtgaagatgcccttaaggaaggaatgggcggtggaggatcccatgttgatccatttgacatcttctcatcattttttggaccctcttttggaggaggtggtggaagcagcaggggaagaaggcaaaggaggggagaagatgtagttcacccacttaaagtttctctggaagatctttacaatggcacctcaaagaagctctctctttcgcgcaatgtcatctgctccaagtgcaagggcaagggctcgaagtctggtgcctcaatgaggtgccctggttgccagggctcaggcatgaaagtcactattcgtcagctgggcccttccatgatacagcagatgcagcagccttgcaatgagtgcaaggggactggagagagcatcaatgagaaggaccgctgtccagggtgcaagggtgagaaggtcattcaagagaagaaggttcttgaggttcatgttgagaaggggatgcaacacaaccagaagatcaccttccctggtgaagctgatgaagcgcctgatactgtcactggagacattgtattcgtcctccagcagaaggatcactccaaattcaaaagaaagggtgaagatctcttctatgagcacaccttgtctctgaccgaagcactatgtgggttccaatttgttcttacacatctggacaacaggcagcttctcatcaaatcagaccctggtgaagttgttaaacctgaccaattcaaggcgattaatgatgaggggatgccaatttaccagaggcctttcatgaaggggaagctgtacatccatttcacggtggagttccctgactcgttggcaccagagcagtgcaaggctctcgagacagtacttccaccaaggccttcatccaagctgacagacatggagatagatgaatgcgaggagacgactatgcatgatgtgaacaacatcgaggaagagatgcgcaggaagcaagctcacgctgcccaggaggcgtacgaggaggacgacgagatgccgggcggagcccagagagtgcagtgcgcgcaacagtaagcagactatcatcaaggcaattgggaggggtggtgcccttaaagcatgggagtgatctctggttttgctgtcgccgagctgggaaataggaagctgaatcgacctcgcaagcggggaatgtatccttttttgctgcaacataaaaaatgctacccaggcatagctgggtaccttttaacttctgtttgtgggatttgctagagtgatggtttcgatatatagggggacttgaatgtctggaatgctacggtataacgcacatttgggtgcaatgtctgttgcattgctgtctgaatgacatcgttggtacatttattttcatgtaacgcctgtagtttgctaatcaacaagcttggaatggcctgattgatgatgcctgataatttgtcctttacaggttataaaggtgctgctaagaaacaatagtcatttgtggagcgtaacataacggtgagcagtctagccttgttggatcgtgacatggaacttgaggccaagtttgcagtagttgccgacgctgcagacgtagtagcgcacgcctttatagtcgagcgggacgacggcgggcgggacgcggaagttgttgtaggggtcgtcggtggtgcagtcctcgtactccctcctggacacctgcaccacgtcgtagaacccaatctggaac

SEQ ID NO: 10672 - DNA, 433 bp, Zea Mays
ttttttatttgaatcaaataaatcatctcattgataaccagaaaacggggcaggcacatgatcgccgccacaaacaatggagcgtcgacgcacgtaccaccacgcgcacacctcctcctccgccaccgactccatacatacagacacacgcccgccgaaacaactcacacagacacgcgcacgacacggactccactcgcgccagacgaatcacaaatcaagcagaaaccacgcgtccagcgcggatctagcagaagaggtagccgaaggcggcggcggcgagggaggccgcggcgaggggcacggcggccgcggcgtcggaggcgggggccggggcgggggccggccatctgcgagtgtgtagtgtagctagcgagtcgggtttttattgggccgcgcgggatctctctacgagagtatgaagcagtagaag

SEQ ID NO: 10673 - DNA, 661 bp, Zea Mays
caaaagcgtcgttctctcttcctggtccaagtgatcttgccaagttacgagcagcaagcagagatcagatcatccatcggcaatgtcgaacatcgggcagtccttccaggccggcaaggcggaggcccagggcgagtaccaggcggagcacgcggcgcagtgcgtcaaggacaccgccggagccgcggccgacagcgcgcagctgcagcagcaccgcgccaccggcaccgttgagcaggtggcgcagacgggccagggcgtggcggcaggcgtcaaggacacggtggcgggcgcggcggttggcgtcaccaacacggtggcgggcgtggcggcgggcgtcacgaacacggtgaccggcgcggtggcgggcgtcacgaacacggtgaccggcgcggcggcgggtgtcaaggacaccgtgaccggcggccactgatcgacgacccacccaagaatgctgcatgcatggccaagtgttgagggtttgagcccaaagatggcttgaatttccgtccttttttgctttattttttgacattattgttttaacatgtttcattcacccgtctctgattgggattgtgatcacgaccgcctgcaataaaaaaaggccatctttactatgatccacattatgtttcctagtgcaattaaaggatcatca

SEQ ID NO: 10674 - DNA, 68 bp, Zea Mays
tgagcagtgctggaaacttggatgcttggagtggtggtggttggggtatttatagccctcaaccacca

SEQ ID NO: 10675 - DNA, 52 bp, Zea Mays
tgatgctgttttttttttttctttttttttttttttttttttctctctttct

SEQ ID NO: 10676 - DNA, 549 bp, Zea Mays
ccaattaaaaccctagacttcctggcgtgctataaaagcaggtggccgccgcctttgccttgctcaccctgcccttctgtgtacgaagccgacgagcagccgacgctaaagcttggtccggtgagcttcagagaaggggcgggtacgtcaagatgcagatcttcgtgaagaccctgacgggaaagaccatcaccctcgaggtcgagagcagcgatacaatcgacaatgtcaaggccaagatccaggacaaggaaggtatcccgccggaccagcagcgactaatcttcgcggggaagcagctcgaagacggccgcaccttggccgactacaacatccagaaggagtccacccttcaccttgttcttcgccttcgcggtggcatcattgaaccttccctccaggcgctcgcccgcaagtacaaccaggacaagatgatctgccgcaagtgctatgcacggctgcaccccagggctgttaactgccgcaagaagaagtgtggccacagcaaccagatttgtatataagcaagatggtgcgagtcagctttag

SEQ ID NO: 10677 - DNA, 80 bp, Zea Mays
aagaagaattcatgtcattggtggtgattgaaacactgtagctgcactccatagtgtcatgtgcaggatctggctctttg

SEQ ID NO: 10678 - DNA, 585 bp, Zea Mays
actcgtccgggactacggttccaacttgaggctgggctcggagaggcggcggcgatgtctgggcgcggcaagggcggcaagggtctgggcaagggcggcgcgaagcgccaccggaaggtgctccgcgacaacatccagggcatcaccaagccggcgatccggaggctggctaggaggggtggcgtgaagcgcatctcggggctcatctacgaggagacccgcggcgtgctcaagatctttctcgagaacgtcatccgcgacgccgtcacctacaccgagcacgcgcgccgcaagaccgtgaccgccatggacgtcgtctacgcgctcaagcgccagggccgcaccctctacggcttcggaggctaggctaggcgcctcttcgtagtcggggactggttaggggacatgtctctgtgtgatgctttctgaggtagtattgctgcaatagctgtgtaatccatcgcttctgcaatgaagcgctttgaagcatgctacgtatgttgtgtctgtgggtgattgtatttctggtagtaacagtgattcttcctgaattttggataatacaagctcattcgcagtaaaaaa

SEQ ID NO: 10679 - DNA, 675 bp, Zea Mays
agtttctggtttatcttccaccgcgcttcgcccactcgctccagccgcttcaccgcgccgccaccgccaccgcgaggatgccgttcaagaggttcgtggagatcgggcgcgtggccctggtgaactacggggaggactatggccgtctcgttgtcatcgtcgatgtggtcgaccagaacagggcacttgtggatgcccctgatatggtcaggtgccaggtgaacttcaagcggctctcacttactgacatcaagattgacatcaaacgtgtccccaagaagacagccctgatcaaggcgatggaggaagctgatgtgaagaccaagtgggagaacagctcatggggcaagaagctgattgtccagaagaggagagcatcgctcaatgactttgataggttcaaagtcatgctggcgaagattaagaggggcggtgctatcaggcaagagctcgccaagctgaagaaggcgtccacggcttaaggagtctctttccgtgaatgtcatgttagagtttttggttatgagttggatcagcaattcgattgagcgttgtcaaagccagaattaccaatatgttccctgtaaacccatttcaaactttatcaagcacgggcgtgctcaggatacttttgccatgaatgatatggaatatctatggtagcttgtaaaaata

SEQ ID NO: 10680 - DNA, 829 bp, Zea Mays
cgagcggcacgagtacaagcagcaggcgcgtctcagcctggaaaaaaggcccattaaaaggcccacttcaacgtggtggatatgcatatataactgcgaagtaaccctaaccgtcaatagcctccgcctctccttccagtgtccgccgtcgtgcgctcgctacccctctccctcgaggcctttgccggcgaagagcgcccagtcgcccaccaggatgaagtttgttgctgcctacctgcttgctgtcctcgctgggaactccagcccctctgccgaggacttgacagccattctggagtcagttggctgtgaagttgacaatgaaaagatggaactccttctgtcccaactgagcggtaaggacattaccgagctcattgctgctggcagggagaagtttgcttcagtcccatgtggcggtggcggtgtggctgttgtggcagctgcccctgctgctggcggcgctcctgcagctgaggcgaagaaagaagagaaggtggaggagaaggaagaaagtgatgacgacatgggcttcagcctcttcgactaagcctgtgcaatagtcaagagtattgtttttgagtcgcggaagcagagggaagaaaaatcgtagtcatgtttggactttaactttgttttatgttggaaagtacttgaaagacttttcctgtggtaattctaggcgtaggttgctgtgctggttggggtttactggtgaaccagagtttttctatctcccactatgaatttgttacctcaagttacctggatgttcactattttgttggtacatgtcgattttgcctcgtgcatccgtgtaaagcaaaaa

SEQ ID NO: 10681 - DNA, 1116 bp, Zea Mays
ttctggcaaatatccgaacagccagcccgaccgcgcgagccgttggatatttaagcccctcctcactccccccagtcctcccgtgctatccccccattcgtcaccagccaggtcctggaaccttatcaccaaatcctcacatcatggcggccgcgctcttctccacctcgctctcgccccgcttcctcgccctatcctctccgaagccggccgcgcccgcggcctcggccttcctccccttcacgctgccgctgcgcgctgtgtcggcgccggcgccagcgaggcgggtcttcgagcccgtagccgtcgcggtgtcgtcggagtacgggaccgagggcgcggagcagcaggacggggagttctccgaggacctcaagctgttcgtcggtaacctgccgttcagcgtcgacagtgcgcagctggccgggctcttcgagcaggctggctccgtcgagatggtcgaggttgtatacgatagaatgactgggcggagtcgtggatttggattcgtgacaatgtcttcagctgaagaagccggggctgctgtcgagcaattcaacggttatacatttcaaggaagacctctgagggtgaactgcgggccaccgccacctagagatggatccgcaccaagagcaccaaggggtggtggtggtggtggcggcggcggcagctttgtcgattcagggaacaaggtatacgtggggaaccttgcatggggcgttgacaactcgactctggagaacctattcagtgagcaaggacaggtgctggatgctaaggtcatctacgacagggatagcggcaggtcaagggggtttggtttcgtcacctatggctctgccgaggaggtcaacaatgccatatcaaaccttgatggcatcgacttggatggtagacagatccgagtcacggttgcagaatcaaagcccaggcgtgaattttgagattttgttaaggtggtttagaggtcaatagcgtgtgttcacaagttctagtttgtagcgtctattctttcttccgtatgagtaacaagatgctgaattgctgataatgagagactagaagtgaaactgctgtccacaggaagatatttttcccaacccttctataaaa

SEQ ID NO: 10682 - DNA, 59 bp, Zea Mays
tgtgtgggtgcttttttttttttttttttttttttttttttttctttttttttttatta

SEQ ID NO: 10683 - DNA, 691 bp, Zea Mays
cagtaataatgaaaatgggcggttcatttatggagttgcgagttctcctggtaaaagagcatcgatggaggacttctatgaggcaagaatagacgacgttgatggagagaaaattggaatgttcggtgtatatgatggtcatggaggagtccgagcagctgagtatgttaagcagcaccttttcagcaatttaatcaaacacccaaagttcatcactgataccaaggctgctatcgccgaaacttacaacctcacagattcagaatttctgaaagctgatagctgtcaaactcgagatgctggctcaactgcctcaacagctattattgtaggtgaccgtttgcttgttgcaaatgttggagattctagagccgttatttctaaaggaggacaagcgattgcggtttcaagggatcacaaacctgatcagacagatgagagacaaagaattgaggacgcagggggctttgttatgtgggctgggacatggcgagtgggtggtgttcttgctgtctctcgcgcatttggtgataaactcttgaagcagtatgttgtcgctgaccctgaaatcaaggaggaggtggtcgacagctcccttgaattcctcatccttgctagtgatggactctgggatgttgtcactaatgaggctatcatgaagctttctggtcaaagtcccaaaagaatgaga

SEQ ID NO: 10684 - DNA, 1760 bp, Zea Mays
accccgcgcggcgttgcgtgtgctctatctatccgccccgcgcgcttctccgccaaccaactccccggcgcctccctcctccaccagaccaccacccacaaacccttcttattgataccatccacagtcccagcccgcgccagcctctgcctctgccccccagactaccccctgcctgcaggctcctgcaactgcaatgtcggcgctcgggacgctctccggcggggccgccggtgtctccggcctcatccgcctccgccgtcgggtggcccccgcgctcgcggcgccgtcgcaccacgccgctgggacgttgaactgcgccgccttgcccgatgccgccccgctcgtctggggacgccagctccgcccgtcgctcctcctccccgccacactgctcccgtcgtcgtcgcagggcgccaggaggcacacgccacggcggcccgccgcagccgcaggggaggccaagtctgtgggtttcctggagaagtacccggccctggtcactggcttcttcttcttcatgtggtacttcctcaacgtcatattcaacatcctcaacaagaagatctacaactacttcccctatccatactttgtgtccttgatccatctagtagtgggtgtcgtatactgcctcatcagctggagtgtcggtctccccaagcgagcgcctatcaatggcacgctcctgaagcttctctttccagtcgccctgtgccatggtattggtcacatcactagcaatgtgtccttcgctgctgttgcagtctcatttgcccacactatcaaagctctggagcccttcttcagcgcagctgctactcagtttatccttggacagcaagttcccttctctctgtggctttctcttgcccctgttgtcatcggtgtttcaatggcatcccttactgagctctcattcaactggactggcttcatcaatgccatgatatcaaacatctcattcacctacaggagcatttattccaagaaagccatgactgacatggatagcaccaacgtgtatgcttacatttcaataattgctctcattgtttgcattccgcctgcagtgatctttgaagggccccggctaatgcagcatggattcagtgatgccattgcaaaagtaggcttgacaaagtttgttagtgacctattcttggttggactgttctaccatctgtacaaccagattgctacgaacaccttggagcgagtggctcctctgacacatgctgtgggcaatgtgttgaagcgtgtgtttgtcattggcttctcaatcgttgtttttggcaacaaaattagcacacaaactggaattggcacgtccattgccatagctggtgttgctatgtactcttacattaaggctaagattgaagaggagaaaaggaaaaagagcgcatgatgagctgactgctgtgaatattttaccttctgcgtctgggacacaacaacaacatcgtcgacaatcaagattatgccttgttttgtagtattcgtcttgagtcgctttgtttattaccaatctattatctggtgttgaacagcagcacattgcagaacagatgatcgtcgagtgaccttcatatacgcctgtaactctctctctctccctctctctcagctcagcagtttagatcgactatactcattggacatggacctatctatatatcttctttgtaaacaggacagagtcggactcctgctgcagtattatcaactcatctattttaaactctttaaaaaaagaa

SEQ ID NO: 10685 - DNA, 2105 bp, Zea Mays
cagacgtgagccggcacggcaggcggcctcctcctcctctcacggcaccggcagctacgggggattcctttcccaccgctccttcgctttcccttcctcgcccgccgtaataaatagacaccccctccacaccctctttccccaacctcgtgttgttcggagcgcacacacacacaaccagatctcccccaaatccacccgtcggcacctccgcttcaagatgcagatctttgtgaaaaccctgactggcaagactatcaccctcgaggtggagtcgtctgacaccattgacaacgttaaggccaagatccaggacaaggagggcatccccccagaccagcagcggctcatctttgctggcaaacagcttgaggacgggcgcacgcttgctgactacaacatccagaaggagagcaccctccaccttgtgctccgtctcaggggaggcatgcagatctttgtgaaaaccctgaccggcaagactatcaccctcgaggtggagtcctctgacaccattgacaacgtcaaggccaagatccaggacaaggagggcatccctccagaccagcagcggctcatctttgctgggaagcagcttgaggacgggcgcacgcttgccgactacaacatccagaaggagagcaccctccacttggtgctgcgcctcaggggaggcatgcagatcttcgtgaagaccctgaccggcaagactatcaccctcgaggtggagtcttcagacaccatcgacaacgtcaaggccaagatccaggacaaggagggcattcccccagaccagcagcggctcatctttgctggaaagcagcttgaggacgggcgcacgcttgccgactacaacatccagaaggagagcaccctccacttggtgctgcgcctcaggggaggcatgcagatcttcgtgaagaccctgaccggcaagactatcaccctcgaggtggagtcttcagacaccatcgacaatgtcaaggccaagatccaggacaaggagggcatcccaccggaccagcagcgtttgatcttcgctggcaagcagctggaggatggccgcacccttgcggattacaacatccagaaggagagcaccctccacctggtgctccgtctcaggggtggtatgcagatctttgtgaagacactcactggcaagacaatcacccttgaggtggagtcttcggataccattgacaatgtcaaggccaagatccaggacaaggagggcatcccacccgaccagcagcgcctcatcttcgccggcaagcagctggaggatggccgcaccctggcggattacaacatccagaaggagagcactctccacctggtgctccgcctcaggggtggcatgcagatttttgtgaagacattgactggcaagaccatcaccttggaggtggagagctctgacaccattgacaatgtgaaggccaagatccaggacaaggagggcattcccccagaccagcagcgtctgatctttgcgggcaagcagctggaggatggccgcactctcgcggactacaacatccagaaggagagcacccttcaccttgttctccgcctcagaggtggtatgcagatctttgtaaagaccctgactggaaaaaccataaccctggaggttgagagctcggacaccatcgacaatgtgaaggcgaagatccaggacaaggagggcatccccccggaccagcagcgtctgatcttcgccggcaaacagctggaggatggccgcaccctagcagactacaacatccaaaaggagagcaccctccaccttgtgctccgtctccgtggtggtcagtaagtcatgggtcgtttaagctgccgatgtgcctgcgtcgtctggtgccctctctccatatggaggttgtcaaagtatctgctgttcgtgtcatgagtcgtgtcagtgttggtttaataatggaccggttgtgttgtgtgtgcgtactacccagaactatgacaaatcatgaataagtttgatgtttgaaattaaagcctgtgctcattatgttctgtctttcagttgtctcctaatatttgcctgcaggactaaccgaacaagtgattgttttcggttatttctc

SEQ ID NO: 10686 - DNA, 71 bp, Zea Mays
ccaactctgacagttttaggaaatgactatgcaacaagagatgggactggggtacttctgttgcatatgat

SEQ ID NO: 10687 - DNA, 137 bp, Zea Mays
atcccacacagacacacacacatccgtcaaagaaacaagtgcacacaaaataatacatcgctcactagatttgcaagagcaatgccctctaagtcatccatcctgctcgtcatggtgggcgctggctaccctatttc

SEQ ID NO: 10688 - DNA, 2348 bp, Zea Mays
cctaacaaaatctctccttagtttccccaacctgcttctgtttaccgaattcctaaatccaatccccttgccaagctctctctttgctgcgggaggtcgaggccggagaggtcttctgggatgggatcaagaaaggggtggttccccgtggccctcctgctgttggccgactctgccctctggccgccggtcgccgccgccgccgccggaggcggcgaggccgaacacgccgttcagcagcatagcgagcgcatctcagggagtgctggtgatgtgttagaagataatcctgtgggtaggttgaaggtcttcatttatgacttaccaaggaagtacaacaagaagatggtcaccaaggattcacggtgcctcagtcacatgtttgctgctgaaattttcatgcatcgtttcttgctctcgagtgctgtccggacactaaatcccaaggaagctgattggttctatacaccagtttacactacttgcgatttaactaacgctggactgcccttgccgtttaagtcaccacgggtgatgaggagcgcgatccaatatatttcaaacaaatggcccttctggaataggactgatggagcagatcatttcttcgttgttccgcatgattttgcagcatgcttccactatcaggaagaaaaagctatcgagcgtggaattcttccattgctgcgacgtgctacattggtccaaacctttggacaggagaatcatgtttgcctgaaggagggttccatcattattccaccctatgctcctccgcagaaaatgcaagctcacttgatttccccagacactccacgctcaatcttcgtttacttccggggacttttttatgacacggggaatgaccccgagggcggatactatgcaaggtgcgcgagcttcgctatgggagaacttcaagagcaaccctctgtttgacatttccacagaccaccctgccacttactatgaagacatgcagcgcgctgtcttctgcctgtgcccattgggctgggcaccgtggagccctaggttggttgaggctgtggtctttggctgcattccagtcatcatagctgatgacatcgtgcttccatttgcggacgcgatcccatgggaggaaatcggcgtctttgtcgaggagaaggatgtcccaaagcttgacacgatcctcacgtcgatgcctatagatgacatcttaaggaagcaaaggttactcgcaaatccatcgatgaagcaggcaatgttgttcccacagccagcgcaaccaagggacgcgttccaccaaatcttgaacggccttgctcggaagctcccgcacccagagggtacgttcttacaacctggcgatcagcgcctcaactggaccgctggtcctgtgggagatctgaagccgtggtagagaagaatagctatcttcttctttgataatccaagctttgccacgagcaccccttaggactaatgcacgcttcatgagatgttatgtaatcaatatgctgtgcgtgctttaggtgcaaaatacaccttggccgtgcttagtccttatgaacgccatgtaacttattgatttcccatggaaatgaaatggtatatttatcttgctgtcagaaccgcaggtcattagattggttatttctgtcggcatgttttcattgtaatccaggtgaagaggatttgtggtttagtgccagccagtctgcgacgactgcggtcggtcgtcgacgacgtgctattacatatcgatcgtcgtcgtcgatgtgctattactgatcgtcgtcgtcgtccgagtccaactgtttgagcagcgaggcgcagatgggcagcggcacgtccttgaggtagccgagcgggttggcggggcgcaggttgtcgctgatgccgacgttcctggtgagcaggacgccggcgcggtccctgtccgcctgcacctggtcgcagtccttgcgcgggctctccaccaagaccacctcgcagatgtcctcctcgtggctgtccttgagctcgatcgtgtacgtgccgttcccgtcggtcaccccgtcgatggagcgctcgagcttgccggtgccgaagtgcttgcactccagcctcaccttggcgcccgcgatgtactcggtgacattggtcacgaacccggcgcggcaggtgtcgcaatagacgcggccctggatgacgtagtcggggaggtcgttgtcgacggcggtgccagccgcggcacagaagaggacggataagatgacggcgaaggtcgtcgccggaatcgaggccatggccgctgatttcctgtcccccctgtgaatgtcggaaaagggcgggaccttatttggtgagggaggcgtgaaggcggg

SEQ ID NO: 10689 - DNA, 617 bp, Zea Mays
aaaacctagcgctggcgccgcagacccctccccttcgcttccttccctagcgccgacgcccaccagacgagatggccccgaagaaggacaaggccccgccgccgtcgtcgaagccggccaagtccggtggtggcaagcaaaagaagaagaagtggagcaagggaaagctaaaggagaaggtaaacaacgcggtgctgttcgaccaggctacctacgacaagctgctctcggaggtgcccaagtacaagcaaatcaccccttccatcctctccgagcgtctgaggatcaacggctcccttgctcggagggccatcaaggacttgatggcgcgtggcctcattcggatggtctcggtccactcaagccagcagatctacaccagggcaaccaatacataaggatggggaagaggtctaaaatgcattgtctgccctctctgcaggaggagctcgtctttagaacagttgccatctttgtcaagagttgccaatgttatgttactggtgatgagttccaggtgacggcaacattttagagattttgagtatttctattagttggtactatggtttgccaattataagttacttggcctaaatggtttttgttttcaaaaa

SEQ ID NO: 10690 - DNA, 1322 bp, Zea Mays
gcatgcatagcagcagatggcaaacacacgacctaaccaatccctgccgcagctggctcgccgcagccacaagccgaaaaggaggcggcgaccccacaaaatctgagcacgcgcgcccgacgcggccacggcggatgcctcggcgccaatccgcggcgcccacctcactcctcttatccccgcctcacccacttggccactgcgcgtccccccttatcccgagcgcgtttctttccgatcccaaagctcccgcacaccctgcctgatccctcccaataagctccccagctccacgccggacgcagcagcagcagcagtagagatggccgccctcgccgcctcctccacggccgccttcgccgccaagccgcgcctcccacgcgcgcgcctcaccgtggcctgctccgccaccggcggcgacggcaacggcagcagcagcagtgtgtcgctcgcatcctccgtgaagacgttctcggccgcgctggctctgtcgtcggtgcttctctcctcggccgccacctcccctccccccgcggccgctgacatcgcggggctgaccccgtgcaaggagtccaaggcgttcgccaagcgcgagaagaactcgatcaagaagctcaccgcgtcgctcaagaagtacgcgcccgacagcgccccggccctcgccatcaacgccaccatcgagaagaccaagcggcggttcgagaactacggcaagttcggcctgctctgcggcgccgacggcctgccgcacctcatcgtcagcggcgaccagcggcactggggcgagttcgtcaccccgggcctgctcttcctctacatcgccgggtggatcgggtgggtcggcaggagctacctcatcgccatcagcggcgagaagaagcccgccatgagggagatcatcatcgacgtcgagctcgccacccgcctcctccccagggggttcatctggcccgtcgcggcctaccgcgagctcatcaacggagacctcgtcgtcgacgacaaggacatcggctactactagctgctgcacctgtgcttgcacatcgctgctggcgagttgggcagtcgtcgtacgtgggaaacatggcttttggtgtaggaggaaggaatggaagtggtctgttgtacttaaagaaactagatgaagaagtcttgtataactgaaacttcacccctctcttgtgtatgatgtattcaccttcgtcttgaaaattcttgagaacggtttcatcttgcatacattttgctagtgaagggtcgaatcagctgaccagatgagataaataagagacaataataattctttgctttcagaaaaacaa

SEQ ID NO: 10691 - DNA, 1586 bp, Zea Mays
gccgcgtcgacgagactgcacatgaaaaccgggggcagcgccgcgccgaaccgggcgcgccgcacaaggttcgatccgccggctccggtggcgcacccagatcagatccccctttcgctggtttctttccccttggccaagcccaaaccgtctttaaatacacccgtcgtcgtccgcatcccccgcctgccttaaccattcctcccaacaccacctcgcctgcgatcttcgtagcctccgtcgcgtcgagcatcgatcatgtcggcctactgcggaaagtacaaggatgagctcatcaagaatgctgcctacattggcacccccggcaagggtatccttgctgctgatgagtccactggcaccattggcaagcgcctttccagcatcaatgtcgagaacgttgaggagaaccgccgtgccctccgtgagctcctattctgctgccctggtgctctccagtacatcagcggtgtgatcctcttcgaggagaccctgtaccagaagaccaaggatggcaagccttttgttgatgtcctcaaggagggaggcgtcctccctggcatcaaggttgacaagggcaccattgaggttgttggcactgataaggagaccaccacccaaggccatgacgaccttggcaagcgttgcgccaagtactacgaggcaggtgcccgctttgccaagtggcgcgctgttctcaagattggccctaatgagccatcacagcttgccatcgacctgaacgctcagggtctggctcgctatgccatcatctgccaggagaatggtctggtgccaattgttgagcctgagatccttgttgatggccctcatgacattgatcgctgcgcttacgtcactgagaccgtccttgctgcctgctacaaggcgctcaacgagcaccatgtcctcctggagggtaccctcctgaagcccaacatggtgactccaggctccgactccaagaaggtgacccctgaggtgattgctgagtacaccgtccgtaccctccagaggaccgtccctgctgctgtgcctgctgttgtcttcctctctggtggacagagcgaggaggaggccacccgcaacctcaatgccatgaacaagctcagcaccaagaagccgtggtccctgtctttctccttcggccgtgccctccaggcgagcaccctcaaggcctgggctggcaaggtggagaacctggagaaggctagagctgccttcctcgccaggtgcaaggccaactctgaggctaccctcggcacctacaagggtgatgctgccgccgacaccgagagcctccacgtcaaggactacaagtactgagttgcttctctttgcgtgcccgttttggaactcctgcctacgagctaggttgcggagtgtggtttgctcgttagagcttattttcggacatccaaaaaacatgcttcctatgtgggatgatggttatctttatatttgtatgttaattagtctctttgctgttaaatttcgtgtaagttggtcctgccgatggagaatcgagcagctcccttttttttagtaggaacattactagccaaatgaaagtgtggcagcctacc

SEQ ID NO: 10692 - DNA, 114 bp, Zea Mays
atgaccccgttttcacggtttaggctgctcccattttgctcgccgctactacggtacgggtacgagaatcacttttgctttcttttcctctagccactaagatgtttcagttcg

SEQ ID NO: 10693 - DNA, 968 bp, Zea Mays
gccacaacactgcccacacaccctccccctccgcaccgaaccccctggcgcgcgctgcgctcccttgaccggcacgtcatcccactgccatgcgggccccgcaccccgcgcgcccgggggccgcgccctcctcaaatgcccccacccctcgcctcccctgccctcccctcctccgcacaaacgcgtcgcatccgctccacaggatcctctgcgccaccgcaaccgtgtgaccgcccgtgccgccggcgatcccgatccgccgacccgtcccagccccgctcgcagccatgtcgccgtcggagccgacgcgggaggagagcgtgtacatggccaagcttgcggagcaggcggagcggtacgaggagatggtcgagttcatggagcgcgtcgcgcgctacgccgggggcgccggcggcggggacgagctctcggtggaggagcgcaacctgctgtccgtcgcctacaagaacgtcatcggcgcccgcagggcctcgtggcggatcatctcctccatcgagcagaaggaggaaggccgcgggaacgaggcgcacgccgcatccatccgcgcctaccgctccaagatcgaggccgagcttgcccgcatctgcgacggcatcctcgcgctcctcgactcccacctcgtcccatccgccggcggcgccgagtccaaggtcttctacctcaagatgaagggtgactaccacaggtaccttgctgagttcaagtcaggtgcagagaggaaggatgctgcggagagcaccatgaatgcctacaaagctgctcaggatattgctcttgctgatctggccccaacccaccccatcaggctcgggcttgctctcaacttctcagtgttctactacgagatcctcaactcccctgaccgtgcttgcaaccttgcaaagcagggtatgggttgttaaataaaagctgatgcaaagggaacaattcacttgtagctgatgata

SEQ ID NO: 10694 - DNA, 419 bp, Zea Mays
ggaagtacgggctgatgtgctgcaggcagtgcttccgcagcaacgccaaggacattggcttcatcaagtaccgctgaagtcagctgggcgggctatctgaatgccatctcttggacagtgtagtagaggcgatgccacaattttaattactgtcatttagatgttcccttcagaactctgctatttaagtccgccatgtttgtgatggagaactgaagctttgtttgttatactgattatgagttacctgtgctttgcctaagctttcttgtcttctactctcatatttggatggctaaggtgtcataatagttgtacgtggattagatgccttcattttagaaggctgcagtcattgttcgtattaactcgcagcaatagtataattcggacggattagactgattagtagtttgctg

SEQ ID NO: 10695 - DNA, 2196 bp, Zea Mays
caaacagcttctagcctcttttacgttcatctccaccagtatgccctctcatactctatataaacacatcaacagcatcgcaattagccacaagatcacttcgggaggcaagtgcgatttcgatctcgcagccaccttttttttgttctgttgtgtatctagtagttggaggagatatgcagtttgcacttgcattggacacgaactcaggtcctcaccagataagatcttgtgagggtgatgggattgacaggttggaaaaattaagtattgggggcagaaagcaggagaaagctttgagaaataggtgctttggtggtagagttgctgcaactacacaatgtattcttacctcagatgcttgtcctgaaactcttcattctcaaacacagtcctctaggaaaaattatgctgatgcaaaccgtgtatctgctatcattttgggcggaggcactggatctcagctctttcctctgacaagcacaagagctacgcctgctgtacctgttggaggatgttacaggcttattgatatccctatgagtaactgcttcaacagtggtataaataagatatttgtgatgagtcagttcaattctacttcgcttaaccgccatattcatcgtacataccttgaaggcgggatcaactttgctgatggatctgtacaggtattagcggctacacaaatgcctgaagagccagctggatggttccagggtacagcagactctatcagaaaatttatctgggtactcgaggattattacagtcacaaatccattgacaacattgtaatcttgagtggcgatcagctttatcggatgaattacatggaacttgtgcagaaacatgtcgaggacgatgctgatatcactatatcatgtgctcctgttgatgagagccgagcttctaaaaatgggctagtgaagattgatcatactggacgtgtacttcaattctttgaaaaaccaaagggtgctgatttgaattctatgagagttgagaccaacttcctgagctatgctatagatgatgcacagaaatatccataccttgcatcaatgggcatttatgtcttcaagaaagatgcacttttagaccttctcaagtcaaaatatattcaattacatgactttggatctgaaatcctcccaagagctgtactagatcatagtgtgcaggcatgcatttttacgggctattgggaggatgttggaacaatcaaatcattctttgatgcaaacttggccctcactgagcagccttccaagtttgatttttatgatccaaaaacacctttcttcactgcaccccgatgcttgcctccgacgcaattggacaagtgcaagatgaaagatgcatttatctcagatggttgcttactgagagaatgcaacatcgagcattctgtgattggagtctgctcacgtgtcagctctggatgtgaactcaaggactccgtgatgatgggagcggacacctatgaaactgaagaagaagcttcaaagctactgttagctgggaaggtcccagttggaataggaaggaacacaaagataaggaactgtatcattgacatgaatgctaggattgggaagaacgtggtgatcacaaacagtaagggcatccaagaggctgatcacccggaagaagggtactacataaggtctggaatcgtggtgatcttgaagaatgcaaccatcaacgatgggtctgtcatatagatcggctgcgtttgcgtctacaaaacaagaacctacaatggtattgcatcgatggatcgtgtaaccttggtatggtaagagccgcttgacaggaagtcgagcgttcgggcgcaagatgcgttgtctggcatgctgttccttgaccatttgtgctgctagtatgtactgttataagctgccctagaagttgcagcaaacctttttatgaacctttgtatttccattacctgctttggatcaactatatctgtcatcctatatattactaaatttttacgtgtttttctaattcggtgctgcttttgggatctggcttcgatgaccgctcgacccttggccattggttcagctctgttccttagagcaactccaaggagtcctaaattttgtatcagatacgaaggacttcagccgtgtatgtcgtcctcaccaaacgctctttttgcatagtgcagggggtgtagacttg

SEQ ID NO: 10696 - DNA, 967 bp, Zea Mays
gctactgccgatccgttccctcagcccctcacaccgcttacttgactcctcccgaacttccacatctctgctctgccttcccagtctcccatccctgaaaacctcacaaaaccctcgctcgctccccaccaccccgccgcgccgccgcctgtaccagctgcgtcaagatgagtcggcaccctgaggtgaagtgggctcagaggatcgacaaggtttacatcactgtacagttacctgacgcaaaggatgctaaggtcaatttggatccagatggtgtcttcacattctctggcagtgctggtacaaacttgtatgaattgaaactagatctgaatgacaaagtaaacgttgaggctagcaaaataagtgtgggggtcaggtccatattctgtatcgtagaaaaagctgaagccaaatggtggaagaaactcgttcgagatgatcaaagggcacctcactttgtgaaagttgattgggacaaatgggttgatgaagatgatgatggtgctgatatcaacatggatgggatggacttctcgaatttcggtggcatgggtggtatgggcggcatgggtggcatgggtgatatggctggtatgggtggtcttggtggcatgggtggtatgggtggtcttggtggcatgggcggtatgggaatggatgatttcgaagatgagagtgatgatgaagaagaagtgtcgaaacctcaagctgcggacaaggctgttgaggctgaggagacggagtcagcggaaaccaagattgaggcggctcagagcagttgaagatgcttatgatctaagctagattgtatcctcatgttaattctgctgaatcggaggacaaaccttacatttatggtgctggcaagtcccagtggcgtgccatgaaaatttacgttccgtcttttaactgggtatccgagtgtcgtgctcagcatattatggatattatttccgtaaagaaa

SEQ ID NO: 10697 - DNA, 58 bp, Zea Mays
gacaacaacctcatctaagctaaaaatgtgttgcccgtggttgaagaaaatctagaag

SEQ ID NO: 10698 - DNA, 51 bp, Zea Mays
cccgaaggcgaaaaaaaaaaaaaaaaaaaaaaaaaaaaaaaaagcggccca

SEQ ID NO: 10699 - DNA, 51 bp, Zea Mays
gtaagcaattactcagcaagacttacccgactaaagaaaagactctcaagg

SEQ ID NO: 10700 - DNA, 1009 bp, Zea Mays
aaaaggcaccattttaacttgtgaggaggacacatcaacccagctgtgactttcgggctgttcttagccaggaagctgtccctgactagggccctcttctacatcatcatgcaatgcctgggtgccatctgtggagctggagtggtgaagggcttccagcagggactttacatgggcaacggtggtggcgccaatgttgtcgcacctggctacaccaagggtgatggccttggcgctgagattgttggcaccttcatcctagtctacaccgtcttctcagccaccgatgccaagaggaatgccagggactcccatgttcctatccttgccccactgccaattgggttcgcggtgttcctggtccaccttgccaccatccccattactggcactggcatcaacccagctaggagccttggcgctgccatcatctacaacagggatcacgcctggaacgaccattggatcttctgggtcggccccttcattggcgctgctctggctgccatctaccaccaggtgatcatcagagccatcccgttcaagagcaggtcttaagctgccgtggccgtgccgagacatgccagtccgaagaacgggcgtcttcctgtgatgtcttcttgtctgcccacgcctagtttctctgtcgattcctattcgtcgtctcttcagggctggtgctcactgctgcgccgttctgttaaccgaaacaagaactctgtgtattcctgtaccgagctgtgcatgtttttttctttccatcgtggagaatttaagttattatccgtttgctgcaaggtttgccgtctcattttatgcgttgggatgttggcaagaaagggcagatgtcatgtgagaatttaagttaagtgaaatcgattcagggttttcttggtttcagtttcaacagaaatcggcactggctggattcgcattcacatcggatatgcctcctggaaactaatagtaatttgaaacgatcttaaaagcaacatagaacgtagcgtga

SEQ ID NO: 10701 - DNA, 1700 bp, Zea Mays
ttataaaacctagctcctcaagctccagacgcagtcgaccgccgcagaccgggagtagtcgacgcgccgtcactgaatcctcagatcacggctagccgtaatcacgccactctgctgactcccggcgagcagtgtaacattttccttcagccatgggcaaggagaagactcacatcaacattgtggtcattggacatgtcgactctggcaagtcgaccaccactggccacctgatctacaagctcggcggtattgacaagcgtgtgattgagaggttcgagaaagaggccgcggagatgaacaagcggtcattcaagtatgcctgggtgcttgacaagctcaaggccgagcgtgagagaggtatcacaattgatattgctttgtggaagttcgagaccaccaagtactactgcactgtcattgatgcccctggacaccgtgacttcatcaagaatatgattactggcacttcccaagctgactgcgctgttcttatcattgactccactactggtggttttgaggctggtatctccaaggatggacagacccgcgagcatgctctccttgctttcacgcttggagtgaagcagatgatttgctgttgcaacaagatggatgccaccacacccaagtactccaaggcccgttatgatgagattgtgaaggaagtctcttcctacctgaagaaggttggatacaaccctgacaagatccactttgttcccatctctggtttcgaaggtgacaacatgattgagaggtccaccaaccttgactggtacaagggcccaaccctacttgaggctttggacttgatcaatgagccgaagaggccttcagacaagcccctgcgtctccccctacaggatgtgtacaagattggtggtattggaactgttcctgttgggcgtgttgagactggtatcatcaagcctggtatggttgttacctttggtcctagtggccttactactgaggtgaagtctgttgaaatgcaccatgaggctctccaggaggcccttcctggtgacaatgttggcttcaatgttaagaatgttgctgtgaaggatctgaagcgtgggtatgtggcctccaactccaaggatgaccctgccaaggaggctgctagcttcacgtcccaggtcatcatcatgaaccaccctgggcagattggcaacggctatgccccagtgctggactgccacacctcgcacattgctgtcaagtttgcggagctcattaccaagattgataggcggtctggcaaagagcttgagaaggagcccaaattcctcaagaatggtgatgctggtatggtgaagatggttcccactaagcccatggtagtggagaccttttctgaatatcctcctcttggtcgctttgctgtccgtgacatgaggcaaacggtggctgtcggagtcatcaagagtgtggagaagaaggatccaactggagccaaggtgaccaaggctgccgcaaagaagaaatgatgtgtctggctggttctgtgtttgcttgagggatacctagtggaaacgtaaaatatctcgtcttgttcacgtcattgtctgaactatgctcgcaacgtttgcctggtcgatttagaactgttattttcgttaaaaccagagtgttatttaagacttatccgaacatctggtgagccatatatggttactagttttaaaaaaaac

SEQ ID NO: 10702 - DNA, 781 bp, Zea Mays
tatggcaacccctgtcggttaatagttcctcgcggctggattgacggcccagatctcctcaagagcgcgttcccggcacggcaccgacggcgacgggcacggcctcgaattaaaaactgccgttgggcgactccgcgtggcccacggatccaccggagagatctggtctgccattccctcgctccttcccgtgaaccacaaacctaacgcggagcggcgcgggccggccgccgggcgaggtgcgcgtagctgccgtcgattgtcgccggatccatccaccatgggcggtggcaacggccagaagtccaagatggcccgcgagcgcaacttggagaagaacaagggggccaaggggagccagctcgagaccaacaagaaggccatgagcatccagtgcaaagtgtgcatgcaaacattcatgtgtaccacgactgaagtgaagtgccgggagcacgccgaggccaagcatcccaagacagacgtgtaccagtgcttcccccatctgaagaagtgaaaggcctgaacttagcaaccagtgctggtttggtcactacgatcgggccagggggcgttccttgtgttgagggtgttcattccgtgttatcttcccgtcagtcatgcgtcctgtcctatgttaacctacataagaaagcgatgtggtgtccacttctagtgaaactactgtctgctgttaaaacctggttggtttcagaacgatgattttcgtgtgcaaaacagattactggtccgtgggagttgggccagtttgcattgtcaaaag

SEQ ID NO: 10703 - DNA, 61 bp, Zea Mays
cccaccggtcaagaacaggtaccacaggatgaggcgcatggaggatgctacgatgtgttcg

SEQ ID NO: 10704 - DNA, 876 bp, Zea Mays
ccaaggccccaatccattcccacgccacctataaaaagtcgtaagcacaccgaaaccacagcaaaccctagcgccacccacccacccacccactcgcttcagccgcctccgccgcgcgtacaagcaggtggagacaggatgccggctggccacggcctgcgctcgcggacgcgcgacctcttcgcgcgccccttccgcaagaagggctacatcccgctcaccacctacctccgcacctacaagatcggcgattacgtcgatgtcaaggtgaacggcgccgtccacaaggggatgccgcacaagttctaccacggccgcaccggtcgcgtctggaacgtcaccaagcgcgccatcggcgtcgaggtcaacaagcaggtcaatgggcgcatcatcaggaagcgtatccatgtccgtgtggagcatgtgcagccgtcccgctgcacagaagagttccgcctgaggaaggcgaagaatgaccagctgaaggcggatgccaaaaagcgcggcgaggttatcagcaccaagaggcagccattgggtcccaagcccggcttcatggtcgagggcaccaccattgagaccgtaactcccatcccatatgatgtggtcaatgatctcaagggtggatactaggttgtttggtccatctacctgcagtacccagttctacatctgtgttactctagtgcgtgcaactttgctcactctgagcagtagtatgaacctgttgtctgttcctgttgaaagatttcccattttaggtgcaaacctgagtttctccgaacgcgttataccctgaccttgcttctgagaacgaagatgtgctatttttgcattttgttgtttcgaccacacactggaaactgggaatgtgtg

SEQ ID NO: 10705 - DNA, 332 bp, Zea Mays
atgagcttgatcgtgaacctaattcatccttttgatgagctcattgatgtagttctcgcggttaccggcatcaccgccctccacatagtggttcctcttcttcttcaggcctcccagcggcgccttcaacttgaatggccacaggaagttgttggcctccttgaagtgtgggccaacagtcatgatctcgtgaacaagatcctcaatgcagatgatgttgtgcttgcccaagccctctcgatgacttggttgttggacagagggatcctctgcttgttcagctttccatagcccctcttgtagatcaactccctgacactcttcaagtttgg

SEQ ID NO: 10706 - DNA, 1628 bp, Zea Mays
ggggggatccttggctttacagcacaaacctcgatagcctatccagccagcatcgttggattggagcacgcaaacaaaaccaaaagggagagcgacagcgtcaggaaataatacccaggggaaaaaacagagagagaaagaaaagaaaagaaaagaaaaggccattcaatcttatcaacacaaagttgatttaataaaaaaaggcaggaatcggtacagaagctgctgaattttctgttccattccatcaagcaataatgaagcgggggagcatggcccgccccagccttgcagcactattgtgctttgttgtcacttacctactcttcactccctccataaatagcaccactgcaccctctccttcgcgcactcatccattccatcatcccctttgcaagtatagtctctctgctaagcgaagcgaagcttcaagctagtctcggcggctctagaagacgatgggcaaggacgacgtgatcgagagcggcgctggcggcggcgagttcgctgccaaggactacacggaccctcccccggcgccgctgatcgacgcggcggagctggggtcctggtcgctgtaccgcgccgtgatcgccgagttcatcgccacgctgctgttcctgtacatcacggtggccaccgtgatcgggtacaagcaccagacggacgcgtcggcgtcgggcgccgacgcggcgtgcggcggcgtgggcgtgctgggcatcgcctgggccttcggcggcatgatcttcgtcctcgtctactgcaccgccggcatctcggggggccacatcaaccccgccgtcaccttcggcctcttcctggcgcgcaaggtctccctggtgcgcgcgctgctctacatcgtggcgcagtgcctcggcgccatctgcggcgtcggcctcgtcaaggcgttccagagcgcctacttcgacaggtacggcggcggcgccaactcgctcgcctccggctactcccgcggcaccggcctcggcgccgagatcatcggcaccttcgtgctcgtctacaccgtcttctccgccaccgaccccaagcgcaacgcccgcgactcccacgtcccggttctggctcccctccccatcggcttcgccgtgttcatggtgcacctggccaccatccccgtcaccggcaccggcatcaacccggccaggagcctgggcgccgccgtcatctacaacaaggacaagccctgggacgaccactggatcttctgggtgggccctctcgtgggcgctgccatcgcggccttctaccaccagtacatcctccgggctggcgccatcaaggccctcggctccttcaggagcaacgcgtgatgagcggggcttggctgtggagcaatggcgggcgacctacgggcggggggccgtgagcgaggagaatgccatcattcatcgatcgacttgggtgccggtggttggttcgggtcgccttttttttgtttcagcagctgctgcgttgcgcgcgtgcgtgagatttggtttggtttcgttcccctgcaatgtaatcatgtcgtgactctcaagggattattccgctctgctcttatggtctctgttttctatttaatgattgttattaccatgtagcagtaaccatcgtcaaagaaa

SEQ ID NO: 10707 - DNA, 1187 bp, Zea Mays
ctgtatcgacgcccgcgtgcaaggaaggcattccatgtgagggcatcagctcgggttgacaagttctcaaagagtgacatcatcgtgtccccttcgattctgtctgcaaactttgcgaagcttggtgatcaggtaaaagctgtggaggtggcaggatgcgactggattcatgttgatgtcatggatgggcgctttgtgccaaacatcacaattggacccttggttgttgatgctctgcgtccagtgactgatcttccgttggatgtacatctgatgattgtggaacctgagcagcgagtccctgattttatcaaggcaggtgctgatattgttagtgtccactgtgaacagacatcgaccatccatttgcaccgaacagtcaatcagattaaaagtctaggagcaaaggcaggagttgttttgaatccagcgactccactcactgcaattgattacgttcttgatgttgttgacctggtgctgattatgtctgtgaatcctgggtttggtggccagagctttatcgagagtcaagtaaagaaaattgcagaactgagaaggttatgtgcagagaagggagtgaacccctggattgaggttgatggtggtgttggtccgaaaaatgcctacaaggttattgaagctggcgcaaatgccattgtcgcaggttctgcagtttttggggctccagactacgctgaagctatcaaaggaataaagaccagccaaagacctctagctgtagccgcataaagagctggacgtgtaatcatttactctgtgcaagtttaccagtgatgcgatctgtatagatgtgtgtcttgtccagctatacgtataccggagatgaaaggagacggaggcagtgaagaaatatccttttttttcttctcatttttcacgaggatgccgtgcactgctcccagaatgctgtgtccaatttacaaacgcacaggtggcacatgaactagcagagtagctctctcttgaaaggaaactgtatttggggtcgatgaaccctctggtgttattcttcagactggtaaacgatgtaacatgtttgataatcaataaagtgcgtcgtatggctttcctaaaaaaaagcacagcagcacacgaatgtaacatgtttgtacatcggcatctgactgagtctgaagcccttgtacatgattggaatttacctt

SEQ ID NO: 10708 - DNA, 161 bp, Zea Mays
ggttgtgtgggaaaggtacgtcgtgatgatgaagaaaagcttgattttaaaggtggaaatgttcatattataacaagcaaagagggctgggaccagaagattgcaggagcaaatagagataagaaaactgtggcggtgtctcctggactaattatacatct

SEQ ID NO: 10709 - DNA, 1449 bp, Zea Mays
actcggcaaagagatagatttcggtagtgatagtagtaagcaagtatacattaggttactcgatattacacaaaataacaaagcaggtacaaagtacatacaagccaacgccaacactagatggcgatatattattttacagcttcttccaaatatagaagatccacgagagccttaagaaagcatccaacgtcatgtgctcagatccatggccatccatgaataccgcaagcacacccaccctctttatttatgacatcatcacgccaagccacgcaaggcacccacacacatacatatatgtatgtaaatatatatgtatagtccaggtgcaatctcacggatagacttcgaaggcaacacgagctccaaattccttcaggatcttgtattcgctgaaccctgctttggtgaagagctcgctccattctttttcatctctctgccgtccttttgtcatggtcatcatgccgatgtccatcaggaggtgagtttccagcataggcccagagtggtcaatcataatatcaccgattataactttcccgccatccttccgtgaaggaatcgccttccggcattgagccaggagctttagcacgacagtttgagcaggtggaatgaaactgaacatgtcaccttcgacatagtttatcatcgctccatcggccggtttggtggcaatgatcttgggaggggccagcacagtgcattttatgtgtgggaaggctttgacaatggccctggcacccttgtcatcaccgaagttaccgcagcagtaggtcatggactggatcccctcgaacaagtccctgaactcccgcatagctatctcgatgccgaagttgtcgtgggcgtccaaggcctcgctcgccatgtcgtggaaatctgcgtcgaggctccccatgctctcgtggaacagagtcgccccgtgcagctcctcgaacggtgacgtgaccacgtccctcttgaaccactccgccagccctatccccgcctcgatgtagcgcgtcgaggtgcaggtgagcaccagagcggtgtggttcatgtggtcctcgtgagggatgccgtccaccaggaggtaggacacggggctgatgcggtaccgctcctcctccgagctctgcttgtcgacggtgaacacgcccgacgcggcgaggagccgcagcaggcggcggaggaacggcagcttagtggaggggagagacagcgccgtgaccagctcagcggctgaggcagccccgccatggcggtagatcgccgtagggatgccaagctccacggcgcacctcagtgacaggggcgtgaggtaggagaggctgagccgccatatgtcggcttgtgcctttagtagctcggcgtcgctagggcggacaacctcagaagccattgctagagtgcgcttgtgcttgtgtatgcgcggacggtccgcggcaaggggccgaacgg

SEQ ID NO: 10710 - DNA, 53 bp, Zea Mays
cctggaactcctggagatccgccttgacaccttctttacctgagcatagattg

SEQ ID NO: 10711 - DNA, 56 bp, Zea Mays
ctgggagattttactcgttggtgtcaattaggtggtctttggacttttgtcgctct

SEQ ID NO: 10712 - DNA, 1865 bp, Zea Mays
cctgtacagatacggccgccgcatcgtcgtaggcacgtcgtccagcagcagacacctccgccacctccaccctcgaatcgttccccaccatggcgtcgcagggatcctccgtcttcgccgcactcgagcaggccccggaggaccccatcctcggagtgaccgttgcctacaacaaggatcccagccccgtgaaggtcaacctcggggtcggcgcctaccggaccgaggaagggaagcccctagtgctgaacgtggtcaggcgcgccgagcaaatgttgatcaataatccgtcacgtgtcaaggagtacctaccaatcaccggtctggctgaattcaataagctgagcgctaagcttatctttggcgctgacagccctgctattcaggagaatagggttgctaccgtgcagtgcctatcgggtactggttctttaagagtcggaggtgaatttcttgcaaggcactatcacgagcgcactatctacatcccacaaccaacctggggaaatcacccaaaagtcttcaccctatctggcttgaacgttaggagctaccgctattatgatcctgcaacatgcagccttcacttcgaaggactcctggaagacctcggttctgctccttcaggttcaattgtactgctgcatgcctgtgctcacaaccctactggagtagatcctaccatcgaacagtgggaacagattaggcagctgatgagatcaaaatcactgcttccgttctttgacagtgcctatcaaggctttgcaagtggaagtcttgacaaagatgctcagtcagtgcgtatgtttgttgctgatggtggtgaacttctcatggctcagagctacgctaagaacatgggattgtatggagagcgtgttggcgctttgagcattgtatgtaaaagtgccgatgtagctgttagggttgaaagtcaactcaaacttgtcatcaggcctatgtattcaaaccctcctcttcatggtgcctctatcgttgctaccatactcagggacagcgagatgttcaacgaatggactctggaactgaaggccatggctgataggatcattaacatgaggcaacaactatttaatgcgctgaaatccagaggaacccctggtgattggagccatatcattaagcaaattgggatgtttactttcactgggctgaatagcgaacaagtcgcattcatgaggcaggaataccacatttatatgacatctgatgggaggatcagcatggccggtttgagcatgaggactgtgccccatcttgcagatgccatacacgctgcagttactcaactgaaatgaggatagtatcgcagctttcgtgaataaaacctgaatcacccacaacaatgttctaagtactcagccagtggtatttactggttgacctactgtagtttgcgtcggaatagatatgtttttttactcttcgtggggcagttttgtactggtggattcataaggactctgattatggtgcgttcggaacttataataataagcacatgaaattttgcttcaggtgcagtgatgctgtctcattaagttattagttattaggttgctgtcttattaagttatcaggtcgcagctgggttgaagcggagcacctgtcttgatttatctcttctcttttctagagagcttctgtcattcgtgtgcccttttatatcattttgctctatcaatgattatcctacaatctgcagtagttttgattccgttttgttctttgcctgctgtactggctcagaagtacggtaatgctcgcaagctttgcggttgttgatttagggactgaaaggatctgtttagaaaggtgtcgatttggagactcaaaaggaacga

SEQ ID NO: 10713 - DNA, 69 bp, Zea Mays
ggatgcacaaaccacatgacggaggagaagaaaatgttcacctcctatgtcaagaacagggattcccag

SEQ ID NO: 10714 - DNA, 109 bp, Zea Mays
tacatcataaaatgtacactctccaagacgcctaagtgagtgagggaggtctaaatgttccttttcttcttctccgtgttcaggcatagaaacaacaacttgccaactg

SEQ ID NO: 10715 - DNA, 51 bp, Zea Mays
cgggtgctcttccggccgctggaccctacctccggctgaaccgattccagg

SEQ ID NO: 10716 - DNA, 1077 bp, Zea Mays
aggaagggggacgcggaggaagatggggctcgcgttcgggaagctcttcagccggctcttcgccaagaaggagatgcggatcctcatggtcggcctcgacgccgccggtaaaaccaccatcctctacaagctcaagctcggcgagatcgtcaccaccatccccaccatcggtttcaatgttgaaactgttgagtacaagaacattagcttcactgtctgggatgtcgggggtcaggacaagatcagacctctttggaggcattacttccagaacacccagggtcttatctttgttgtggacagcaatgaccgtgaccgtgttgttgaagccagagatgagctccacaggatgctgaacgaggatgagctacgtgatgctgtgctgcttgtttttgccaacaagcaagatcttcccaatgccatgaatgctgctgagattactgacaagcttggattacactccctgcgccagcgacactggtacatccagagcacttgtgccacaactggcgagggtctgtatgaaggcctggactggctgtccagcaacattgcgagcaaggcttgaggcctaccttgaatgtcaaccgcgaactgactaggagctccggatgtatcatggaaactcaggacagaatcgcagttgcaacctgttagatgtcttctaccggcactatatatattttttgtttgatgtgtaatgatgttactgttcaacgtttattaccctactatactgttggatgttctttggacctgtttcatttcgcacaaggattggacttccaatatcatgctacattttacattcgtggtaaatacctgattagaaagttagccgaggagatccaatgtcatggtacatggaaatccagattaggttaaacattcttaagtatacagaagactggtaccctagccaccactttttttagcagttgtgtttttttcatttgtctagaattctcaatcctggtgaagcggtgtcattttgatttgattgtaagctttagttgaagtctcgctcactctcggtgcatgaagttttgcattgcaacaatataaaataagctctgg

SEQ ID NO: 10717 - DNA, 621 bp, Zea Mays
acgcaattcagcctagggttttgtctccgctacaccctcctccactcttatataagcctccgccgccgctaacattcctcttcccctcgcgcaccgctcctgagtcctgtccaccctgccaccgccgacgccgcgccgccgcagcaattgtcaccgtcgctatggcccgtatcaaggtgcacgagctccgggggaagagcaagacggacctgcaggcgcagctcaaggagctgaagtctgagctctccctcctccgcgtagccaaggtcaccggcggcgcacccaacaagctctccaagatgtggtgcgcacctcgatcgcgcgcgtgctcacagtgatctcgcagaagcagaagtcggcgttgcgggaggcgtacaagaagaagaacctgctccccctcgacctccgccctaagaagacccgtgccatccgccgccgtctgaccaagcaccagctctctctgaagaccgagagggaaaagaagcgtgagaagtacttccccatgaggaagtatgctatcaaggcctaggtcagaactgtgagatgctgcgcttagcatatcatcggctgtgttttaatttttggtttgtatggacatttgctcgcaaaaaaaaaaaaaaa

SEQ ID NO: 10718 - DNA, 76 bp, Zea Mays
atataatcagagtacttattacatagcggaattcttacaaaataaaagataaatatagatcgaactaaagtccatc

SEQ ID NO: 10719 - DNA, 900 bp, Zea Mays
cgggcgagatattttttgccaagctggcaggcacatgacacatcgccccagccccaagtccaaagccgcgagaggcaggggcgcagcaaaaccctagccgccttcccgtccttttcctttcataaaccccaagccgcgccgcaatagctcgccccctcgttcgccgcctctcctgctcctaccgcagctctccctcaggtttagtgttcgcaatggcggccttcaacaagcttggtggccttctaaggcacagtgctctggtgagcggtatcactggtggctcttctcctgcagtgttcaatgctgcacggctcatgtctaccaagctatttattggtggtcttgactggggtgttgatgacgtgaaactaagagaagcatttagcagctttggagaggttactgaagcgagggtgatcacagacagggagactgggaggtcaagaggctttggctttgtgaactactccgacagtgatgctgccaaggaagctatttctgcaatggatggcaaggaaattgatgggcggcaggtacgtgtcaacatggctaatgagagacctgctgggaaccgtggtggtggcggctatggtggcggcggctatggaggtggtggctacggaggtggtggcggctacggaggtggtggctatggtggtggcagccaaagctatgatgcttgaggggggcaggatcctattaagtgcattatcaaccaagatatttgaaataatgaactttaggacttggtatgacgttttatgttaagcattgtcaggttttgctattcgtgttatgctgaattgttggaactcctagatgcagaatattacgtattggttttggttccttcgagaagtgcaaatgcaagacgcatctattcccattgaaaaaaacaaa

SEQ ID NO: 10720 - DNA, 643 bp, Zea Mays
gtgttccctggccttgatcaacaaacaaccaggtgttcccgatggaggcctgcgacctgcttggtggcgacgcgtgcaacgggcccatgttcccggaggccaagcccgcctcggcggcggcggcggcgagcaggagtgtggtcggggtggacagggactacctgtcctacgacgagccaaagacggtgttcccgggcgaggcgtgcgatgaccttggcggcgagttctgcgaggcgccgtaccaggacggcgtctccaaggagctggcgcacgcctgaagaccctgatccatccatttctgtccaccacgctatgtacgtatgtgtagcagatggtttacatctacgtgttagagcccggagagctggagaagctagctagcgtgcttacagaataacagcagccaagcaaagccaagggtgtgtatataataggcatgccttgggttgtgtcagctgcgactgtatgtatagtttaaaccaagatgaaatggtactgatggtgatattccgtgttttacgatacaaaggctagaaaatagattttgcctggatatcagatagctttcaactaccacaaaatattatttctacctgaaacattgaccgcgttgatttatttcaactactgcacaatattatcc

SEQ ID NO: 10721 - DNA, 60 bp, Zea Mays
taagcagggttcgacctcgcgcgctcctcttacattttagttagactcgctaaccaagtc

SEQ ID NO: 10722 - DNA, 870 bp, Zea Mays
aaacaacaactacttcctagtataaagtgacagtagcgggggagaagggaaccgaaaccaagcaacccaatccaaaccagacaagcaaggaatcccccgatggctcatcgcgttctcctcctcctctctctcgcgtcggccgccgcggttgccgccgccgtcgacgcggaggacccgctgatccggcaggtggttcccggtggagatgacaacgatctggagctgaacgcggagtcccacttcctgagcttcgtgcagcggttcggcaagtcctacaaggacgccgacgagcacgcgtaccggctgtccgttttcaaggccaacctgcgccgcgcgcgccggcaccagctgctggacccgtcggcggagcacggcgtcactaagttctccgacctcacgccggcagagttccgccggacctacctcggcctccgcaagtcccggcgcgctctcctcagagaactcggggagtcggcgcacgaggcgcccgtgctccccaccgatggtctccccgacgatttcgactggagggaccacggcgccgtcggccccgtcaagaaccagggttcgtgcgggtcgtgctggtcgttcagcgcgtctggagcgctggagggtgcgcactacctcgcaactggcaagctggaggtgctttcggagcagcagttcgtcgactgtgaccacgagtgtgattcatcggagcctgattcatgtgattcgggttgcaatggtgggctaatgacgacggcattcagttatctccagaaggccggtggccttgagattcagaacttcagtgttgtgtctgtggacgaggctcaaatttctgctaacctcatcaaacatgggccattggcaattgatgcaatttct

SEQ ID NO: 10723 - DNA, 1428 bp, Zea Mays
caaacggcccgtcaaagggcaaattgcacggaggcgaaggaggagcagcagcagcaggcggcgccgaggagcggcatcccactcagtgcttgcaaccatggctaggggattgaagaagcacttgaagaggctcaatgcgcccaagcattggatgctcgacaagcttggcggagcttttgctcccaagccatcttctggacctcacaagtccagggagtgccttcctctgatcctcatcatcaggaacaggctcaagtatgctctgaactaccgtgaggtcatttctatcctgatgcaacgccatgtacttgttgatggcaaggtcaggactgacaagacctaccctgctgggttcatggatgtcatttccatccccaagacaatggagaactacaggctgctttatgacaccaagggccgcttccgtcttcacccaatcagggatgaggatgccaagttcaagctctgcaaggtgaggtctgttcagtttggccagaagggcatcccctacctgaacacctacgacggccgcaccatccgctaccccgacccgctcatcaaggccaacgacaccatcaagatcgatctggagaccaacaagatcatggacttcatcaagtttgacgtcggcaacgtggtcatggtgaccggcgggaggaacaccgggcgtgtaggtgtgatcaagaacagggagaagcacaagggcggcttcgataccatccacgtcgaggactccatgggccaccagttcgccacccgcatgggcaacgtgttcaccatcggcaagggcaacaagccgtgggtgagcctgcccaagggcaagggtatcaagctcagcatcatcgaggagcagaggaggcgcgactttgctgcccaggctgctgccaaggcataagttctctgaatgtgctgcttggagctttttgctatgtctagtttaatttttatctgcaaggatatagagctaccttcccaagactttatcatcatgttttgttgcttttggttcttgaacagcgtttgcagcttagctgtaatgctttaattcgactttctatatattgttgaaccgtgttgtcgacaccatgacagcttgttttgcttctatgtttttgcttgagctacggtggttgtttggaatcttgtatggtggtttgttgtaattctgtcaatcggatcaggaactggccacggcactggatgccactaaccacgtccgtggtggtaccagacgccaatgaccatgctcttgttttgtccgagttggggctggtgctgctcgtctgcgggcgtcctggagaaagccagcgcgtcgtccgcggcaggtgctgaatgactgactgaggagcccggagcgtgttcatgcaagtttgcactggatcttttttttcaatcacaatgtactgtggtagtcgaactcctccatcc

SEQ ID NO: 10724 - DNA, 82 bp, Zea Mays
ggtacgctagctgagaatcgtgcgaagcgaagggtgtggatcaaaacaacccacaagacgatgtcgaccgatgagcctgaag

SEQ ID NO: 10725 - DNA, 1621 bp, Zea Mays
cataagatattgccatctccacgtgacacacaggccccccgtggatgtctctagagcgggacccttcccttcgtattccagccaagcagaacgcaggaatctccttcccacggatcactctgccacgatccgcgtgctcacccgcaaaactaatccacaccgtccgtcctcctccaatccaacgcacgaaacctcatttccctcacgaagtccccgctgctgttccaaaatttcactctctctcccgcccaccacccgtcccttatttaatcaccccgcctccgcactcaatctcacaccgcaatcttcaatctccccagcaatccctagcagaagccttccatcctcactcgctcgatggcccgcacgaagcagacggcgaggaagtccaccggcggcaaggcgccgaggaagcagctggcgactaaggcggcccgcaagtctgcccctgcgaccggcggagtgaagaagccccaccgcttccgccccggcaccgtcgcgctccgggagatccgcaagtaccagaagagcacggagctgctgatccgcaagctgccgttccagcgcctggtgcgggagatcgcgcaggacttcaagaccgacctacgcttccagagctctgctgtctccgcgctgcaggaggcggctgaggcctaccttgtcgggctcttcgaggacaccaacctctgcgccatccacgccaagcgcgtcaccatcatgcccaaggacatccagcttgcccgccgcatccgcggggagagggcctaagcgtcatattttctgtcatcagtgcccgatcagaagatgtagagatatgctgggttctgtagtttgggttactgtcgaatcatcgagtgttggctgttcactgctgtaacttaattatcatgatgcatatgaaatggcaatgaactctgttatcagttctcgaattttccgtttggatcccttcttgttcctctgtgcataatcattttatatttgtggggataacgggatgaatggtgagaaggatgaatcagcgttcaggccgagcgttctttcacaagtggtcgtgtaggcgtgctgggctgtcaactgggcccactggcaggctaatcttccccttgtgaatcgtcttgtactgttctcgtgctaggcagtgggctgcgaccgaatccaacataagaggaaaggggcgtttgctttatattcgttctaacctgcgatctccgtccatccagccgagaggtcgtgtgcgcgtggatctctgcgtggaagcgatgaagattacggcgctcctggtgctgaagccgtcgacctctggagccgggagctcctcgtccggcggcgagtcgggcccggaggcggtggtgctcgcgaacgcgatagacgtcagccacttcggctacttccagcgcagcgccgcccgcgagttcatcgtcttcgttgcccgcaccgtcgctcagcgcacccagccaggccagcggcagtccgtccagcacgaagaatacaaggtccactcccacaatagaaatgggctttgtgcggttgcattcatggatgatcattatccggtacggagtgcattttctcttctgaatcagtccctttatgagattcagatattgatatggtgggt

SEQ ID NO: 10726 - DNA, 65 bp, Zea Mays
ggggttaaaaacatgagtccacctaggtagctgagcattaagggcagaaaatttgcagaaacggt

SEQ ID NO: 10727 - DNA, 64 bp, Zea Mays
ccctgcacgcccatctcctgttgctccagctcccgcgcgccctccgctctgttgccgcgtgcgc

SEQ ID NO: 10728 - DNA, 58 bp, Zea Mays
atttgtatgacaacaaatgcaacagaacccatctggtatgcgatgctggtgtccacct

SEQ ID NO: 10729 - DNA, 323 bp, Zea Mays
cacccgccgctctagtcccactccccgccgccgccgccacttgctcgcctttgccccttctgtctcccttcgtccgtagcagaccaggaacgcccaaggcgctagcgtctccaagatggtgctgcaaaacgacattgacttactcaatccaccggcagagcttgagaagctaaagcacaagaagaagcggctagtccagtcccccaactccttcttcatggatgtcaagtgccagggctgtttcagcattgggtgtgcaaacagtattttggtcaaattcagctgatgttccaaagaggttgagtgatcacgcacctagcaaa

SEQ ID NO: 10730 - DNA, 468 bp, Zea Mays
tggagaacggctggagagcttgtcggaggctgagctgcaagctctgctcgagcaagtggaggaggagaagcagcgcgtgcctcaggtcccggaagagcctaacgctattaccttcaggaagaaatgatgatcgttctattatctgccaaatggacaccgacctagcttgtttatagcatagcttcgccttcaatagctagctccatcgatattttaagatctgtacaatacgccccgctaagccactagtgctgtcaaacatgaaattatccattttctgccgcgcgccgttatgggacaataccgtagcaccaagaaccaaatccgttctttgagatatcattgtcgttgtaactatatcatccgcaaagctacagtttgggaggtcttcagcattgcctgtttgatcttccattggttcgtttccttgcgttatgatcacgattacataagccaggcaaacactac

SEQ ID NO: 10731 - DNA, 52 bp, Zea Mays
gcattttgctacgttcttaatcgatgcgagagccgagatatccgttgccgag

SEQ ID NO: 10732 - DNA, 65 bp, Zea Mays
agaaaaaaaccaaaaaaaaaaaaaaaaaaaaaaaaaaaaaaaaaaaaaaaaaacccaacagcacg

SEQ ID NO: 10733 - DNA, 62 bp, Zea Mays
cgatgatgactgcattcaagatgacttcaacctttgtggcctcagcagccaagttcctgatt

SEQ ID NO: 10734 - DNA, 720 bp, Zea Mays
cattttagtgtgcttgtccttttctatgatagatactgatttcaaaaaaaattgattcatacccgtgccaaccgaccaaattgccagatacacgattacaaagcgaatgtaatatactggttttgacagctcgccgtgtccacaaagtgtgacgcacaaatactcccaccacaaagatatacaatacaagcatacaagcagcaatctgcatgcctcactcaacaccaacagcacacaacccaggtagcacagcctgtggcttccccctgcccatggtgaaacccctggtgccatcaggcatgcgggggcctggtggaagcttgttggccccaataggcagctgcggatgcggctcaagcttggttatcaggttatgcggtgtagtaccaacagagtgaaggctgccacggttcccaccaaggtggttgttgccatggttattgtactgcggctggttgttctggtggtgctggttattgtgatggtgattgttatattgatggttgccacgcccatgccctctgccaccgcgaccgcgccctttgccgcgcttgggaacttccttgttgaaattctcatcaaacttgttccggcagtacatctaacagttgagaggattgttcaaactgtttctcgttagaatggttcaaagtggagacatcctcctcactatttccatcagtttcattcattccgttttttcctttgcctgcccccgtg

SEQ ID NO: 10735 - DNA, 730 bp, Zea Mays
ggacggctgccaccgcggcccggatgtttccctgccaccataaatgcgccgcggccgtcctcgctgcccaacccttcgctgcgccgccgcctccgacatcgtctcttcgtccccacgagcaaccgataatccgccggcgctgagatgttggtttatcaagacctcctatctggcgacgagctcctgtcggattcattcacctacaaggagctcgagaacggcgtcctgtgggaggtcgagggaaagtgggtcacccaaggtcctgttgatgtagacattggtgccaatccatccgccgagggtggtgaggatgaaagcgttgatgacacagccgtgaaggtggttgatattgttgacacattccgtctacaggagcaacctccttttgacaagaaatcatttgtctcttacataaaaaaatacatcaagaatctcactgctgtgttggagccagagaaagcggatgagttcaaaaagggtgtcgagggtgcaaccaagtttctccttagcaagctgaaggaccttcaattttttgttggtgagagcatgaaggacgaagcgtccgtggtattcgcctattacaaggatggtgccactaatccgacattcctctatttctctcatggtcttaaggagatcaagtgctagattagttacccatgttgggtactatatatgttctattgttatagccacaactatagctgccctgcctgaactgaactcaaac

SEQ ID NO: 10736 - DNA, 71 bp, Zea Mays
tgagcacttagactgtcttcagcggttacccctaaatttctccccctatatcccactcacgtgccacgtca

SEQ ID NO: 10737 - DNA, 56 bp, Zea Mays
aactccgagaacttagggtttccggagtcaacagtgaagttcaaagagcaaggggg

SEQ ID NO: 10738 - DNA, 59 bp, Zea Mays
gtactgttcatctatttataggcatagggcgtagcctatgtgaaattacattcatgccc

SEQ ID NO: 10739 - DNA, 1236 bp, Zea Mays
agtcacttcactggtcaagcattcctatccacctcggcccacctccacctccctgacagtcattttgttatataaaacccatcaagctcccctgcaaggagatacagaaccctgcaactgcaagctaaggagagtgtgatcaccaacagctagtgctagtcccccttccttccatccatccatggcatgcgtcagcaccttccagagctgccccattgccagaagagcaaagatcaacaccaggtccaggggcagcagcagtagcgtggcgaaggggtcaccaccaccagccttccagttccagtgcagggcgtcgactttcgcggcggacaccagcctccggctcgagctggacgagaaccccgaggcgatcatctcgggggcgtggcccgggaactgctccctcctcagctacgacgacctccgcgcctacctcgagtcgcaggagacggcggcccaggcagacgatcagcgcggcgtggcgctcctgagcgagaccatgtccacacccgtgctggtggccacagcagaccagaccctggaggacgtcgagtgccacttcgaggccgtgtcggggcttccggtcgtcgacagcggcctcagatgcgtcggggtgatcgtcaagaacgaccgggcaagagcctctcatggggtcagcacctcgctcctctccctccacctctttctttctcatggggccagggccatgcatgcgcatcaagctgctagtttctcatagacaggcaaataagaacgacgtacgtccgttcagtttaccggtctgtttctacttgtgacagtccaagacgaagatatcggaagtgatgacatctccagctatcacactatcgtctgacaaaaccgtgatggatgctgctgttctcatgctcaagaagaagatccacagattaccagttgtaaaccaggacgaaaaagtaataggtacggtatagttacccgcgctgatgttcttcgcgtgttggaaggcatgttgaagatttaggagcgcagatacccatgctcggaagccacagcctcttgtaaatatgtagatgtgcccgggcatggtgtttctgagtagcagcaaagagatctaccatgtataggagtttctccttgtaaataatagtagcacgccaggagactccatcccaggttccgtactgcttgcgcgaccagatgctgtaaactagccagatacttgaagaccaatataaatggatatgtctaaagtaa

SEQ ID NO: 10740 - DNA, 56 bp, Zea Mays
tttagtttctaatatattttttttttttttttttttttttttttaattataaaata

SEQ ID NO: 10741 - DNA, 264 bp, Zea Mays
taatcttacaccttggttggacggaaggcatgtcgtgtttggccaggtcctggaagggatggatgtcgtaagtctgatcgagtcgcaggagaccgacagaggtgaccgcccgaagaagaaagtagtcatcagcgagtgtggggagcttccagtggtctaagtgttactcatctgttgtcggtcttacctaacctcggatggatggcgatatttcccccacctgaacttgtcgtgctaccctccccctccccacccccctaccct

SEQ ID NO: 10742 - DNA, 60 bp, Zea Mays
cacggacacctgcgttatcttttaacagatgtgccgccccagccaaactccccacctgac

SEQ ID NO: 10743 - DNA, 948 bp, Zea Mays
ttttttttatgaaaactgactaacatagcaaggttcaaatcaaataataataatgggtaaacgccgagacatgataatctggaacaattccatatcagacaataacttggaagacagccccttccactgggcaaaggcgcaaagctgataatttgttactatctccttgcaagttcaacatcaggcctgcacatttcgcagccaacacaacagtttatctgactgctagttcatcaggtttagactagtaaccacccctcagagcaaggacaagatggaggacagatccaccctcgatgttgtagtcctttgcggtcttgtcatcagcaagctgcttaccagcatagatgagcctgcaaaggcgaccaaagtagcttcatcagcaccagacgccaggaaagcataactggtttcaagtagaatgagcattccgaagaacaaatagtaacagttgcagatataacaaaaaaaatcagcatggtacctttgctgcacgggaggaatgccttctttctcttcaacacgctccttgatcctgtcaatcgagtcagtgggttcaatgtcgatctcgatctctttcccagtgagagttttgaccttgatcatggttccacccctaagcctgaggaccaaatgaagagttgactccttttggatgttgtagtcagccagcgtgcgtccatcctccagctgcttgccagcgaatatcagtcgctgttgatctgggggaatcccttccttgtcctggattttggctttgacgttgtcgacggtgtcgctgctctccacctcgagggtgatggtcttccccgtcagggtcttcacgaagatctgcatcttctcctcgcctcttcctccctcgcacagtcgtactagacggtgacgaactcgaaccttgtgacaacgaagccgaagaacgcccaagaaaatttcctttttctttaattt

SEQ ID NO: 10744 - DNA, 2360 bp, Zea Mays
ctcatcagggaggcttgtctctgtgggctggttctaagcgtaagcgggccggccagcacttatgccgccgccaatcccttcccgtgctccgcaaccgctgagtgagaagaagagatggccggcaagggcgatggcccggctatcggcatcgatctcggcacgacgtactcttgcgtcggcgtgtggcagcacgaccgcgtcgagatcattgccaacgaccagggtaaccgcaccacgccctcgtacgtcgccttcaccgactccgagcgcctcatcggagatgcggccaagaaccaggtcgccatgaaccccatcaacaccgtctttgatgccaagcgtctcatcggcaggaggttcagtgatgcgtctgtccagagtgatatcaagttgtggcccttcaaggtcatttctgggcctggtgagaagccaatgattgttgtccagcacaagggtgaggagaagcagtttgcagctgaagagatctcctctatggttcttatcaagatgcgtgagattgctgaagcttaccttggtagcacgatcaagaatgctgtggtcacagtccctgcctacttcaatgactcacagaggcaggccacaaaggatgctggggtgattgctggccttaatgtgctgcgtatcatcaacgagccaacagctgcagctatcgcctatggtcttgacaagaaggctaccagtgtcggtgagaagaatgtcctcatctttgatcttggaggtggtacctttgatgtctccctcctcaccattgaggaaggaatctttgaggtcaaggccacagctggtgacacccatcttggtggtgaggactttgacaacaggatggtcaaccacttcgtccaggagttcaagaggaagaacaagaaggatatcactggcaaccccagggctctccggaggctgaggaccgcttgtgagagggcgaagaggactctgtcttccactgcccagaccacgattgagattgactcgctgtatgagggcatcgacttctactccaccatcacccgtgccaggtttgaggagctcaacatggacctgttcaggaagtgcatggagcctgttgagaagtgcctgagggatgccaagatggacaagagcaccgtccatgacgttgtacttgttggtggctccactaggatccccagggtgcagcaactgctccaggacttcttcaacggcaaggagctgtgcaagaacatcaaccccgatgaggctgtcgcctatggtgctgctgtccaggctgccatcctgagcggtgagggcaatgagaaggtgcaggacctgcttctgctggacgtcacccctctgtccctgggtctggagactgctggaggagttatgacagtgctgatcccgaggaacaccaccatccccaccaagaaggagcaggtattctccacctactcggacaaccagcccggtgtcctgatccaggtctacgagggtgagaggacccggacacgcgacaacaacctgctgggcaagttcgagctctccggcatcccccctgcaccccgtggtgtgccacagatcaccgtgtgctttgacatcgacgccaacggcatcctgaacgtgtctgccgaggacaagacaacggggcagaagaacaagatcacaatcaccaacgacaagggccgtctctccaaggaggagatcgagaagatggttcaggacgctgagaagtacaagtctgaggatgaggagcacaagaagaaggtggaggccaagaactcgctggagaactactcctacaacatgcgcaacacgatcaaggacgagaagattgcgtccaagctgccggccgatgacaagaagaagatcgaggacgccatcgacgcggccatcagctggctggacgccaaccagctcgccgaggcggacgagttcgaggacaagatgaaggagctggagagcctctgcaaccccatcatcgccaagatgtaccagggcgcgggtgaagacatgggcggcgctggcggcatggacgaggacgcccctgccggcagcggcggccctggccccaagatcgaggaggtggactaagcggtttgttgtcagtcttgagtgtgctgcagttgctggctggcccagttgctgccgagagttatcgtcagttggtgcggtgtgtccgcttaaactttatttgtggttggttggtacttttgtggtggttatttttttggacctcgtgatagtcggtcggttcaatgttatcgcggctactggcaaaccttaagtgatacggtattcttcttttcactaaaatagaataaaacatagagactaaaacttagtctctagaaaccaaactgttacaagatctaagcagttactcccag

SEQ ID NO: 10745 - DNA, 56 bp, Zea Mays
caccagaaaataaaaaaaaaaaaaaaaaaaaaaaaaaaaaaacacatgaagaaggg

SEQ ID NO: 10746 - DNA, 70 bp, Zea Mays
gtgtgtctgtgtgtgtgtctctgtgtgtctgtgtgtgtgtctctgtgtgtgtctgtgtgtgtgtttctgt

SEQ ID NO: 10747 - DNA, 50 bp, Zea Mays
tacgagtcacttgaagagcaagttggtacctacaatctcaagtttcaggc

SEQ ID NO: 10748 - DNA, 924 bp, Zea Mays
cgggcgagatattttttgccaagctggcaggcacatgacacatcgccccagccccaagtccaaagccgcgagaggcaggggcgcagcaaaaccctagccgccttcccgtccttttcctttcataaaccccaagccgcgccgcaatagctcgccccctcgttcgccgcctctcctgctcctaccgcagctctccctcaggtttagtgttcgcaatggcggccttcaacaagcttggtggccttctaaggcacagtgctctggtgagcggtatcactggtggctcttctcctgcagtgttcaatgctgcacggctcatgtctaccaagctatttattggtggtcttgactggggtgttgatgacgtgaaactaagagaagcatttagcagctttggagaggttactgaagcgagggtgatcacagacagggagactgggaggtcaagaggctttggctttgtgaactactccgacagtgatgctgccaaggaagctatttctgcaatggatggcaaggaaattgatgggcggcaggtacgtgtcaacatggctaatgagagacctgctgggaaccgtggtggtggcggctatggtggcggcggctatggaggtggtggctacggaggtggtggcggctacggaggtggtggctatggtggtggcagccaaagctatgatgcttgaggggggcaggatcctattaagtgcattatcaaccaagatatttgaaataatgaactttaggacttggtatgacgttttatgttaagcattgtcaggttttgctattcgtgttatgctgaattgttggaactcctagatgcagaatattacgtattggttttggttccttcgagaagtgcaaatgcaagacgcatctattcccattgagtgaatacaggactaccacatgaaaaaaaacaaa

SEQ ID NO: 10749 - DNA, 52 bp, Zea Mays
cttgggttttctttttttttttttttttttttttttttttcattcctttttt

SEQ ID NO: 10750 - DNA, 59 bp, Zea Mays
agttatttctgctgcaacaaaaactatggttactacttttaaactccgattgttgtaat

SEQ ID NO: 10751 - DNA, 841 bp, Zea Mays
gctggccggcagtgaggtgcgcctggagaaggtggcccccgtagagcctggttacttcggcccggcccattatgtcatcaaacagatccgagccgtccgattcaggttattcctcgcgacacatccatttatacccctgccgccgccactcccattcttctctttctcttagactatctgccgctccagcctttcgctagggtttatccaccggcggcgcgcgcgacggcggcaagatggtgcagcgtctgacctaccgcaagcggcacagctatgccacgaagtccaaccagacgcgggtcgtcaagacccctggtggcaagctcgtgtaccagtacaccaagaagagagccagcgggcccaagtgtcccgtgaccgggaagaagatccagggcattccccatctgaggccagctgagtacaaaaggtccaggttgtctaggaaccgcagaactgtgaaccgtccctatgggggagtactatctggaactgcagttagagaaaggatcatccgtgctttcctggttgaagagcagaagattgtcaagaaggtgttgaaattacagaagaccaaagacaagacttcctcaaaaaagtaactctgaaacagaagtgagccactcttctgcagcaagggaagacatttttgtcgacagttattatcaatggcttagtctcttctagctgttctattgttcttgtatcttgagcggacaactggtttctagggcaccttgaaatctgtctacgagatctctaagattatgagatgacatatgaccccctattgcttttgttcactttgctaaaactgaaagtccgagttcacatgaaaaaaata

SEQ ID NO: 10752 - DNA, 57 bp, Zea Mays
gccttggacggagtttaccgccggatttgggctgcattcccaaacaacccgactcgt

SEQ ID NO: 10753 - DNA, 109 bp, Zea Mays
ccgcataattctccagaagtccttgtttgcttagagctgccatgtcccgactaacagaggagatgtaatgtccttgaagaagatccatggcatcctatattaggcaaca

SEQ ID NO: 10754 - DNA, 69 bp, Zea Mays
aaaaaaatttttttcttaaaaaaaaaaaaaaaaaaaaaaaaaaaaaaaaagagaggggttttttttttt

SEQ ID NO: 10755 - DNA, 385 bp, Zea Mays
ctgatgacgatgatgatctgattgagtagaaaggatcatgagtcttggacttgagcaggagttgtgccttgcacgatttaagttgttctagggtggactctctcttgagttatcattgtctggatcatttttttctccttggacttgttgcaacttttgagtgtggaaatggattggaatagtcgccatgaatttgctggctactttatacatgtctttgttcataaaccttgttttaagatgaagttgtggcaatcctcttagtgctaatataatgttctattgtcagctgtacaatgtagaaatgcttctatcttttttttttcgtgcacgttccaggtgtatttttaggtttagggcttagtgtatctaaactagcgcttag

SEQ ID NO: 10756 - DNA, 1004 bp, Zea Mays
gagtgccagcgtcacggagagcctgcacttgaggacaagaccaagtcgtggaagaagctagtgaatgttgctgtgtcaggcgcggccgggatgatatcaaatcacctgctgttcaaactcgcttctggtgaggttttcggacaagaccaaccaatagcacttaagctactcggctcagaaagatcgtttcaagccctcgaaggtgtagctatggaactggaggactcgctgtatccactgctgagggaagtcagcattggcatagatccttacgtggtctttcaagatgtagattgggcccttcttattggcgctaagccccgaggtcccggcatggagcgagctgcgctactggatatcaatggccaaatctttgctgaccaggggaaagcacttaatgcggtcgcctcgcggaacgcgaaagtcttagttgtcggaaatccctgtaacactaatgcgctgatttgtttgaaaaatgccccaaacataccggcaaaaaactttcatgcattgacgaggttggatgaaaatagagcaaagtgccagctggcactaaaagcaggtgtattttatgacaaagtatcaaacgtgactatttgggggaaccattcgacgactcaggttcctgatttcttgaatgccaaaattgatggaagaccagtgaaagaagtcattaaggataccaagtggttagaggaagagttcaccctcacagttcaaaagcgtggaggtgtgctcatccaaaaatggggcagatcatcagctgcatcgaccgctgtttcgatagtggatgctattagatccctcgtaactcctaccccagaaggtgactggttttctacaggggtttatacgactggaaatccttatggcatagcagaggatatcgtgttcagcatgccatgcagatcgaagggtgatggtgattacgaactagctagtgatgtgttgatggacgattttctctgggaacggattaaaaagttgaccctgtaatattttca

SEQ ID NO: 10757 - DNA, 682 bp, Zea Mays
gcagtcgcgagtaaagaacaacagcaggccaccgctgctataaaaccctccgcctccaccggcggctcgccaaactccgtttcgaattctagggttttgctgctctccgaccccgagctccgaaggccgcagcatcaggcgcggcccccctcgcgtgtgaccgagatggcgctgccgaatcaggggaccgttgattaccccagcttcaagctcgtcatcgtcggcgatggtggaactggtaaaactacatttgtgaagaggcatctcactggagagtttgagaagaaatatgaaccaaccattggtgtggaagttcatccgttggatttcaccactaactgtggtaagatcaggttctactgctgggataccgcagggcaagagaagtttggtggcctcagggatggatactatatccatggccagtgtgcgatcatcatgtttgatgtaacctcaaggcttacttacaagaatgttcctacgtggcatagggacctgtgcagggtctgtgaaaacatccccattgtcctctgcggtaataaggttgatgtgaagaacaggcaggtcaaagccaagcaggttactttccacaggaagaagaatctgcagtactatgaaatttctgccaagagcaactacaactttgagaaacctttcctgtaccttgcaaggaagctggctg

SEQ ID NO: 10758 - DNA, 94 bp, Zea Mays
gctgtgttcagcggttacccctaaatttctctccctatatcccactcacgtgccacgtcagcgttctcttccccctatatctccaccctgtaca

SEQ ID NO: 10759 - DNA, 50 bp, Zea Mays
gatttgggctgcattcccaaacaacccgactcgctgacggcgcctcgtgg

SEQ ID NO: 10760 - DNA, 51 bp, Zea Mays
acttgccttcaattagctcctactcagcagtctccacctactgaacccctg

SEQ ID NO: 10761 - DNA, 71 bp, Zea Mays
ccggggccggggctggaagccgcgtccgccatggggccgaggccggggccgcgcctgcgagccgccgggcc

SEQ ID NO: 10762 - DNA, 53 bp, Zea Mays
cttctcttttttttttttttttttttctttttttttttttttttttttttaac

SEQ ID NO: 10763 - DNA, 54 bp, Zea Mays
ataccacggtgttttacttgctttttctcaatctcgtttgcgaggaatctccac

SEQ ID NO: 10764 - DNA, 125 bp, Zea Mays
gcctgaagaaagaagttttggtaacttattgatgcgagagttatggtttcattttgtataggtacaccttcttttgcttcaattgcttgatggagaccatcactccatcgcctgccctgccaaaa

SEQ ID NO: 10765 - DNA, 841 bp, Zea Mays
cggctcctacgccttcgtcctcttcgacaagtccaccaactccctgctagtcgcatccggtgccgctcttctgggggatcaccgccgacggctgcgtcgccttctccgacgacatcgacatgctcaaaggctcatgcggcaagtcgctcgcgccgttcccgcaaggctgcttctactccaacgccctcggagggctcaagtgctacgagaaccccaagcacaaggtcaccgctgtccccgccgacgaagaagagatctgcggtgccactttcaaggtggtggaaggctctactgtcctgacggcgctgcactgatcggtcatcagctggcggaggcgatgcgatgatgatgcagaactttgtacatgcgttggtggatggtggtgtaacatagtggctgccaacaagtcatgctcatgcaaaccgatgaatctatctctgtatcatcgatctcggttgcttgctagtccagactccagacatggctatatatatatagctggtgctaataaataggagtataatcgtcatatcgatcggttgcgtgtggaatgccaatcatgtgtgtaatctgttggcaaataacaaacctctgttcctccctgctgctgttgtccgtgcgatcatgattcagaactggcgtgggcgccaataactcagaagagagacttgctgtatatgcatgctagtatgcattgtccctctcttgtcaatgcttgtaatcgaactttattatgaaaaccaaaacgagaatccaaccaaataaacactggttattttgtccaactctaaactagcaaaactgagactgagaatatacacacacaaaaaaaaaactctcg

SEQ ID NO: 10766 - DNA, 56 bp, Zea Mays
gtcggatggtcgggtggggtcctcggtgggcctagcttagggtgtgccagggccca

SEQ ID NO: 10767 - DNA, 59 bp, Zea Mays
caggaaagtggttgcagaaaagaccccggatgaaggggagacattgaagatcactatcc

SEQ ID NO: 10768 - DNA, 68 bp, Zea Mays
ataccttaatctcagttccagggagcagatccttgatcttctcaatccgggaggtacaggtttcccta

SEQ ID NO: 10769 - DNA, 75 bp, Zea Mays
agctggtaaaggtcggcttgtaaggttgtagccagttcagcaaccgtagcgttttcacttgatacaacgaataca

SEQ ID NO: 10770 - DNA, 57 bp, Zea Mays
ggagggttgggctttgccgaggcaaggctgacccttccttgatggttagaatttatt

SEQ ID NO: 10771 - DNA, 69 bp, Zea Mays
gtaaaaaaaaaaaaaaaaaaaaaaaaaaaaaaaaaaaaaaaaaaaaaaaaaaaaacaacacccgaagcg

SEQ ID NO: 10772 - DNA, 1913 bp, Zea Mays
acatggaatgagaggcaaacacgggcccaggaacggcccacgggagagagaaaccctacccttcccttcgcggtggtggcatccgagacccgtccacaaccaccacagacacggtgcaacccccccccccccccccccccccccccctcttaaaagccgcctctcgccgccgcccgcaaaccctcatttttctctctcctgcgccgcgacgtccctcgccttcgccgccgaatccgagactccgatctcgggttcaccgcagcgcacagagcagccccgactcccggcccgatccgcgctctcctctccgtcgcttcagtcatggcaggaatggcacctgagggttctcagttcgatgctaagcactatgattctaagatgcaggagctgctgagcaccggtgagactgaggagttcttcacttcatatgatgaagtttttgagagttttgatgatatgggcctccaagagaatcttctgagaggcatttatgcttatggttttgagaagccatctgcaattcagcagagaggaattgttcccttctgcaagggtcttgatgtcattcagcaagcacaatctggtacaggaaagacagcaaccttctgttctgggatcttgcagcagctggactatggcctggttgaatgccaggccctggtccttgctcccacccgtgagcttgcacagcaaatcgagaaagtcatgcgcgcgcttggtgattaccttggtgttaaggtccatgcatgtgtgggaggaacatccgtccgtgaggaccaaaggattcttggcagtggtgtgcatgttgttgttggtacacctggtcgtgtgtttgatatgctgcgcagacagtccctccgccctgataacatcaagatgtttgttctagatgaagctgatgaaatgctttctcgtggtttcaaggatcagatttacgacatcttccagcttctcccagccaagattcaggttggagtcttctctgctaccatgccccctgaggcccttgagattacccgcaagttcatgaacaagccagtgagaatcctcgtgaagagagatgagctgactcttgagggtatcaagcagttctatgtgaatgtggataaggaagactggaagctggacacactgtgtgacctgtacgagacccttgccatcacccagagtgtcatctttgtcaacacccgccgcaaggtggactggctcactgacaagatgaggagcagggaccacactgtttctgccactcatggtgacatggaccagaacactagagacatcatcatgagggagttccggtctggctcctcccgtgtgctcatcaccaccgacctgcttgctcgtggtattgatgttcagcaggtgtccctggtcatcaactatgatctccccacccagccagagaattacctgcatcgcattggtcgtagtggtcgtttcggtaggaagggtgttgccatcaactttgtgacccgcgacgacgagcggatgctgttcgacatccagaagttctacaacgtgttgattgaggagctgcctgccaacgtcgctgaccttctgtgatcattttgaagaaaaacagaactaaaagaacggtggtgggggtgatctggtaaggcttggttttgccgaaatattgtgggggaggagtgataaggtcggtggggtttctatgttaaagtcgtggtctcgggcaatatgcgatttttctttatgccatgttttgggaaattttgtagctgcctaggcctcgtgctgttgtggtggttcattagtatgaagacgaaggctctgctggctatgggagtcctttttctttttgttagtattttgtttaaaactatgtatgaccgaattatttgtcatccttgactcaattctgctgcaaccagttgtatcaaaaataaaaa

SEQ ID NO: 10773 - DNA, 583 bp, Zea Mays
gatcctccatcacaaaaaatcccctcccattccccaccccaccctagcgcgaggccgtagtacgaatccagcggcggagtacgtccacacgaaatccagagagaggggataaggttccggggccagccaaagccatatcgtggtgcagccactggcgcgccgccacgtggggcggcggtggtcacacctgcgctccgtcccggcattatcgccagggcttggcgccacagctagtatattggctagcttttggctcggcagctaacgacctgcagccaaccatctaccagcgactcagcgagcgagagcagcacacactgcacgcagctagctaggagcagcagcagcggcggcgatggcggcctccatgatctcctcgtcagctctggcggtggcgcctcagggcctgccgcccctcggccgccgcgcctcctccttcgccgtcgtctgctccaagaagaagatcaagaccgacaagccctacgggattgggggtggcctgaccgtcgacgtcgacgccaacgggagaaagggcaagatcgatcgatggagctgaaattacgtggtggggatgcgattatgc

SEQ ID NO: 10774 - DNA, 633 bp, Zea Mays
cgatgcggtcggattgtggggttgcgcataagaaactttaggcgagcagtcgacggccatgggtctgcgaaggtgcccttgtggaaagatccgttgagcccgagcaagtggaaggaagagcactttgttctagcaagcctctcaatgtggggggttattttttatggtggttacaagctttttagtggaaagaaggaagccaagactgaggcggcatcaccacaggcataggtggcggagatggagttatacccgtatctgtggcctggcaacaatgttaaataaaaggaatgctttatgttgtgctttcaagttgataaattgtggcaacaggagattttgctttacgtaggcaatatattgagaagctactcttactcatccaccatgaataatctttgctgcagtggagcttcatgtcggcgaacaatgcaaacgttgtacttctttcatgcgattgagtagttgatgttttacttctgttgccaccaacagttgaacgctgtacttgcagattgataagatctccgtgctttctagtttgcgttgttactgatgaatttagcaaacgttttattggtggtattatttgaaaattggagtattggtagggatgaaaacggtcggaaacgg

SEQ ID NO: 10775 - DNA, 1423 bp, Zea Mays
cttgcgattgccgccagcagtagcagacacccctctccacatcccctccggccgctaacagcagcaagccaagccaaaaaggagcctcagccgcagccggttccgttgcggttaccgccgatcacatgcccaaggccgcgcctttccgaacgccgagggccgcccgttcccgtgcacagccacacacacacccgcccgccaacgactccccatccctatttgaacccacccgcgcactgcattgatcaccaatcgcatcgcagcagcacgagcagcacgccgtgccgctccaaccatctcgcttccgtgcttagcttcccgccgcgccatggcgtcgaccaaggctcccggccccggcgagaagcaccactccatcgacgcgcagctccgtcagctggtcccaggcaaggtctccgaggacgacaagctcatcgagtacgatgcgctgctcgtcgaccgcttcctcaacatcctccaggacctccacgggcccagccttcgcgaatttgtccaggagtgctacgaggtctcagccgactacgagggcaaaggagacacgacgaagctgggcgagctcggcgccaagctcacggggctggcccccgccgacgccatcctcgtggcgagctccatcctgcacatgctcaacctcgccaacctggccgaggaggtgcagatcgcgcaccgccgccgcaacagcaagctcaagaaaggtgggttcgccgacgagggctccgccaccaccgagtccgacatcgaggagacgctcaagcgcctcgtgtccgaggtcggcaagtcccccgaggaggtgttcgaggcgctcaagaaccagaccgtcgacctcgtcttcaccgcgcatcctacgcagtccgcccgccgctcgctcctgcaaaaaaatgccaggatccgaaattgtctgacccagctgaatgccaaggacatcactgacgacgacaagcaggagctcgatgaggctctgcagagagagatccaagcagccttcagaaccgatgaaatcaggagggcacaacccaccccgcaggacgaaatgcgctatgggatgagctacatccatgagactgtatggaagggtgtgcctaagttcttgcgccgtgtggatacagccctgaagaatatcggcatcaatgagcgccttccctacaatgtttctctcattcggttctcttcttggatgggtggtgaccgcgatggaaatccaagagttaccccggaggtgacaagagatgtatgcttgctggccagaatgatggctgcaaacttgtacatcgatcagattgaagagctgatgtttgagctctctatgtggcgctgcaacgatgagcttcgtgttcgtgccgaagagctccacagttcgtctggttccaaagttaccaagtattacatagtgtatttgctggcgcag

SEQ ID NO: 10776 - DNA, 69 bp, Zea Mays
tcaacggcccagattcgagataggcgaaggggtatgtttcgcctaatcctgatcgtcgtttgcgaatct

SEQ ID NO: 10777 - DNA, 57 bp, Zea Mays
aaatttataacaaaaaaaaaaaaaaaaaaaaaaaaaaacaccccccccccccccctt

SEQ ID NO: 10778 - DNA, 726 bp, Zea Mays
atgtgaacaaggtgttttgttttctgctcgaaaaggaaccccagccgattgattgggagtactacagaaaaggaattggatcaaaagtggtggatatgtacaaagaggcttttgaaagcatcgagatcccgaagtacgtcgacacagttactccccagtacaagccaaagtttgatgctgtgattgctgaattaaaggaggctgagaaagagcatcagaaggagtcagaaaggatagagaaggaacttgctgaaatggaggaaatgaggaaaaagatcagtacaatgacagcagatgattactttgagaagtaccctgaactcaggaagaagtttgacgatgaaatccgtaacgataactggggatattgaagagattggagagaactcttatgatgccatttccatgtccgtgaagaaccaataattttcctgtgccctgaattgggtggtttccatagcatgtgcacggggtttgggtggaatgcctacagaatcgactgtgtcaagctttcttgattccgtagaaacatgttttgtttgacctcatcatagaggatctccgcttttatcgtacaaagattgtgatatgttcttagcttctttctacctgaataagaggatttctgcagacccttttccaactgactttctgtgacgcattggtctggatgcttaatttttttgttcggtgcaagtgtggcacttgtcctacgttatgacctgt

SEQ ID NO: 10779 - DNA, 77 bp, Zea Mays
acctagattgatatagggatggcaatggatccaattcgggtcaggtataataaatacgttgtcatctctaattttgt

SEQ ID NO: 10780 - DNA, 52 bp, Zea Mays
gtttatttttggttttttttttttttttttttttttttttttttcctctatt

SEQ ID NO: 10781 - DNA, 531 bp, Zea Mays
gaaccaacccctctcgctccgctatttataggattgctccctagggtttccgccgcgccgccacttcccctccgagcctcagttcgcatccacgcgcgccgccgccgcctcgcagctcgacgctcaccgcgcagccatggcggaacagactgagaaggctttcctcaagcagccaaaggttttcctcagctcaaagaaatccggcaaaggtaagaagcctggcaagggcggcaaccgattctggaagagcattggccttggcttcaagactcccagggaagcaattgaagggacctacattgacaagaaatgcccattcactggaactgtttctatcagaggcagaattattgctgggacatgccacagtgctaagatgaacagaactatcattgttcgcaggaactacctccactttgtaaagaaataccagaggtatgagaagaggcactccaacattcctgctcacatctccccatgcttccgtgtgaaggaaggtgaccatgtcatcattggccagtgcagcatgtg

SEQ ID NO: 10782 - DNA, 1583 bp, Zea Mays
ccagcggcgcatccactgggatatatgaggccttggagttgagggatggaggatctgattatcttggcaagggtgttcttaaggctgtcagcaatgtaaataacattattggaccagcaattgttggaaaggaccccactgagcaggttgagattgacaacttcatggtccaacagcttgatgggacctccaatgagtggggctggtgcaaacagaagcttggagcaaatgccatccttgcggtttcacttgcggtgtgcaaagctggagctatggtgaagaagattcctctttaccagcacatcgcaaatcttgctggaaacaaaactctggtgctccctgtacctgcctttaacgtgattaatggagggtcacatgctggaaacaagcttgccatgcaggagttcatgatcctcccaactggtgcctcctcgttcaaggaggccatgaagatgggagttgaggtgtaccacaacctgaagagcatcatcaagaagaagtacggtcaggatgcgacaaatgttggggatgaaggtggttttgcacctaacattcaggaaaacaaagaaggccttgaactattgaaggcagccatagaaaaggctggctacactggaaaggtggtcattggaatggatgttgctgcttctgagttcttcggtgagaaagacaagacttatgatcttaatttcaaggaggagaacaacgatggctcaaagaaaatttcaggcgacagcctgaaagacctgtacaagtcctttgtttctgagtaccctatcgagtcgatcgaagacccatttgatcaggacgactggagcacttatgccaaactcactgatgagattggacagaaagtgcagattgtaggagatgatcttctcgttaccaaccccaccagggtcgccaaggccatcaatgagaagacctgcaatgctctcctcttgaaggtgaaccaaatcgggtctgtgaccgagagtatcgaagctgtcaggatgtccaagcgcgccggatggggagtgatggcaagccacaggagtggcgagacagaggacaccttcattgctgacctctcagttggcctgtctacgctgctcaggatcgaggaagagctcggtgatgccgcggtctacgccggagcaaagttcagggcaccagtggagccctactaagaaaggaagaggatggggatgttttcttgtggagctatactagctcgctgctgccttttgttacaatgtttgtacggtcgcaataaatgtatggtcgtgtttgctcgagagctactcaggtgattttgtcgtgggagcaccaaaagcagaaaagaactgtttttttcttctctctctctagattctgacgagtggtggtctgcactcgtcgtaatgtcgtttgcctaaactgattttgatggaacaggaaatcttgctggtcttgccatatgcgtgcgagtgactttcttgttccttatggtgtgtgaggccattttcgtattcagcatggaaaattacgggttcgttttgtagcgacaggcagcttgggcgtaggagccacgacccgcaaaaataaaatcttgttggttgcat

SEQ ID NO: 10783 - DNA, 721 bp, Zea Mays
tatccctcctcgacctcgactcaaccggagaaggtctggatgatggtgttgtgccatgggtcagacaggtgctgcagcaggttgtcgaagggccccttgccggtgacgttgtgctggatcaggaagcccaggaacgccagcatcgccagcctcccgttggcgagctccttctccttggcctcgagcgtgggcgcgaagttgagcgggttgaagacgctgcccgggtagccgcactcgtgcggcggcaggctgtagctcttgaagatggggtcctggttgacgctgccggggttcttgatgtcctgccaccgccggatctccacgtagtggaacaggatgaactcgaccacgaacagcgtggacgacgacgcgaagtactccgacttgccggcgtcgtaccactgcggcgcgttgatcagcccggctttggtcagcacctccgggatgagcatcccggccacgccaagcatggcccaccggccgttcaccagctccgcctgccgtcgaggtaggagggggagggaaggccggggagccactcgcccttggcctccgccttgaggctgcgcctcgtgggagacgcggtgcggccgaggcggctagagtggccaaggaaggccgacgacgacttgagcgatgccgacgacgggcgaagggccgctaccggggcgcgggcggtgacggacgccatgcttcccggggactgggagcgaggagatgg

SEQ ID NO: 10784 - DNA, 366 bp, Zea Mays
ggttgcgaaggcactagccgaagccacgctccccggaacgaacgacgcagcccaacccgttcccaccaaaccagcggcaccacccatggcttcggcggcggcgagatccggtctccggtcgctggcggtgcgcgccggcccgttgaggcgccgcatgtcctcctccgtccacgacgacgcctatgagacggccaagtgggagaagatcacctacgccgggatcgtgacctgcaccctcctggcggcgtacaacctgtccaagggccaccccccacttcgatgagccgccggcgtacccctatctgcacatccgcaacaaggagttcccatgggcctggtcagtgttcggaattgagacattcaaac

SEQ ID NO: 10785 - DNA, 396 bp, Zea Mays
  misc_feature (395)..(396): n is a, c, g, or t
tttccgcgcgttgaactgcgtgttttctccgcaagttgatatgtggttacaataaaagttatccgcaataggcaaacaggacagtcagaggggtatggatttgttgagttcttttctcatgcatcagcagagaaagctcttcagaattttactggtcatgtgatgccaaacactgaccggccatttaaattgaactgggcatcgtatagcatgggtgaaaagcgatctgaagtggcttctgatcactcgatatttgttggcgatctagctgctgatgtcactgatgaaatgctgctggagcttttctccagcaagtaccgctcggtgaaaggagctaaagttattattgatgcaaacacaggccgttccaggggctatggatttgtcaggtttgnn

SEQ ID NO: 10786 - DNA, 701 bp, Zea Mays
gttttcacgctccaggttgcatcacgaccaaggagctgggcactgtcatgcgctcgctggggcaaaatcctacagaggctgagctccaggacatgatcaacgaggtcgatgctgatggcaacggcaccatcgatttcccagagtttctcaaccttatggctcgcaagatgaaggacaccgactctgaggaagagctcaaggaggccttccgtgtgtttgacaaggaccagaacggcttcatctcggccgccgagctccgccatgtcatgacaaatcttggtgagaagctaactgatgaggaggtggacgagatgatccgtgaggctgatgtcgatggtgatggccagatcaactacgaggagtttgtcaaggtcatgatggccaagtgagccacagaaccataatctgaaggcagagaagattatgcattgcatattagtcaagatgcaactttttattccatcgacttctagtgaaacattctgctagttgtagttgctgaaaaaggcaatgtagttcctgctttgttcttccctccagtgtgttttcagaactgttgtttcatgtgaacttgtaatgattgccctctctgctgtgtcttgattgcagttaaaatcatatgtagtttcaccccacccacacatcaacttctgtttcacgctgtttgtatcaatggatggcccgttgtttttaaaaaccaa

SEQ ID NO: 10787 - DNA, 50 bp, Zea Mays
tttagccttggacggtgtttaccgcccgatttgggctgcattcccaaaca

SEQ ID NO: 10788 - DNA, 66 bp, Zea Mays
caccctttagttcacttgttgctacgtgtaggtcagtgaccaagtcttcatgtttgagaagtaaca

SEQ ID NO: 10789 - DNA, 76 bp, Zea Mays
tactttggaaagaatgatgatgagttgataaggttcgcaggtgatgaaatagtttcggaaccgaaggatgatgagg

SEQ ID NO: 10790 - DNA, 1015 bp, Zea Mays
caacaattctacaacaacaaaccaaaatgcaaactgagaaaagaggcatatatcattgagcaccaaaaacttctttaggcatacttgaaaatccatacagataccacaaaaactgacacaatgtttcaccatagtaccatccatagcggaacacgtcctttttaaccatctaataaatcacagcagagggatagataaaacaagaacaacaatactctaggtggccttgtcagccttggaggctgtggcagcagcctggcctctgagccttccagtcctcctagccgcaatgagaccgaccttctggccagggggagcatcgcggcggacagtagaggcgtgaccgatatgttggtggttacctcctccgtggggatgctccacggggttcatggccacaccacggaccttgggccagctgttcctcttcacacggtacttgtggtaggcgttgccagccttcagcatcggcttctcagtcctgccaccaccggcaacctgcccaatcatggcacggcagctgctggggacaattttcttggcaccagatggcagcttgatcctgttccgttgtcagggttgtggctgatcacgatggcgtagtccccagaggccctggcgaagacaccgcggtcaccaacgtggtgctcgacgttgcagacgacggcaccctcggggatcccgcggagcggcaggacgttgccgatggagagcgtggcgcggcggccgcagtaaacgaactggccggtgtacatgccctcggcggcgacgaagagctccttctggtgcttgtacctgaaggggtggcggaaggtgaccttggcgagcggggcgccgcgtccggggtcgtggatcacgtcggtgactacgcccttgaggtacccgttgcgctcgccgaagtcgagggagcggaaccgggcggggcccttgcggtggtgggggtggcggaaggtgaccttggcgagcggggcgccgcgtccggggtcgtggatcacgtcggtgactacgcccttga

SEQ ID NO: 10791 - DNA, 1312 bp, Zea Mays
tacaagtgccttcacggctagtatattaaagtaagtttgttcttttatcgatatggcgagggaggagaatgtctacatggccaagctggctgagcaggccgaaaggtatgaagagatggttgagtatatggagaaggtggctaagactgtagatgtggaagagctcactgttgaggagcgtaacctcttgtcggtcgcatacaagaatgtgattggggctcgccgtgcttcatggcgcattgtctcttctattgaacagaaggaggagtcccgtaagaacgaagagcatgtgaaccttatcaaggaataccgtgcgaagatcgaggctgaactgagcaatatctgtgatggcatcctgaagctgcttgactcccacctagtgccttcttctactgctgctgaatcaaaggtcttctacctcaagatgaagggtgactatcacaggtatcttgcggaatttaagactggtcctgagaggaaggaatctgctgagagcacgatgatggcctacaaggctgctcaggacattgcgctggctgagctggcacctacccatccgataaggcttgggcttgctcttaacttctcagtgttctattatgagattctgaactccccagacaaagcttgcaaccttgcaaagcaggcgtttgatgaagctatctcccagttagacacccttggggaggagtcatacaaagatagcactctgatcatgcagctccttagggacaacttgaccctttggacctctgacctcacggaggatggtgctgatgagggcaaagaagccccgaaaggtgaggctggtgacggacagtaatcttgggagagcgcatattgttcgagcccattgttttagatgctctatgctgtcgaagctgaagctgtgccgtgctattattgtagctgatttcctgttccctcacttctttttttatattagtaggctggtagtgttcgaattagttccccattgctttgtgttgccgctagttggcattaagtccgtgtggactggtattattcactggatttgagaagcatgtcagtggttgctctagcgttttattgagttttgaagtcatctccctcatttcggtttcaatcatttagcagattgtgcatatggttgtgtaaaacacagttttgcacaattgcacaatttacgtagtgtggtttgaaataagagtgagatttgggctggatgtgcggttggctgtttgaatctgctctttagggcctgtttggtagggaggttttgaatactacagtttttagaataccacagttttcaactggaagtgacaca

SEQ ID NO: 10792 - DNA, 844 bp, Zea Mays
gcgtccaagaaaatgaatgtagtataacattgctggtcgttgcaatatcagtccccattacatcaaataataatagatcgcagctgtgtcgagctacgccggggagcttagctgagttttacattgtgcgcgaaagcaaatttgccagggttccataaacaactgaaccctctttttttctgcagggtttatgtacaggagtgagtacctactaaaatcgatataggtagatagcggccgccgagccatgcttccgtcgtcaatcagggggccaggtgaccatttcccacgcaggggctctaatcgaccacccaggttgctgacgacctaatgccacgctgcgttttctcatgcgctgctcttcattccgtcagctgtgttgccggagaaagcccagtgcggcttggccagggttcgcttcgtagccttcactgacaatgggccgagcatttaccatgaggcaggttccctgcctgacgttgcagatggggtagtcatgggggcagcagctgtagtgatcgtcgcagcaggtggtgctgtcagggcacgagtagtagttgtcgcacacggcgggcgccggggtcggggacggcgggctggggccagggttcggcgggttggcgccctccttcaacgggtatgacggctcaaccgcgataccgcacttgccgctggacgccttgatgttgcgctccatcctcacgtacccggactcgccccagctgctgccccatgagttcttcacgatccagtagtccttgccgttctctgtcccgtagccgacggccgtgacaccatggtccagcgctgttccacagcttccagtgaagataccctgaggcca

SEQ ID NO: 10793 - DNA, 74 bp, Zea Mays
acagttgagacattagcatcaacggctatttgtggcatcatacattcaataataggtggacagccactattgat

SEQ ID NO: 10794 - DNA, 820 bp, Zea Mays
gttctctttctctatctcgtttgtgacttgaaacctggcgccgatgtgaagatcacagggccagtgggcaaggagatgctcatgcccaaagaccccaatgcaacagtcatcatgctcgcaacggggaccggtattgctccgttccgctccttcttgtggaagatgttcctggaggagcacgaggactacaagttcagcggccttgcgtggctgttcttgggagtcccgacgagcgacagcctgctgtacaaggaggagctggagaagatgaaggagatggcgccggacaacttccggctggacttcgcggtgagccgggagcagacgaacgcggcgggggagaagatgtacatccagacgcgcatggcggagtacagggaggagctgtgggagctgctgaagaaggacaacacctacgtctacatgtgcgggctcaagggcatggagaagggcatcgacgacatcatgctcaaccttgcagccaaggacgggatcgactggatgcagtacaagaagcagctcaagaagggcgagcaatggaacgtcgaggtctactgatccatccttccgttgacgactgcggagatcaatcaaatcgttggctcgtcgccgcgcccgagtctgtcagactcaggtctctatctaccgatgtacatataccttacgatgatgaaagacattctctatctatcaatgtacatacatacatacataacttaatttcacacggattgcatcgtacatggatttatttatggatgagccgccgaatttcttcttgaggggcctctttgaaggatttcctagactttcgtgcaag

SEQ ID NO: 10795 - DNA, 738 bp, Zea Mays
atggttgcactgtctaacttgtctgcaatccatgaagttggacatgacggtcttcatacagtacttgagatgacagatgcattccctatgcaacgaagccttcgatgaggcgatctctgagctagacagcctgggagaggagtcctacaaggacagcactctgatcatgcagctcctgcgcgacaacttgaccctatggacttccgacaccaacgaggatggcggcgacgagatcaaggatgctgctgccccgaaagaatccgcggagggtcagtaagatggattcagtctcacgacctgctgctgctgatgttgaggagtgaccagaaccagaaccgccgtcctcgattctgatagattatcttctagtataccttgtgttgttgctgttgttgtcgtcgtcgcgccggtgtatgcgatgaagctgccattgctgctgttttaattaagcattctagatgttataccgcatgctttgtttcggtttctatgtcgataaatggtggccggatgctggttttcgtgctccgagccggccaccaggaagaagacctgcctgcccttgtgggtgcagcgttgttagaatgacctacggtgtatttgactttgacaggcctgctgcctagtggactgatattctgttatgcgcaaagctatttggcttgatgtctcagaatattcttaatttgcgtcgtcttttaagtctatcacgatgacgcagaccacatttatttttca

SEQ ID NO: 10796 - DNA, 1385 bp, Zea Mays
cacagtaccacacccccgctatcctattcaacggttctgatcttccacccaccattctagcgcagatcgccagacccgcaaaaccctagcccccaccttctcccaactataaaggcctggtctcccgctttgccccatttccctcgccatcctacgcctcgcgccgccgccacagcaacccttgcagccccaatcccccacggcgaccatggccggcgcgcaggagtccctctccctggtgggcacgatgcgcggccataacggcgaggtgacggcgatcgcgaccccgatcgacaactcgcctttcatcgtctcctcctcccgggacaagtccgtgctggtgtgggacctgaccaacccggtccactccaccccggaatccggcgtcaccgccgactacggcgtccccttccgccgcctcaccggccactcccacttcgtccaggacgtcgtccttagttccgacggccagttcgcactctctggctcctgggacggcgagctccgcctttgggacctctccaccggcctcaccacccgccgcttcgtcggccacgagaaggacgtcatctccgtcgccttctccgtcgacaaccgccagatcgtctccgcgtcccgcgacaagaccatcaagctctggaacactctcggcgagtgcaagtacaccatcggcggcgacctcggcggcggcgagggccacaacgggtgggtctcctgcgttaggttctccccaaacaccttccagcccaccattgtctccggatcctgggaccgcaccgtcaaggtctggaaccttaccaactgcaagctgcgctgcactctggatgggcacggtggctatgttaacgccgtcgctgtgagccccgacgggtcgctgtgcgcctccggcgggaaggacggtgttactctgctgtgggatttggctgaggggaagaggctgtactcgctggacgcgggctccatcatccactctctctgcttctcacccaaccgctactggctctgcgctgcgacgcaggactctgtcaagatctgggacctcgagtcgaagcacgttgtgcaggacctcaagcccgacatccaggtctccaagaaccagatcctgtactgtacaagcttgagctggagtgcggacggaagcaccctctacactggctacaccgatgggtctatcagggtttggaagatctccgggtacggctacgcaggctagatgttgaaatcagcttggtctaggcagtctttcgggggaaaacattgtaatgtttgtcaagtttttgatgtcgtgagctatattgtctcttcgctactttccggtcgcccaaccattttaatcttactatggaagaatcttgttttgcactatgattcggtttcaaaaaaaa

SEQ ID NO: 10797 - DNA, 68 bp, Zea Mays
tcaacgagctcctgctcagctatctctacttgttgatcctcagattccacagtggcttgctcgtctac

SEQ ID NO: 10798 - DNA, 51 bp, Zea Mays
gagctcgcgcttgcggtggatgcactcataggcaagaccgagggaggaacg

SEQ ID NO: 10799 - DNA, 57 bp, Zea Mays
cccaggttcatctaattaatcagataagggtgtcccattccaccctcatggttgtac

SEQ ID NO: 10800 - DNA, 628 bp, Zea Mays
aactcctctgaggccaaaagagaatcccggcccgtgtccagaagacgcctcagccaccgcaaaatccccaaatccgcggcggagaggagagagccggagagaggggcgcagccagagagatcggagaaggggaagaagatggtgcgggtggcgacctacttcgcgatgaccttcggggcgttcctcttctggcagtccatggacagggtccacgtctggatcgcccttcaccaggacgagaagaaagaaaggatggaaagggagctggagataaagagaatgcaggcagagttactggcccaagctaaagagaatgaatcatgattgtcatttgtccaatggtttcaggcagttcctttatcgtatttcctctgctgtattttccatgcaatatcttgactgatgtatgctcatgctcagcacctccaataaagcgagacatgctatagcattgttgaatgcaagtgggtatgcagtttgcagtatgcttatgttgaattgatgtaacttagccgaactgaaagaggctgccccagcttgattggaacagaggaatttgctgctgtttttgttcttattacggaacaacacaagtcaactctaaaaaaaaattgtttatgaaaaaaac

SEQ ID NO: 10801 - DNA, 196 bp, Zea Mays
ggcggtcggattcggagactgctctgcatactcccgcgcgcgcattggggggatcggatacgccacaggctgcgcgatggtgctgtgggtcttcggctacggctccctcatctggaaccccggcttcgacttcgacgacaaaatcctcggcttcatcaagggctacaagcgcacctttaatctcggtatggatgct

SEQ ID NO: 10802 - DNA, 65 bp, Zea Mays
ggaaattcttataagaacatgtcagtataagtaaatgatctcctgattttatgatttgaagggtg

SEQ ID NO: 10803 - DNA, 833 bp, Zea Mays
tcgatcgctagaaactagggtttacgagcacgccctggtataaaagaggcgagggtcactgatgcaggacctcccgcagccgccacctcaacccaggaacagagcgaggcgacgccgcggcacctcttctccgttgatattgattatttaggcgaagggaaatggcaaccgttccaggggatctgatctggcaggttgtgaggaagaacaactccttccttgtgaagcagttcggcaacggcaatgccaaggtgcagttcaccaaggagccgaacaacctctacaacatccactccttcaaacactcgggtttggcgaacaagaagactgtgacgatccagccagctgcaaaggactcggctgtggtcctctctactaccaagaccaagaagcagaacgcacctgcgaagctcagccacaagtctgtgatgcgcaaggagttccgcaagatggccaaggctgtgaaaaaccaggttagtgacaactactacaggcctgatctgaccaagccagctcttgctaggctaagctcggtgtaccgcagcctccaggttgccaagtccggtgtcaagaagaagaacaggcagtcctaagcgctaagtttgtgttctgtcagggggcatgttggtgctcgtagtcccagcttatatttatctatgttccaacagttgagacttgttagaactgagcaaaccatgttaagatgctgctgtgtgtcattccttaaaaaaattgccttgcactttgtgattactgtctcaaaaaaaataacttaagaaaggcacagacctgagaacgcggtggtgggtgtggccggttgggtggtgctgcgc

SEQ ID NO: 10804 - DNA, 931 bp, Zea Mays
agctccgtaactccatctggatgggattaggtgttcagttagccggatgccgtttggtcaggttccagctctgcaggatggtgacttgtacctcttcgaatcacgagcaatctgcaagtacgctgctcgcaaaaacaagccagagctgttgagggaaggaaacctcgaggaggcagcaatggtggatgtttggatcgaggtggaggctaaccagtacaccgctgcactgaatcccatcctcttccaggtcctcatcagtcctatgcttgggggaaccaccgaccagaaagttgtggatgagaaccttgagaagctgaagaaggtgctagaggtgtacgaggcacgcctgaccaagtgcaagtaccttgctggagacttcctcagcctcgccgacctgaaccatgtgtctgtcactctctgcctgttcgctacgccctacgcatctgtgctcgacgcctacccgcatgtgaaggcctggtggtctggtctgatggagaggccgtctgtccagaaggtcgctgccctgatgaagccatctgcttgaaacggttgccctgtcaatcggtgaatggaataagccaagtctgttctgggttgtttgcttgttcagtgatgtgtcttctatgacgaaagttgagtgcctatgtgtgagcatgcttgcttgtaacgagacattgaattgttcggaaatgagcattcctgtgctcttcttgaaaataaactttgcgttaggttcctcaggatcttgatggtttggttgctgctgcaatcttcaggttcgatgttatcgatcatggccatggcaaatgcatctgcatagtctaactctaatggatagcaagcctggatgtcacgaccattatgcctttaaaaaaggccaactgacggtaggcttcctaacgaaattaccaagatggattaatgtgtgttc

SEQ ID NO: 10805 - DNA, 872 bp, Zea Mays
gtccttcgctgctgttgcagtctcatttgctcacactatcaaagctctggagcccttcttcagcgcagctgctactcagtttatccttggacagcaagttcccttctctctgtggctttctcttgcccctgtggtccttggtgtttcaatggcatcccttactgagctttcattcaactggactggcttcatcaatgccatgatatcaaacatctcattcacttacatgagcatttattccaagaaagctatgtttgaagggccccagctaatgcagcatggatttagtgatgccattgcaaaagtaggtttgacaaagtttgtcagtgacctattcttggttggactgttctaccatctgtataatcagattgctacaaacaccttggagcgagtggctcctctgacacatgctgtcgggaatgtgttgaaacgtgtttttgccatcggtttctcaatcattgtttttggcaacaaaattagcacacaaactggaattggcacgtccattgccatagctggtgttgctatgtactcttacattaaggctaagattgaagaggagaaaaggaaaaagagcgcatgactgctgtgaataatattatcgggaccttcctcggacacaacatcgtcgacaatcacgacctacttctataccttgttttgttttcatcttgagtcagtcggtccattgtttgttcccagtctggtgattaaaagtctgcaaattctgtttgtggaattggcagcgatacaaatttggcttctttaagtaaatccggttgccggtacacagcggtattaattcacctgtaactgaatgtaataccgtaatgcaaagggcacaacactctgcctgactaaaataaaat

SEQ ID NO: 10806 - DNA, 56 bp, Zea Mays
ttgttttttttttttttttttgttttttttgttttttttttttttttttttttgtt

SEQ ID NO: 10807 - DNA, 74 bp, Zea Mays
agtgtcttttggcgtgacgcccaggcagacgtgccctcccccagaaggcttcgggcgcaacttgcgttcaaaaa

SEQ ID NO: 10808 - DNA, 654 bp, Zea Mays
gaatctaggcacgttcaagcttaccttgcagtttacagaagattacccaaacaagccaccaactgttcggttcgtctctaggatgtttcatccaaacatatatgctgatggaagcatctgcttggatatcctacagaaccagtggagtcctatatatgatgttgctgcaatcttgacttctattcagtccctgctgtgtgatccaaacccgaactcccctgcaaactcagaagccgcaagactgttcagcgagaacaagcgggagtacaaccgcaaagtccgcgagattgtggagcagagctggacagccgactagtgcaggaggatgctcatcgtgcccgaaagggcacaataaggaaccatgaaaaaacatccttgtgtttgtggttcgccagacctgtcgaaacattgaagaactctagttctagtctgtcgttgtcatggttttggtctgatccagagcaccggttgctcatggtggtggctgtcgtaatgtagcggttgttgttgacatatatcttcttaaaatgatcctgcttgtgtacaaaaactatagcgtgggaatggtggttcgatggaccgatggaaccatgttcttgcattgaggtttcacaaagtctaaatggcttctttctttcttttttttattaaggt

SEQ ID NO: 10809 - DNA, 116 bp, Zea Mays
ttgaacattatcatttagaggaaggagaagtcgtaacaaggtttccgtaggtgaacctgcggaaggatcattgtcgtgacccttaaacaaaacagaccgcgaacgagtcacccgtg

SEQ ID NO: 10810 - DNA, 63 bp, Zea Mays
catagatatacaaatttaattagtattgcataatgatagatccacatcacataaaccatcaac

SEQ ID NO: 10811 - DNA, 76 bp, Zea Mays
cctcgagaagcagagcctccagcacagctccaacctcttccttcgacttcgaccaaatccatgaactacagattca

SEQ ID NO: 10812 - DNA, 148 bp, Zea Mays
cctctgcatattatgcggaccaaagaagaatgaaggtggtagagatagggggagctcaggaactgcttaatgtattggaaggtgctaaagatgataaaacacgaaaagaaactctaaaagctcttgctgcgctttcaaaatctggtga

SEQ ID NO: 10813 - DNA, 782 bp, Zea Mays
ctggctcgacgagccggcagcccggcacttataattccgccttctcccacctgtctcacaccctctagccaaaaccctagcagccgcccggtgctccctctctgcagatctcccttcgcagccgccgaggaaccccttcacagcgcggaagatggctgaacaggaggccccagtcgcggttgaggcaccaaccccagttcttggggagcctatggacttgatgactgctctgcagctcgtgatgaagaagtcaagtgctcatgacggtcttgtgaagggtctccgtgaggctgccaaggccatcgagaagcacgccgctcagctttgcgtgcttgctgaggactgtgaccagccagattacgtcaagttggtgaaggcactctgcgctgagcacaatgttcacctggtcactgttcctgccgctaagactcttggcgagtgggccgggctttgcaagattgactctgagggcaaggcaaggaaggttgtaggctgctcctgcgtcgtcgtcaaggactacggtgaagaatctgagggccttaacatagtgcaggagtatgtcaagtcgcactagatgtgtgacatgtttcagtgatactcttgatttggacctgggcttaaaattatgcttttgcatctggggcttgcctaggagattagaacattttactagaagagccgaagaggatatgtatgaacaatttggacatctgaattttttttgtttatggtgctgtcgtctggttttaatgcaaatcatgaagagccgagtttattctaaa

SEQ ID NO: 10814 - DNA, 85 bp, Zea Mays
ccttctgatggttagcagtgagctctgaaattattgccatcccctttattttcagcagattgaagggatccttggactttatgta

SEQ ID NO: 10815 - DNA, 51 bp, Zea Mays
acaaaatgaaaaaaaaaaaaaaaaaaaaaaaaaaaaaaaagacaaaagaac

SEQ ID NO: 10816 - DNA, 51 bp, Zea Mays
cgccagcccccatccgctccctcccggcaatttcaagcactctttgactct

SEQ ID NO: 10817 - DNA, 473 bp, Zea Mays
tttaattatggcggctcaatggcaatcatttgactgggccgatcccaagggaactttctggaatatctagtctcaaagttgtcgatgtttcaagcaatgatttatgtgggacgattcccacatctggaccatttgagcacattcctctgagcaactttgagaagaacccacgcttggaaggtccagagctacaaggcctggccatatatgacaccaactgctagagggggcaccacgaacaaaagaatcgctaggaagaaatgggcgaacaaggttaccaaaaagtgggcgacatagattattaggtctggttctgctgccactctgtaatcccccctgcatagctcttatttgtaacttgctgtctgcacgaaagttggtggatgttttagcagaatgctttctgcccgtgaaagtaaacttgaaactgcttattatgagtgaaatgatgatgttatttcccttgccatgag

SEQ ID NO: 10818 - DNA, 600 bp, Zea Mays
atggcgagtggggaattgcatattgtgtcaagggtgggtccagaaaaagagctaaaagcaatacagtacttggagagaagagagtgtgagtacgaccagaaaatatccattgatttctacaaggaaggagatcccttgaaaccagctgtgacgggcgtcttagtgttcgtttccactccagatccaattggcaacaagtactatcttggccctgctcctctgcaggatatggcaaggccacgaagatgattcgatcatagagcttgcaaacgaggtgaggaaggtgctcaacagaacaaaggagaccaagatcactggtgccaatgcttccatgaaatcacatgcccctcttgtgcacctgtccgcgcttccagaaggcaccgttgtggactcgagatagcgacctctactcggaatttactttcagctcttgcatgtttgtggttgtggccatcatgtactgattttcccttttcaacagttgtcgtgaggctgtatcgtctggagtaaaaaaaaaaaaagctaaaagccggcactaataatgatattaacttgaaaaagctatcggcgatccttgaacttggaggacccccccccccc

SEQ ID NO: 10819 - DNA, 1678 bp, Zea Mays
aaaccaatcacgtccttgtcaccaaatcgacgttttgctggtaactgccaaacaacgttgatcacccaaccaagtggcaaacccccggaccctgtccacggtgcacccacccgtaggccccacgtgtcaccctctaatatacgcagcctccgttcaagtttagagtcacccgctaatatacggagcagctgcaatgctgaacgctgcacacctgtaaaagatagagctatcccctccctccccatcccttggagccagcaactccactcctgagtcctcacctcgtgctgcccgcgccatttccacctcccactgtcctttcgtccagtccccagccctgcagcccaaccgtggaggttctggaaggcggtgtatcccttctagaaccttctcgagatgcagagcgccgcggctttccggccatgccccactcggctgctggtgagcagcccttgtcgccccctcctctcggcccgcccgcttcgtgcctccgccgctggcgccgtcgctaccagaagcagcgccgtgggccctcgcggtctggggctcgggctgctgccagcctcgcccgatcgggatggcaagtgccgccagcgacaggtgtcatgcagcgcggccggggatgctgtggcggccccgaaggcggaagaaggaggcgggctcatgaagacgctgtggctcggctcgctcttcggcctctggtacctgttcaacatctacttcaacatctataacaagcaggtactcaaggttttcccataccctataaacatcacagaagttcaatttgctgtcggaactgtagcagctctgttcatgtggatcactggtattattaagaggccaaagatttctggagcacagcttgtagccatcctacctctggctattgttcatactatgggcaatctcttcaccaacatgagccttgggaaagttgcagtgtcatttacgcacaccatcaaggctatggagcctttcttttctgttattctttctgcaattttccttggcgagctacctactatttgggtagtatcttctcttcttccaattgttggtggtgttgcattggcatctcttactgaggcatcctttaactgggctggcttttggagtgcaatggcttcaaatgttacctttcaatcccgaaatgtattgagcaagaagctcatggttaagaaagaggaatccttggacaaccttaatctcttctctatcattacagtgatgtcatttttccttttggcccctgttaccttctttacagaagggtctgaatgtaaaccaagtccttacaaggtgtcttttcgctggactgtgtttccatgcataccaacaggtgtcttacatgattttggcgatggtgtctcctgtcactcattctgtgggcaactgtgttaaacgtgttgtggtcattgtaacatcagtgctgttcttcaggacacctgtttctcctatcaactctctcggtactgcgattgcacttgccggagttttcctgtactcacagctcaagcgacttaagcccaagccgaagacggcttaaatagggattgtattttccatctctttgtgttaatggagttaaacacttctatgtttcagcctttcaggagaagaaggcgaaccgccaaagcgcgcatactggctaaacgttggaccggcaagcgcttgg

SEQ ID NO: 10820 - DNA, 80 bp, Zea Mays
ccacctcgtccttgacggcagtgagcgccgaaatctcaccaccggcgctgagagcgctacccctcgccctaggcaccacg

SEQ ID NO: 10821 - DNA, 667 bp, Zea Mays
tttccttgccgccagccagcccattaaccctcgttcctgtcgcgcagccacgacctccacttccacatctcccccggcgtcggcgcggtcagttgaaccatggcggactccaaggccacctcggcggtcaccctccgcacccgcaagttcatgaccaaccgcctcctggcccgcaagcaattcgtgcttgaggtgatccaccccggccgcgccaacgtctccaaggcggagttgaaggagaggcttgccaaggcgtacgaggtgaaggaccccaacaccatctttgtcttcaagttccgcacccacttcggaggaggaaagtccactggtttcggcctcatctacgacaacctcgaggctgccaagaagttcgagccgaaataccgcctcatcaggaatggtcttgctactaaggttgagaagtcccgcaagcaaatgaaggagcggaagaacagggccaagaagatccgtggtgtcaagaagaccaaagctggtgacgccaagaagaagtaaacgttcgtttacatttgtattactgttctgggctctgggtggtctagctgcaatgtcataattatggtcgtgttaggttttgttccacccttggcactgaagtgattttttttaaaagcaaccctaaacgaagaatctaagattgactccagca

SEQ ID NO: 10822 - DNA, 517 bp, Zea Mays
gaaacggagggagtatcatgtaatagccggagaccatatctcttgtatgactgatatgctttgagatttaacaggatacaacctttgagtttgagaggaagaggaacaggcccgagcgctacgaccgcaatttgacggagcagactctgaaggctatcccgcttattgcaaagattaggcatgaccgtatgggaaaacacatctcaaaacagacataaacctggtaaacgcaaggagatggaaaaggactccaaggagctggagcaggacatcggcatgctcccgaagaagcttattatcaaccatctcgcggctgagaaaacgaaggtcaaggttgaagttgttcagcagcagacagaagataacgctatggaagagtagtgcgtggcattttgtgtgcttgtgttttcatgtctgatgcagatccttttgtatttgcgtaagaagctatgtagttgatgaaagatgtttatttgatatatatattaatggatggattcgtggactgaaaaaaaac

SEQ ID NO: 10823 - DNA, 882 bp, Zea Mays
ccgtattgggccttaccccggctgcttggcctgccgccagatccgcagcccggaggagggggagcaagcagcagccgtccgtggaagaagatgtcgtacctgctgccgcatctgcactcggggtgggcggtggaccaggccatcctcgccgaggaggagcgcctcgtcatcatccgcttcggccatgactgggacgagacctgcatgcagatggatgaagtgctggcagcagtagctgagaccataaagaactttgcggtcatctaccttgttgacatcacagaggtccctgatttcaacaccatgtatgagctgtacgacccttcgacagtgatgttcttcttccggaacaagcacatcatgattgatctcgggactggaaacaacaacaagatcaactgggccctgaaggacaagcaagagttcatcgacattgtggagaccgtatacaggggcgcccggaaaggccgtggtctggtgattgctccaaaggactactccaccaagtaccgttactaagaaggcaggcattccccttatgcaatctattggggatgtttacacggacagttagtccgacaggtgatccctaactgtatcttggcataccctagtaattcaagttgctggctggagtgatgcttatccatgtcttggcatgccatagtgaacatgtaaacctgtgatttgaggtgattattcgagtgtaaagaaaccaggattgcgttcgcctatgactatgtgtctagttgtctacttaataagaaacagttattggtttggaatatcggaactgagacaatggtttcctttcggtatttctattatcaactaccctgctttgctacgttttttatatattatataaataggtacggagat

SEQ ID NO: 10824 - DNA, 78 bp, Zea Mays
tgctacctggttgatcctgccagtagtcatatgcttgtctcaaagattaagccatgcatttgcaagtatgaactaatt

SEQ ID NO: 10825 - DNA, 309 bp, Zea Mays
actatccgccatttcatgccttcaggcttctagggttttcgcgccgccgccgccgccgcttcgtcgtctccgccgcagcgatgccgtcgcacaagaccttccggatcaagaagaagctggcgaagaagatgcgccagaaccgccccatcccctactggatccgcatgcgcacggacaacaccatcaggtacaacgccaagcgcaggcactggcgccgcaccaagctcggcttctgagcgcgcggatcggccggctcctgcgtcggaattctaggagtttcatgctgctggtggacgaagaggtgctgat

SEQ ID NO: 10826 - DNA, 1665 bp, Zea Mays
ctctcccacgctgcctataaaagccgccgcgaggctgagcagcattatcgcttcagctcggcgtcttcacaaacgccggcgcaaactctcgcccgagcccgacagatcttcaattccccattccgcccaccgatcgaccttcacgccagtctcggtctcttccgaaggcgtcgcgcgcggttgtttgagaggagaggaggaagatgagggagtgcatctccgtccacatcgggcaggccggcatccaagtcggcaacgcgtgctgggaactttactgcctcgagcacggcatccagcctgatggccaagtgcctggagataagaccgcgggacatcacgatgatgccttcagcaccttcttcagccagactggtgctgggaagcacgttccccgtgcaatcttcgttgatctagaacccactgtgatcgatgaggtgcgcactggcacgtaccgccagctcttccaccctgagcagctcatcagtggcaaggaggatgccgctaacaatttcgcccgtggccactacacaattggcaaggagattgttgatctgtgccttgaccgtatccgcaagcttgctgacaactgcaccggcctccagggcttcctggtcttcaatgccgttggtggtggcactggctctggccttggttctctcctccttgagcgcctgtctgtggagtacggcaagaaatccaagctgggcttcactgtgtacccatctccccaggtgtcaacctctgttgtggagccttacaacagcgtgctctccactcactcactcctggagcacactgatgtctccatcctgctcgacaacgaggccatctatgacatctgcaggcgctccctcgacattgagaggcccaactactccaacttgaatcgccttgtgtctcaggtgatctcatcgctgactgcttctctgaggttcgatggtgccctcaatgtggatgtgaacgagttccagaccaacctggttccttacccgaggatccacttcatgctctcctcctacgcaccggtgatctcttctgcgaaggccttccacgagcagctgtctgtggcggagatcaccagcagcgcgttcgagccggcttccatgatggtcaagtgcgacccacggcacggcaagtacatggcttgctgcctgatgtaccgcggcgacgtggtgcccaaggacgtgaacgccgcggtggccaccatcaagacgaagcgcaccatccagttcgtggactggtgcccgacggggttcaagtgcggcatcaactaccaggcgccgacagtggtgccgggtgccgacctcgccaagcgcgcgttcgtgcactggtacgtcggcgagggcctggccgccctggagaaggactacgaggaggaggaatactgatctgcttgcatgaatctgtttggctgtcgagccaggttgtggtgttgaaaaacctttgtttgtgtcctggcccccctgggtaatgtttgggtgtttccttccatcatcacttgctgaactgctctagtatttgcatttgtaattgaagtctgtcgctttaagcactcttggttctaaagatctctgtgcttttggggggtgtttttgcattgccccagattccaataaactcaccaaattcgggtcgtgcgtagtaatttagttccccggaggcgac

SEQ ID NO: 10827 - DNA, 925 bp, Zea Mays
tccgtttcctagcgctgaccataggatctggtaagaaggagagaaagagggcgaaatggtgaagcacaacaacgtcatccccaacgggcacttcaagaagcactggcagaactatgtcaagacatggttcaaccagcccgcccgcaagcagaggcgccgcatcgcacgtcaaaagaaggctgtgaagatattcccacgaccaactgctggccctcttcgtcccattgttcaatgccagactctcaagtacaacatgaagtcaagggctgggagaggctttacccttgaggagttgaaggctgcgggcattccaaaaaggcttgctccaaccattggcatttctgtggatcaccgccgcaagaacaaatcccttgaggggctgcaggccaatgtccagaggcttaagacatacaaggccaagctggttatcttcccaaggcgtgctcgcaaggtcaaggctggtgactctactctggaggagcttaccactgctacccaggtacagggtgactacatgccaattactcgcggtgagaagcgctctgtagaggttgtgaaggtcacagatgagatgaaggcgtttgcggcctatggcaagctccgccttgagcggatgaacaagaagcacctcggtgcccgccagaagaaggcagctgaggcagagaaggaagacaagaagtgaagcagccaaactttgtagcctgttttgttctgttcagtcatagcgagatgctacttccatcaagtgcttgttccaagttttttttgggtgctggaaatagagaccagtcaaatattttggtgtcctactgtttgataccttgtatttgtttgcgaactcagctatctaatgggttaatgaattcttggcgacgcacgattctgccttaaaaaaaaaaaaaaaaaaaaaaaaaagcagcatgtg

SEQ ID NO: 10828 - DNA, 89 bp, Zea Mays
cgatccgggcggaagacattgtcaggtggggagtttggctggggcggcacatctgttaaaagataacgcaggtgtcctcagatgtgctc

SEQ ID NO: 10829 - DNA, 54 bp, Zea Mays
tagcttaattattgaagtagttcaatgaatgtgatgtgtttattttcatgattt

SEQ ID NO: 10830 - DNA, 601 bp, Zea Mays
aaaagccataagggcaaacaggataacataggctgctaagaaagtatccgctattctttcatgggaaaacacaaagaaagcaaacatagaagctgaactgaagaagattgaggaacaactggaaaagaagaaggctgaatatgcagagaagatgaagaacaaggttgcaatgatacacaaggaagccgaagagaagcgagcgatggtggaggcaaaacgcggtgaggaggtcctgaaggccgaggagatggctgccaagtaccgggccaccggccacgctcctaagaagctcatcggttgcttcggagcctaagaaaccttccaagtcagaccgagcagaaagtgaaaaacgtcagccagtgattgcttggtcctctcgctctatcaagtgtgtagtgtgtcttcgaaagtttgtaaagcctactgctgctgctgtatatactgatatcgcttccaaggcaggcgtttggtggtgtacatgttgaatgcttgacgagaaacattcttgtgtgtagttaagaggtcacgctgttgttgttgttgttgacattcaagcagacattttgttttcttctggtttttaaatcataataagaaaaaa

SEQ ID NO: 10831 - DNA, 692 bp, Zea Mays
tatagaacaagcttcatacgggccagcaactccttagggcatccgagccatggcgagtggggaattgcatattgtgtcaagggtgggtccagaaaaagagctaaaagcaatacagtacttggagagaagagagtgtgagtacgaccagaaaatatccattgatttctacaaggaaggagatcccttgaaaccagctgtgacgggcgtcttagtgttcgtttccactccagatccaattggcaacaagtactatcttggccctgctcctctgcaggatatggcaaggcaaattgctacagccaatggccctactggctataatagggattacctgttctcaatggagaaggcattagccagcattagccacgaagatgattcgatcatagagcttgcaaacgaggtgaggaaggtgctcaacagaacaaaggagaccaagatcactggtgccaatgcttccatgaaatcacatgcccctcttgtgcacctgtccgcgcttccagaaggcaccgttgtggactcgagatagcgacctctactcggaatttactttcagctcttgcatgtttgtggttgtggccatcatgtactgattttcccttttcaacagttgtcgtgaggctgtatcgtctggagtaaaaaaaaaaaaagctaaaagccggcactaataatgatattaacttgaaaaagca

SEQ ID NO: 10832 - DNA, 344 bp, Zea Mays
gggcaaagactccctcttggcccattgacggcccaaagcccagtgaccagcgcgcgtccgtcggccgatataaagcgctagggttttacctatcgtttgccccacgccgtcactcctctcaacccgaccacgccgcgcctccgcttcgaaccctagccgagcggggtaaggagggaaatggggaagggtacgggcagcttcggcaagcgccggaacaaaacgcacacgctgtgcatccgctgcggccgccgcagcttccacctccagaagagtacctgctcctcctgcggctaccccgcggcccgcatccgcaagtattttgtttacttcctactgaatgaaag

SEQ ID NO: 10833 - DNA, 731 bp, Zea Mays
ccgccgtccgcgcagcgtgaaagaaagaattggatgctgctgcttagcagcgaaggaagcgggcaggaaggccgtgtggggtccacacctccccggacacccgcgcagccgccgcccacgcttggtccgtcgaccgccggccgatcgattgatggatgcatgcatccaccgtccacgtacgcggcgacgagacgtgttgcgtttgcgtgccaccggactagctagtagatcgctcgactgccagggaagaggcaaagcgaaaggagagaaggaatccgatccatccaagccaagccaaggcagagaagaagaagaggaggaagaagaagcatcggcagcatgtcggaggggactgccaactgcgtggacatcctgatcgccatcatcctgcctccgctgggggtgttcctcaagtacgggtgcggccacgagttctggatctgcctcctcctcaccttcctcggctacatccccggcatcatctacgccatctacgccatcaccaagaacacctagctagtcatccttgccgacgacgatccatgtctctgtatctgtgtctgttcatatgcctgatgccgacttgtgctgtatgtagttgcttgaattcagtcgtgttcctgttttgctaccgtacccaccccatgcatcatctgtcaccgcgacgcaataatcatagtaataacaagttcagataatcgaattcattcgctgctaaaaaaacactaaaa

SEQ ID NO: 10834 - DNA, 1724 bp, Zea Mays
cctatcacggcaaagcaaagcaccagcagcgtacgaggacaaggcctgaatttgttcccagcaatgcacaccacggcaacagcattcactgccaagagagtgagcgagcgagcagaggcagcgcagcaatggcggcggcaatagtactctccggccaggtgcggccgcttccctcgtcgctgcccctgtccctgctgctgctcctcctcctgtgctgctccggcacctcgtggggatggagcacgtcccggggaggagccgccagggagtgcggcttcgatggcaagctggaggccctggagccgcgccacaaggtgcagtctgaggccggctccgtccagtacttcagccggttcaacgaagccgaccgggagctcacctgcgccggcatcttcgccgtccgcgtcgtcgtcgacgccatgggcctcctgctccctcgatactccaacgtccattcgcttgtctacatcgtccaagggagagggatcattgggttctcgtttccgggatgccaagaggagacccagcagcagcagtatggatacggatatggatatggacaccatcaccatcagcatgaccaccacaagatccaccgattcgagcagggcgacgtggtggccatgccggccggcgcccagcactggctgtacaacgacggcgacgcgccgcttgtggcggtctacgtcttcgacgagaacaacaacatcaaccagctcgagccttccatgaggaaattcttgctggctgggggcttcagcaaggggcagccccacttcgccgagaacatcttcaaagggatcgacgcccggttcctgagcgaagccctgggcgtcagcatgcacgtcgccgagaagctgcagagccggcgtgaccagcgaggcgagatcgtccgcgtggagccggagcacggctttcaccagctgaatccgtcgccgtcgtcgtcgtcgttttcgttcccatcgtcacaagtccagtaccaaacgtgccagcgcgacgtcgacaggcacaacgtctgcgccatggagatgagcgcggtgcgggtagacctgtaccaggacgccatcatgtcgccgttctggaacttcaacgcccacagcgccatgtacggcatcaggggcagtgcaagggtccaggtcgccagcgacaacgggaccacggtgttcgacgacgtgctccgtgcggggcagctgctcatcgtaccccagggctacctcgtcgccaccaaggcgcagggagaaggcttccagtacatcgccttcgagacgaaccctgacaccatggtcagccacgtcgccgggaagaactccgtcctgagcgacttgccggccgccgtcatcgccagctcgtatgccatctccatggaggaagctgcagagctcaagaacggtaggaagcatgagctggctgtgcttactcctgctggcagtggcagctaccaacaaggtcaagctggcagcgcccaacagtaggcacaacctcagagtgatctgcctgaataagtactcgtagactgtaataattaaacaaagcttgctcatggttaaactgcgtgttgattagtctttcaactacatagctctaaagtttttgatacaccgagtgatttgccaggaaaaaaatgagcagattgttgtaagcaaaacatgtttgttatggctaaactgcatgtctacctggatttgtattttttttcaactacctagttcatctgataaaaacaa

SEQ ID NO: 10835 - DNA, 58 bp, Zea Mays
gaaagtaagatcaagttacttattacagaccagagctataaacgagtgttgagtggta

SEQ ID NO: 10836 - DNA, 2133 bp, Zea Mays
cacgcttggcggtccccgtagaccaagtccactcgccgatccctctccgagatctccacccacttatttcccctcccaccgcggccaggcctcagtcctctctgtcgcggagccgccgcaacccagcgtcccccgaagtctaaccctagatccggaccggccatggcgtcccgccgggtcgtctcctcgctcctccgctccgcgtcccgcctgcgggccgcctcgcccgctgctccacgaccgcgcgcgccaccgcaccgcccgtccccggccgggtacctcttcaaccgcgctgccgcctacgcctcttccgccgcggcccaggcggcacctgccaccccgccgccggccaccgggaagaccgggggcggcaagatcaccgacgagttcaccggcgctggcgccatcggccaggtgtgccaggtgatcggcgccgtcgttgacgtgcgcttcgatgagggcctcccgcccatcctcacggcgctcgaggtgctcgacaacaacatccgcctcgtgctcgaggtggcgcagcaccttggcgagaacatggtgcgcaccatcgctatggacggcacggaggggctcgtccgcggccagcgcgtcctcaacactggctcccccatcaccgtgcctgttggcagggctacccttggacgcatcataaatgttattggtgaaccgattgatgagaagggtgacataaagacaaaccacttcctccctattcatcgtgaagcccctgcttttgttgagcaggccactgagcagcaaattcttgttactggaatcaaggtcgtggatcttcttgcaccctaccaaaggggtggaaagattggtctcttcggtggtgcaggagtgggtaaaactgtgctcattatggagttgatcaacaatgttgctaaggcccatggtggtttctctgtgtttgctggtgttggagaacgtacccgtgaaggtaatgatctgtacagggaaatgattgaaagtggtgtcattaagctagatgacaagcagagcgaaagcaagtgtgctcttgtttacgggcagatgaatgagcccccgggtgctcgtgctcgtgttgggttgactggtttgactgttgctgaacatttccgtgatgctgaaggacaagatgtgcttctgtttattgacaacattttccgttttactcaggcaaactctgaggtgtctgctcttcttggacgtatcccatctgctgtgggataccagccaacccttgccactgatcttggaggactgcaagagcgtattacgacaacaaagaagggttctattacatctgtgcaggccatctacgtgcctgccgatgacttgacggatcctgctcctgctactacctttgcccatcttgatgctacaactgtgttgtcacgacagatctctgagcttggtatttatcctgctgttgatccactggattccacatcaagaatgctttctccccacgtgctgggtgaggatcactacaacactgctcgtggtgtgcagaaggttcttcagaactacaaaaatcttcaggatattattgctatcttgggtatggatgagctcagtgaggatgacaagctgacagtcgcccgtgcaagaaagattcagcgtttcctgagccagcctttccatgtcgctgaagttttcacgggtgctccaggaaagtatgtggagctgaaggaaagcgtgaagagtttccagggtgttttggatgggaagtatgatgacctccctgagcagtcattctacatggttggtggcattgaggaagtcattgctaaggctgagaaaattgccaaggagtctgcttcataaggaggcttcttgcttgttcaaccctgtacaagttccatttttggattttaagcgtttatttatgcttttcccagttaggcatgacgagctggagagtccatctcctgctgagagatgtttgttttacccttctttgcttcctccaccttacacccaaataagcaactgcagtgacgttggttttggctgcacccaaactacatgactgaagaaacttgtggcctgtgtaacgcgaatccatcagaacgccaaagttatggcttctggttgtggcaaattatggttcctccctgttcggttgaaaaaagt

SEQ ID NO: 10837 - DNA, 344 bp, Zea Mays
aaatcaccctgcacaccgggaatacccaaaaactcaacctgcacagaaaattttcctcttactccaaacaatccatatggcaaaacaaagctcgttgttgaggatatttgccgggatatctaccgttcaggtcctgaatggaagatcattttacttaggtacttcaatccagttggtgctcatcctagtggatatcttggcgaggacccacgaggaattcccaacaatcttacgccctatgttcagcaagttgcggttggtaggaggccagctctgacagttttaggaaatgactatgcaacaagagacgggactgggagaggccaaaatgcttctgaatactg

SEQ ID NO: 10838 - DNA, 1334 bp, Zea Mays
aatacttttctctcacaaactattgttgatattgattttgagaaagagcccattggatttggaaaggatggcaaggaagtctacttcagggatatatggccctcgacagaagaaattgcgcaggttgtccaatccagtgtgctgcctgacatgttcaagggcacctatgaggctatcacaaaaggcaacccaatgtggaaccagctaactgtcccagaagcatcactctactcatgggattccaaatccacttacattcatgagcccccttactttaaggacatgaccatgtccccacctggcccctctacagtgaaagatgcctactgcttgctgaacttcggggacagcattactacagatcacatttcacctgcaggaagcatacacaaagacagtcctgctgccaagtatttgatggagcgtggtgtggaccggaaggacttcaactcatatggtagccgtcgtggtaatgatgaagtaatggcaaggggaacgtttgcaaacattaggatcgtgaacaagtttttgaacggagaagttggacccaagaccattcatgttcctactggggagaagctttctgtttttgatgcggccatgagatacaaatctgagggccatgctactataatcctcgctggcgctgagtatggaagcggcagttctcgtgattgggctgctaagggtccgatgctcctgggagttaaagctgtaattgccaagagctttgagcgtatccacagaagcaacttggtggggatgggaatcattcctctgtgcttcaaagctggatgtgactgttactaccgacaatgggaaatctttcacttgcatcgttcgctttgacactgaggtggagctggcgtacttcaaccatggaggcatcctcccttatgtcatccgcaacttggcagctgcgcataactgaggcaagatcacacaccgtttgacccacaatggcagtggcaggctccatgttcccagggctagcgacctggttctcaatgtagtgacatttgtgatggatctaggggtctctttgtcgattcagcccataaataaagtgtgaaataaaagccgcaggtggaggcaggaacctgctgattgagggaacagttttgcctgtgtttggttacatgaaatatctgtttcacagatgtgtagagcatggtgtaaatgcttcctgtgctgttactttcgtttcgacaaattgattatgctgtagcccttcaggtttcatctagacatttcggtgtcttggagcacattcttttttctgataaaaaaagggaaacaaaggcaaaggagaaccgaaaaacgacgaaacgggg

SEQ ID NO: 10839 - DNA, 760 bp, Zea Mays
ttaaaaagaagaagaaaacatcgtgtgtggagcagaaagctccggctccgtgcgaagaggatggatagataagcaacgggtgggcctcgatgaggagaagcctgggccactaaccgccgccgcatcgggagccttcgtttggccacggttcagctagctatcacgcgcgaaggcccacccagacccagcgcatcagggaggcggcgattcgcggcggtgagggcgtccgcggagacgatggcgacggagaagctgggcatcaaggtggagcgcaacccgcccgagtcccgtctctccgagctcggcgtccgccagtggcccaagtgggggtgcgagaagagcaagttcccgtggacctactccgccaaggagacgtgctacctgctgcaggggaaggtgaaggtgtaccccgaaggccacggggaggagttcgtggagatcggcgcgggagaccttgtcgtcttccccaagggcatgagctgcacctgggacgtcgccgaggccgtcgacaagcactacaacttcgagtagccgccgccgccgactagccctgcggcgctcgatgtagacttgctgtgctcttgtactctgaacctatgatgctccactccagagttaacagaccgtgtaataaagctccggattaggggactacaatgctgtactatctgtttcagatcccgttcggttagctgtgataagacctgaaactattccagctgatcagttttaatacaaataaaactatggaacaaaaaaa

SEQ ID NO: 10840 - DNA, 55 bp, Zea Mays
gacagaggcatcagtcgcggagaggatctcggagaggaaggcgtcagtcgcggag

SEQ ID NO: 10841 - DNA, 1605 bp, Zea Mays
agctccaatctaacccactttcattcagatccattcaatgtaacgacgaacacagcagggtatactcggatcccagttacgcaacacacccacagggacagaccctggcattccgacactacgggagaaaagagtcttcggggctataagcaaactgaaacggggaacacaagaggaagagaaactagggaaaccgctaacaactagccaactgctctccatccagtagcgatgaggagatcgagcaacgcttatggggccatgctgccagttccacagcctgccttggttggtcaccagttcccttgcaccgcatcctggctatggagctctggttgcacgatcgagttaaccggtcttggcgactccgttggagaggacgggtttctctggtgctgtctgggccacctttgctgcataggaaacaacaggagcagtgatgccgttctctgcgggagccttcaccgccttcacctctgccgtgacaccatctggtacggacggattgggcttcccattagcaggttcctgcggtcgctcaccggtgacagaaacgggggtcctagtgtcccagacctggacgattcaagacagtcgaacccacaggtattatagacagggcaaggtgatgaaatctgcagttgacaaatataagccatgtatttggggctccaaacctacctgcttttggagctgctgctgtttcgacctcttatcctgcatcaacttctggcggctctcgtagaaggcaaagtcgtcgaggatggaagtcttgctgacatgatccttgaatatcttgagcatctcctgagtgtcgcggctgtttgtgacaggcttgttctcattgttctccaggatgatgtgcttgagaatattgttgggcacgtccttcacaatgtgccacttaacagagaaggagccgttccacttgtcctgttgccaatactctagggttttctcaaaatcaacggcgccagtcatttcagcaacaccaacaaactgcccacttatccttactgagaagaacaagaatatagggcatgcagatccctttgactgagcttcttggtaagcagcatcaagcttcttgtttccgttggttgtgcttgcccacacattgtattttacgctcttgtggatgtcatcctcgctgtacgatttaatgacaaagaactttgcagcatcgtactgaacagggaagtcatctctattgtactttgctctatcaggcacagcactatcattcttgctttcactagaagggagagactgccctttcacagcaatagtgacagtatgaccgtacaatttctggttcttgaaccggccagatctaggacctctgtttaactcaattgttccatcctgactctcattgccataaccatagtatccactacatgccctgggcctgtacctgttatccataccattaccaagaccacatcgaccatatatcctggaatcataaccgttactcccgtagggaagaccagtttttactgaattcccatactgggtgtacggtcgggggctagggtacatcctattgggataggtaggagctgctgatgtagttgtaggtcttctattctgcataccctg

SEQ ID NO: 10842 - DNA, 687 bp, Zea Mays
aacggcacgcgctcgtctcctcaaaagcggaaggccaaaggcgcaaggtgactggcgaaacgcgttgttttcctcttttccccaaggcaaccaaaccatctcgattctcgactcgtggggaagtttcgctctcgccggcgtcgacggcctagggttcgaggaacgtccgtccgtccgtccggggaaggagcggtagggaggcggagatgatcgaggtggtgctcaacgaccgcctggggaagaaggtgcgggtcaagtgcaacgaggacgacaccatcggcgacctcaagaagctggtggcggcgcagacggggacgcgccccgagaagatccgcatccagaagtggtacaacatctacaaggaccacatcaccctcaaggactacgaggtccacgacggcatgggcctcgagctctactacaactgagccgccgcccctctctccctctcgtcaggttggtctgaattctgaagtcatgggtgcaattcgcttcgcggtgatctcttaagctcatcacatatataaaagcaacctcagtgggctatgtaagacatggcgtgccaaactatcagtgaccactgacagctttgcaatacgttgttgtatggtcaacctgcaaacttggtgtactgctactcgtactataaataacatagggttttaaccttggttgtggtaaaaaaga

SEQ ID NO: 10843 - DNA, 55 bp, Zea Mays
tatcaataaattcatttcttcctacaccagtaatcctcagagcatctgcagcact

SEQ ID NO: 10844 - DNA, 56 bp, Zea Mays
aaaacacacaatttttttttttttttttttttttttttttttttctccccccccct

SEQ ID NO: 10845 - DNA, 830 bp, Zea Mays
cttttcgctgtggcacctaaagcatgtggacatactgaaggaaggaaagtcatatcaagggaggaagctgtcatgcacataaaagctgctgtagatgctaggaaagagagtggctctgacattgttattgtagcaaggacagattctcgccaagctatttctcatgatgaagcattatggagggtgaaagcatttgctgatgctggagcagatgttctatttattgatgcccttgcttcagtagaagagatgaaagcattttgtgcggttgcaccagaagttccaaagatggcaaacatgttagaaggtggtggtaaaactcccatattgagccctgctgaacttgaggaaattggtttcaggcttgtagtatatcctttatccttagttggggtatcaatgcgtgcaatgcaggatgctctagttgcgataaaagacggcggtgtacctccacctagcgtcctgccatcttttcaggagatcaaggatacattgggtttcaaccgctattataaagaagagaaacaataccaagtggacaagtgaaggaagcagctgaagtctgatcctgtggattcagtcggatcgtggccatggcttaatttccaccggacatgctgggcttccaccggacatgatgcagaccaatcgtatttatgttgagttgtaatcgaacgctgcgtagcgcagtatcccgaagaacatatatatggggtcttctcttccgtttctgctctgctgtggtttcaataatcccgaaattgtgattccagtttaatataacaggccagcttgatggggctttcgttatgccagagcacactttaccc

SEQ ID NO: 10846 - DNA, 564 bp, Zea Mays
caacactgtgttcaaacatttgatcggcatatttccagaaatcagtggaacggaacgcatcgtagattgagataaaaacagcacctgctgacttccgcttccctacaacaaaccaaacaaggcattgttttactcgctatgtcgagtaccacaggtgtttgaatgccaaaggggatgatgctggtgtttgcgaaaaatttgccaagtactacaggtccctttgccctggagaatgggttgagaaatggaacgagcagagggagcatgggacgtttccaggacctctctgaatgtaccgcccgagacctccagttggaccagtcaacaagttggccaggcagtcctactgttccattctgcattcctacttccagaatcgtaaatgccttttgtcccttgctcttcaaccagtcaccacaaaactgttagtgatgcctctcgtatgcagctctaataatttggctacagttgccccacatgcagccttgttttgtgtgtggactgtggacctcattttgtaaacgtctgaatggacttgcattttctttctatgtataaaaaaaa

SEQ ID NO: 10847 - DNA, 1109 bp, Zea Mays
ctttggaaattctgtgcttttgagggaaacaaaaggagctcaggtggtgggatggccaccaatccgaagctaccgcaagaacacgatgtctaccacccagctgaagggcagcaaggaggatgctgaggccaagcaggaccaggggttcctgtacgtcaaggtcagcatggatggcgcgccgtacctcaggaagattgacctcaagacttacaagaactacaaggacctgtcgactgcgcttgagaagatgttcagtggcttcagtactggcaaggatggcttatctgagtaccgcaaggatggtgaatatgttctgacttacgaggacaaggatggagattggatgcttgttggcgatgtaccatgggagatgttcgctgactcttgccgcaggctcaggatcatgaaaggatcagatgcaattggacttgctccaagggcagctgataagtccaagaatcgcaactagaatggttgcttcttacagtccagagcaagagggagatatccagtgactgtagggatctttgtggaagccggaaaacgtctaacagtttcaagaagaattctgccttatggtctgtaccacatgtttttgctgctacgcaagtaaagaactccacgtctgtcaatgttagttttacaacatcgtctacggacaaaaaaaaaaccccccgctatttgattgttgctaagccttcgtacgacgtgtaaatggtttggtacaatgagtgctgcgactacgattgagcacccctctacctagtttgcaaaaaaacagtgtcccatggactgtctgttgtccctctatataaatgtccaatgaagcttgctaatgtgtggtcatcgtgttcatgttctggtccattcatctcgacagtgttgaaaccctgacgaagcaacttgtttcgaaagtgggcctcctctgtggagcagtttctttgtggaaactttgattcctctttttttttcttttttttgttaccagctttgatgcctaattgctggtggggcatgcagcgtatgcgattatttgtctgctgctgaaggtcatgatggttaccatctatgatcccacaccaaagtgtcattttttttaaaaaaaaaga

SEQ ID NO: 10848 - DNA, 616 bp, Zea Mays
gtgggcatttctggaatcgccccagtctagggtttcacctgcgtgccctatataattctctccatccacacccgccgtcgtctccgcatttccatcctgtcgtgggatcccagccaccgccgctagaagaagagctcggcgattcccaggtcccgcgagaagatgccgaagcagatctatgagattaaggacttcctcctcaccgcgaggaggaaggatgcccgctcagtgaagatcaagaggagcaaggatgttgtcaagttcaaggtgcgctgctccaagtacttgtacacgctctgcgtcttcgatgctgagaaggcaaacaagttgaagcaatctcttcccccaggtttgaccgtcgaggaggtctgattggatacatggcaacgccgggttgaactacccaagcttctttatcagtagcagagcatgctactcatgtacttttggaacctaagctattagacctgtcagtgttggatgtgtggatcttgcatttttgtggagaaataccaatttacctcgttcaaggatgcacctttcattttgctgtccttgatctcatagaagccgtaaggccagctccagcacattagccaaacccatttggcgtggg

SEQ ID NO: 10849 - DNA, 132 bp, Zea Mays
actggccttcagggtaagtctcaaatggttcaggatgaattggcaaggctgggagaatctatggtacagagtcctgagggaacccgggcagttgctttggagctgtgccgagaatttgaggacaagtttctt

SEQ ID NO: 10850 - DNA, 908 bp, Zea Mays
cttttgatttattggactgcctttttaactttgacgcctggccatgatcctgtccaaaaggttaccttagttccaaggggtcaagctcgtggtcttacatggtttatcccgatggatgacccaacactcatctccaggcagcaactttttgccagaattgttggcggccttggtggtagagctgctgaggaggtcatatttggagagcctgaggtgaccactggagctgctggtgacttgcagcaaattactggcttagccaagcagatggttgtgacattcggtatgtctgaaattggtccatggtctctgatggagggtggagcgcagagtggggacgtcatcatgagaatgatggcaaggaactccatgtcagagaagctcgcggaggacattgattcggccgtgaagcagttgtcggatgaggcctacgagatcgctttgaggcacattagaaacaacagggaggccattgacaaaatcgttgaggtgctcattgagaaggagacagtgaccggagacgagttccgggcgatcctttctgagtttgccgagatccctgttgagaaccgggttcccccagccacaccggcggccgcgctcccagcctaaaccctagccttgtaggggaggattttcttgttgtatggtgttcatattttggattcttggtgtacactaactctactaaatctgccggattttcggtacacgacatgtaagatgtaacttactcatggtgaattaatagtaaaatgtaattagattaaaataataggcctggcgcaacattttcagtttgtagcttcgcttctggcgagcgaaatctcttgctatatgttccacggttcctacttcataaaactatatgttctaattaagaacttgccattttgtttttggaactg

SEQ ID NO: 10851 - DNA, 60 bp, Zea Mays
agcgggaaaatcatcaacaatgacaagaccatacttacttcccccgatgttgagataggc

SEQ ID NO: 10852 - DNA, 74 bp, Zea Mays
gagtttttgaacgcaagttgcgcccgaagccttctggcggggggcacgtctgcctgggcatcacgccaaaagac

SEQ ID NO: 10853 - DNA, 60 bp, Zea Mays
accaagaaccctaattggaaccctggaaaaccctaaacctaaaccctagggggctaagtg

SEQ ID NO: 10854 - DNA, 1369 bp, Zea Mays
ccgcgaggctgagcagcattatcgcttcagctcggcgtcttcacaaacgccggcgcaaactctcgcccgagcccgacagatcttcaattccccattccgcccaccgatcgaccttcacgccagtctcggtctcttccgaaggcgtcgcgcgcggttgtttgagaggagaggaggaagatgagggagtgcatctccgtccacatcgggcaggccggcatccaagtcggcaacgcgtgctgggaactttactgcctcgagcacggcatccagggcttcctggtcttcaatgccgttggtggtggcactggctctggccttggttctctcctccttgagcgcctgtctgtggagtacggcaagaaatccaagctgggcttcactgtgtacccatctccccaggtgtcaacctctgttgtggagccttacaacagcgtgctctccactcactcactcctggagcacactgatgtctccatcctgctcgacaacgaggccatctatgacatctgcaggcgctccctcgacattgagaggcccaactactccaacttgaatcgccttgtgtctcaggtgatctcatcgctgactgcttctctgaggttcgatggtgccctcaatgtggatgtgaacgagttccagaccaacctggttccttacccgaggatccacttcatgctctcctcctacgcaccggtgatctcttctgcgaaggccttccacgagcagctgtctgtggcggagatcaccagcagcgcgttcgagccggcttccatgatggtcaagtgcgacccacggcacggcaagtacatggcttgctgcctgatgtaccgcggcgacgtggtgcccaaggacgtgaacgccgcggtggccaccatcaagacgaagcgcaccatccagttcgtggactggtgcccgacggggttcaagtgcggcatcaactaccaggcgccgacagtggtgccgggtgccgacctcgccaagcgcgcgttcgtgcactggtacgtcggcgagggcatggaggagggggagttctccgaggcacgcgaggacctggccgccctggagaaggactacgaggaggaggaatactgatctgcttgcatgaatctgtttggctgtcgagccaggttgtggtgttgaaaaacctttgtttgtgtcctggcccccctgggtaatgtttgggtgtttccttccatcatcacttgctgaactgctctagtatttgcatttgtaattgaagtctgtcgctttaagcactcttggttctaaagatctctgtgcttttggggggtgtttttgcattgccccagattccaataaactcaccaaattcgggtcgtgcgtagtaatttagttccccggaggcgac

SEQ ID NO: 10855 - DNA, 58 bp, Zea Mays
ttttttttttttatatttttattttttttttttttttaatttttttttttttttttta

SEQ ID NO: 10856 - DNA, 762 bp, Zea Mays
aggcgaaaacgtagtcccagccctccgatcggatcagacggtggagagcacgcatagccagctcaaaaccctagcctccaactcatataccagctgctggccccgacacgcatcgactcccgccgccgccgcttccgctccgtcgctcgcctcacgcctccggcgccacctccaccatggccccgaagaaggagaaggccccgccgccatcgtccaagccggccaagtccggaggcgggaagcagaagaagaagaagtggagcaagggtaagcagaaggagaaggtcaacaacgctgtgctcttcgaccaggccacctacgataagctgctctccgaggtgcccaagtacaagcagatcaccccatccatcctatctgagcgcctcagggttaatggatccttggcacggagggccatcaaggatctgatggcaaaggggctcataaggatggtctctgttcattctagccagcagatatacaccagggcaaccaacacatgatgggtgttttgcgtcttgtggacgttatctagtctagacgacttgatgttgctattatatcaagtttaatttaatcgtggctcgatcaatcttactgtcgtgttgaatgtcgaatatttttgagattattgtactattttaatatcatgttttttataacatttaagaccatgttgccatccaaattttaatcttggtgaggaatatcaaccaatctctgctctgcaattacaattgctgaagttgcaaaaaaaaaaaa

SEQ ID NO: 10857 - DNA, 946 bp, Zea Mays
tgcctgacctatttaaatatttaataaatctaaaaaacgtttgttaaacaagcatttcagattattgtttcggcctactataaacctctaacagaaacaataattctgaacaaaaacgaactcgcacaaactctcttttctttcccccaaccctcccacatatacactttttttcttctcttttataaaaccccaccccgaaaatgtctccgctagtcagagtcctcgcaccgcacgcaacaagtacgcaggcagcgcagcctcgagccgtcgccatggcgagcaagcacctcgtcctcgccgcatgcctcctcctcctcctgcccaccgcctcggtcgccaccgacgtcgactactgcagtaagaaggactacccggtgaaggtgagcggggtgcagatcctgcccgatccggtcgaacccggcaagcccgccactttcaagatctccgcttctactgataaaaccatcgagaaggggaagctggtcatcgacgtaaagtatttcttcttctatgtgcactcggagacccgcgacatctgcggagagacttcctgcccagcgaccggcgacttcgtgctgtcccaccagcagacgctgccaggcttcactccgccgggctcctacacgatctacatgaagattgtcggggacgacaacgaggagctgagctgcatctcgttcgggttcagcatcggcttcgtcgcgtccagctgaacacgtccgagcccgggcacgagaggcatccagctcatggatgtaattacgtgaagcacactctgtatcctatgactttttgtgggtgtctgtgttcaactgagacgtttttatccggagttgaacatcacagtaaagcaaagtcactgataccatgtaatggaactctgagcgcttgatggggcccgtgttttttagactcacaataaagccggtttgtgtttgtgcct

SEQ ID NO: 10858 - DNA, 1593 bp, Zea Mays
cgagagtccattgatgggctggccggcctacgccgacgcacttatataaaagccccgaaccctagaggccagcagcacattcttccccgagtcgccgtcgtctgctccgggctgctgttctgcgcctccacaaggctttggcctctgttgtaagttttaagcttcacctccagccatgggtaaggagaagtcccacatcaacattgtggttattggccatgtcgactctggcaagtcaaccaccaccggccacctgatctacaagcttggaggcattgacaagcgtgtgattgagaggttcgagaaggaagccgctgaaatgaacaaacggtccttcaagtacgcttgggtgcttgacaagctcaaggctgagcgtgagagaggtatcaccattgatatcgctctgtggaagtttgagaccaccaagtactactgcactgtcattgatgcccctggacatcgcgacttcatcaagaacatgatcacgggtacctcccaggctgactgtgctgtcctgatcattgactccaccactggtggttttgaggccggtatctctaaggatggccagacccgtgagcatgctctccttgctttcacccttggggtcaagcagatgatttgctgctgcaacaagatggatgcgaccactcccaagtattccaaggcccgttacgatgagattgtgaaggaagtttcatcctacctcaagaaggttggatacaaccctgacaagattgcctttgtccctatctctggttttgagggtgacaacatgattgagaggtccaccaaccttgactggtacaagggtccaaccctgcttgaggctcttgaccagatcaccgagcccaagaggccttcagacaagcccctgcgtctgcccctccaggatgtgtacaagattggtggtattggaactgttccggttggtcgtgtggagactggtgtcatcaagcctggaatggttgtcaccttcggtccaactggcctgaccactgaggtgaagtctgttgagatgcaccacgaggctctccaggaggcccttcctggtgacaacgttggcttcaatgtgaagaacgttgctgtgaaggatctcaaacgtgggtacgtggcctccaactctaaggatgaccctgccaaggaggctgctagcttcacctcccaagtcatcatcatgaaccaccctgggcagattggcaatggctatgccccagtgctggactgccacacctcccacattgctgtcaagtttgctgagctcataaccaagatcgataggcggtctggcaaggagcttgagaaggagcccaagttcctgaagaatggtgatgccggtatggtgaagatgattcccactaagcccatggtggttgagaccttctctcagtatcctcctctgggtcgttttgctgtccgtgacatgaggcagacggttgctgttggagtcatcaagagcgtggagaagaaggacccaactggtgccaaggtgaccaaggctgcaataaagaagaaatgatgcgtcctcccatgtgccctcgtttattttgtacttgtgcccgtatacttcgatctgttaaaatctattggttg

SEQ ID NO: 10859 - DNA, 75 bp, Zea Mays
cgagggatgctgtgatgagttcgtgagtggtctaggccgtcgccttctagtcaactttgggttgctggatcgttg

SEQ ID NO: 10860 - DNA, 852 bp, Zea Mays
aactgcgggctaggcagttttgtggatgcattcagaagcagatcttcagtctaaaatcaccaataaggtgtattttgacataagcattgggaaccctgtggggaagaatgttgggaggattgtcatcggcttgtatggggatgatgttccacaaacagcagagaactttcgtgctctttgcactggagagaaagggtttggatacaagggatccagtttccaccgtgtcatcagcgactttatgatccagggcggagattttgacaagggcaatggtaccggtgggaaaagcatatatggacgcactttcaaagatgagaacttcaaattggttcacactggacctggagtggtcagcatggctaatgctggaccgaacaccaacggcagccagtttttcatttgcactgtcaagacgccttggttggatggaaggcatgtcgtgtttggccaggtcgtggaagggatggatattgtaaggctgatcgagtcacaggagactgacagaggtgaccgtccgaagaagaaagtagtcatcagcgagtgcggggagcttccagtggtctaagcgttactcatctgttgtccgtttcacttctgacggatgacgatatccccccccccccccccccccccccccatcccatgtgctaattatagagaatatttcgaattcaagtaaggtcccaaatctgaggcatactgttgctgccctgctggaataaatgtgctactttcccctgccttgttaagggaaagggttttgttcacgatgttaccttgtaaccttgtacttatgtttcatacttggaatgaaggttcatggaacaaaaatattctgctgcattgcat

SEQ ID NO: 10861 - DNA, 666 bp, Zea Mays
attttgtcggtaaagaacgtgtgaggatggtgcactagcgaagcccttgtacataatggcattcgggcgaatcccccgttccataatggcataattccatatttctccagctgttccgccgagcgaacgacccacaaccagaagccacccattggcgtacgcgaggcgatcggagcatcccgtcccaagaggagaaactccggccggcgacgcgggggaaaatggggaagacgccggtgcggatgaaggcggtggtgtacgcgctgtcgcccttccagcagaaggtgatgccggggctgtggaaggacatcaccaccaagatccaccacaaggtcaccgagaactggatctccgccacgctcctcctcacccccgtcgtcggcacctaccaatacgccatgtggtacaaagagcaggagaagctttcccacagatactaaatgggatgtcctccaagttgctgcggcttgtcgcagttgaattttccatgatgggttgtataatctgtcaatgtcatttctttgctcagttttagttcaacccattttcacctttccatatgcatatacggtatctgtgcctggcaaacatattttgaggctagctaaatatgaaccttttgtctcttaagttgttaaataaagcaaattatctgacaaaaaaaat

SEQ ID NO: 10862 - DNA, 1042 bp, Zea Mays
ctcaccggcccaccgcaagcgcagaagcacaaccacaacacctcgcctcgtcagatcgaccgggaagaagggagcagaagccaaccggctcgtccgcccgttgcctgtcgtcgctatggccgccgtggaggtgtgcgtgaaggccgccgcggggaaccccgacacgctcggcgattgcccgttctcgcagagggtgctgctcacgctggaggagaagaaggtcccgtacgaggtgaagctcgtcgacctcggcaacaagcccgaatggtttctgaacatcagcccagagggtaaggtgcctttgttcaacggtggagatggcaaatgcattgctgattctgatgtaatcacccaagtcattgaggagaagttcccgactccttctctggtcacccctccagaatatgcatcagtgggatcaaagattttcccagcctttgtcaagttcttgaagagcaaggatgctagtgatgggtcagagaaggcgcttctggatgagctgcaggcactggatgatcatctcaaagctcatggcccctacataaatggggagaacgtgtcagcgactgatcttagcctggggccaaagcttttccacctacagatcgcactggagcatttcaaaggctggaagatcccagaaaacctaaccaatgtccatgcctacaccaaggctcttttcagccgtgaatcttttgtcaagactaagccatccgaggagcacgtgattgcgggatgggcgcccaaggtgaatgcataagagccttgtgctttggtgctacctggtggactccatccatttatcttatcagtctttgtcagtggtgtggataggtgtcaagtctgtagcctagatgcatgattcagttggaattatgcagtgccgtgtctcgagtactcagttctggctgttgcggttgtgcatcttaccttctgttgctggttttgtttgaggccatgggcatctcttggtcctatgctgtgagagcgctgtaatgtgggtaccaaataatggagctgcttttatgcttgtggtgtaata

SEQ ID NO: 10863 - DNA, 84 bp, Zea Mays
aacgctttatgtctttagatttaaagattatggtctggtggtagtctttgatgtctgatgaggttctacttgctaaagtgaata

SEQ ID NO: 10864 - DNA, 76 bp, Zea Mays
cttcaccaatgtgggcttggccatatttcttcttcttgaagtatcctttgttcttgcccccctttttgaacttatc

SEQ ID NO: 10865 - DNA, 54 bp, Zea Mays
ctccacatgaagtaactaaccaaaagataagggaataaaacttctcctggggat

SEQ ID NO: 10866 - DNA, 865 bp, Zea Mays
cgtccgctgctaaaccctagtgagccgcccatttgcgccgccgcagcccgcagtcgcttgcgcgcagcagcacttcgcaccgccgccccatcccattgccgccagtgtctgctcgatccgatggctcccacgaagaagtcgaagaagagcacagagagcatcaacaacaagctgcagctggtgatgaagagcggcaagtacaccctgggctacaagaccgtcctcaagacgctgcgcaactccaagggaaagctgatcatcatcgcaaacaactgccctccacttaggaagtctgagattgagtactacgccatgctggccaaagttagtgtgcaccatttccacggaaacaatgttgatcttggcactgcctgcggcaagtactacagggtgtgctgcctcagtatcatcgacccaggtgactcggacatcatcagtaccacccctggcacccagtgagccagccccggcacccattgcagctgcttcgcctttctcaagatgagatgagatgtcaatcgatgcgctgatgggctgcttggttatgctgtttgtctttgttacgaatcacaaaccacaaacccgtgcctcgtttctcagtttcttgttcatatttaagacattatactctaaaacattatcatcgtgtcgccaagaacagaagccttctacatcatgatttcgacagaagcagtagaaaaaaggattgtaggatggagcatctgctccggtatcgatcatattcttgactcgcccaaacaccacaacgaaccacctctaaagctgccgcagctatctctcctctggtaaaccagcttcccaaccgaaataaatatatgaccatagatcaataaattagccactg

SEQ ID NO: 10867 - DNA, 1133 bp, Zea Mays
tataaataggcacgcccggccgtgagcggagcggagagcatcaaagcaagccatgtggaggagggctttagcgatggtcctgttcatggctggcgccgcgctgctcgccggggctgccggcgccggcgcgcagcagggcgtgtggagcatcatcacccggcccatgttccagagcatgctgagccaccgcggcgacagcgggtgccagggcgccttctacacctacgacgccttcatcgaggccgccagcaagttccccggcttcggcaccaccggcgacgagcagacgcgcaggcgggagctcgccgccttcttcggccagacgtcccacgaaaccaccggtggatgggcgactgctccggatggaccgtttgcctggggatactgccgggtgaaggaacagaaacagacggacccaccctactatggacgaggacccatacagctaactcataagtacaactacaggctcgccgggcaagcgctgaacctgaacctggtgggcgacccggacctggtggcgagagaccccgtggtagccttcaagacggccatctggttctggatgacgccgcagtcgcccaagccctcgtgccacgccgtgatgaccggcgactggaggccctccgccaccgaccgcgccgcggggaggctccccggatacggcctgaccacgaacatcatcaacggtggtctagagtgcggcgaggaccgctccaccgacggcgccaaagccgccaaggaccgggtcggctactacaagaggtactgcggtatgctcggagtggggtacggggacaacatggcatgcgggagccagaagccttacggaggatgatgacactagtagctgatctatggttgctgcaatgcaagccttcacgtgtgtttgcctctctacctaaagaataaatcaagctagcagcaaacctaccttcggcgtgtgtctacttgcttatcatagtgtgtgtccgtgtatgagagatgatgtactgtcacgaactcacgtgtgtatgagagaggatacatgctcgcaagccgagtcgagccgagcatcctccttcagcttgttgagtgggcgatcctagctcggttaaccaacaagctgcaccgagtccaaccgatctcggctc

SEQ ID NO: 10868 - DNA, 179 bp, Zea Mays
cagcacattccatacagagagaacaagaacttgactggaacagcaagatatgcaagtgtaaatacccaccttggaattgaacaaagccggagggatgacatggaatctcttggatatgtactgatgtacttcttgcgaggaagggcctgaaagctgggaacaaaaaacaaaagtatgaa

SEQ ID NO: 10869 - DNA, 1433 bp, Zea Mays
caaaatctcaccaagtctgtcgctttggaaaccgttggtgacaccataaccactcctgttcgtcgtgcacccacgcgggcgaacagtgaaaggcatcgtctcgacgtctcgtgaccgctggactcgccgccgccccaggctagctcgatgattgggtgcgccaagccgctcgcggcgccgctgcaggcatgggctcgcccgccgtctcccgccggtcgccgcctccccccctcgttctgcgcccctgacacctccccagctctcacccgcgccgtcgagagcccaggccagtctcagtctgacgacgccccgccaccacgctcgggtgaggccatctacatagtgtcagacgggaccgggtggaccgcggagcactcggtgaacgccgcgctcggacagttcgagaactgcctcgccgaccgcggctgcgctgtcaacacccacctcttctccttgattgacgacatggatcgacttattgaggtaataaagcaagcagcaaaggaaggggcactggttctctacacccttgccgatccttcaatggccgaggcgactaagaaggcctgcgatttctggggtgttccatgcaccgatgttcttcggcctactgtcgaagccattgcctctcacatcggtgttgctccatctggaattccacgaagctctccgagtcgaaatggtcggctatcagaggattacttccaacggatcgatgctatcgatttcaccatcaaacaagacgacggggctctgccacagaacctctaccgcgcagacatcgtgcttgccggcgtttcgcgtacagggaagacgccactgtcgatatacctagctcaaaagggatacaaggtggcaaatgtcccaatcgtgatgggagtggaccttccaaagtccctttttgagatcaaccaggacaaggtttttggactgacaataaacccagcgatccttcaggcgattagaaagaccagggccaagactctaggttttgatgggcgtcagagcaattacgctgagatggaccatgtgaggcaggaactggtccatgcgaatcaaatctttgctcagaatccatcgtggccagtcattgcggtcactggaaaagctatcgaggaaacagctgctgtcatcttggggatcctccatgacaggaagcagaagtgctccatgccacgcatatcaaaacgatactagcgctgtgttctatcccttctctactacaccttgtaacgtgtgcatgttttgaataagctttgtgtcaagcaccatagccttcatgtaatttttttttgttggaccaccttctaggtggtggcgtttgtatcataaacataacttgaagtttagtgcagcagaaacacatgtatattgcgttgcgtttacgaccttctattggcgttaaagcctcacgttatttggtcattatcgaa

SEQ ID NO: 10870 - DNA, 92 bp, Zea Mays
gcaatctcgatatccccttttgttggttgtggcagaacctcccaagttattgggcccacatgcacctgtccttgtcttaaagacctcagacg

SEQ ID NO: 10871 - DNA, 54 bp, Zea Mays
ctttttcctttttttctttttttttcttttttttcttttttttcttttttattt

SEQ ID NO: 10872 - DNA, 1474 bp, Zea Mays
tcttaatccactccgattttctcattactatagtacctaaactaggtctaaagtgataatgatgttttccactctattgcagggagttgctgggctttctcaacaatagcggctgtggaaggcatcaaccagattgttactggcgacatgatctccttgtctgagcaggagcttgttgactgtgacacttcatacaaccaggggtgcaatggaggtttgatggactatgcgtttgagttcatcatcaacaacggcggaatcgacaccgaggaggattacccttacaagggcacggacggacggtgtgatgtcaacaggaaaaacgccaaggttgttactatcgacagctatgaagatgtaccagcgaacagtgagaaaagtctgcagaaggcagttgcgaaccagcccatcagtgttgcaattgaggctggtggcagagcatttcagctctacaactcgggtatcttcacaggaacctgtggaaacagcgttggaccatggtgtcacggccgtcggctacggcacagagaacggcaaggactactggatcgtgaagaactcttggggcagcagctggggcgagtccggctacgtcaggatggagcgcaacatcaaggcgtccagcggcaagtgtggtatcgccgttgagccgtcgtaccctctgaagaagggcgccaaccccccgaaccctgggccgaccccgccttcccccaccccgccgcccaccgtctgcgacaactactactcgtgccccgacagcaccacctgctgctgcatctatgagtacggcaagtactgcttcgcctggggctgctgcccgctcgagggcgccacctgctgcgacgaccactacagctgctgcccccatgactaccccgtctgcaacgtcaagcagggaacctgcctcatgggcaaggacagcccactgtcactgtcagtgaaggctacgaagcgcaccctggccaagccgcactgggctttccctggcaacacagctgctgacggcatgaagagcagcgcatgagaaaaacgcagcatggcattaggccgccaacagccagcatgattagagcccccctgcatgcagaatgatcacccggtcccgtagttcacgacgaaagcatggctgggcggccgctgtttacggatttacttatatcactatagtaggtactcctcctgtacataagcctgaaaaaaaatgggttcagttgtttatggaactctgccaaatttgcttttgcatgccatgtaaaaatccagctagctcttgccaagcttcccctgcgcagttcaacaggactgcgattgatattcggtgtaatggaagtatttatcggaacaatcagcaatgttatgctatattcatttcttggacgtgaacaatagattggtcgatcccagttctcagagcggtggcgcagggggatggtccgtctgaggccttgcccaccaccaaacaagaggaagcggt

SEQ ID NO: 10873 - DNA, 2288 bp, Zea Mays
tcatactgtagtttgctgttttcgtcgttcttgtgggcgcctgattgatggctacgacagttccatgagcgagtgggatgattatccgaggtatctaaattcagatggagtggagattgccccagcggtatacggagatatttatggatatgggtatgctccttacggggcatactctcctgccacttccccagttccaacagttgatggtcagatgtttggtgcacagcattaccagtatccaactgcgtatttccagcctcctacaccagttccttctaccactcaaagtgacctacagtcttctaaaaatcctgaaaagccagcagctaaagcagatccagccaagactactaacggtgttcccaatggtactgctcacagtaacagtggaactgtaccccttgcgtcgagccaacaaaattcatcactgacgcctgatggaacttatagggcgcccttgctaggtggagttccttctgctggttacctggacacgacatatgggtatgacagcacaggggcacactttgcatggtatgatggctctgcttatgcaaatggacaacaaagagcaactacaactaaccattttccatcctcaacatttggtaatggttccccagcaaggtatcagaacaagagcaccaccacaccgcagatgggtatgcagaatagaagacctacaactacatcaccagctcctacttatcccaataggatgtaccctagctcccgaccgtacacccagtatgggaattcaataaaaactggccttccctacgggagcaacggttatgattccaggatatatgggcgatggggtcttggtatggataacaggtacaggcctaggggccgtaatggatactatggttatggcaacgagagtcaggatggaacaatcgagttaaacagaggtcctagatctggccgtttcaagaaccagaaattgtacggccatactgtcactattgctgtgaaagggcagagccttccttctggtgaaagcaaggatgatagtgccgtgcctgatagagcacagttcaatagagacgatttccctgttcagtatgatgctgcaaagttctttgtcattaaatcgtacagtgaggatgacatccacaagagtgtaaaatacaatgtgtgggcaagcacaaccaatggaaataagaagctcgatgctgcttatcaagaagctcagtcgaagggttctgcgtgccctatattcttgtttttctcgtgaatacaagtgggcagtttgttggtgttgctgaaatgacgggggctgtcgattttgagaaaaccctggggtattggcaacaggacaagtggaatggttccttctctgttaagtggcacattgtcaaggacgtgcctaacaacattctcaaacacatcatcctagagaacaacgagaacaagcctgtcacgaacagccgcgacactcaagagatacacctagaacaaggccttcagatgctcaagatattcaaggagcatgtcagcaagacgtccatcctggatgacttcgccttctatgagagtcgccagaagctgatgcaggataagaggtcgaaacagcagcaggtccaaaagcaggtctgggacagtaggacccccatttctgtcactggaagcgagcaacagcaggaagctgccaatgggaagcccaatccgtctgtaccaaacggtgtccctgcagaggtgaaggcggcgaaggcttctgcagagaacggcaccgccactccagctatttcctacgcggcaaaggtggcccaagcagcaacagagaaacctgtgctcgccaacggagtcgctaagaccggttagctggaccgcccaaccgatgctccatagctagccgcgagcgacggtcgacgtccccaagagctcgaccgaatcactgtacaagggaaactggtgaccaaccaaggcaggctgtggaactgggcaggcatggcgccctagagcgttgcggctccatctcgtcgctgctggagagcagctggctagctgttagcgttttccctagtctctctctctgttccccgtttcagtttgcttatagcccgaagacttttctgctgtagtattggaatgccagagacctttggccggacaagaggaatttgcgaaggccgtctggctgggtgtgttgcgtcgtcattggggtcgagtatggccggttgtgttcgtcgttatattgagtggatccgaatgaatgtgggttagattggagctttccttttctttctctttcctttacctgtttgattattgcggac

SEQ ID NO: 10874 - DNA, 2495 bp, Zea Mays
gccgccgccgttgaatggtcgggtagaggacgtaaccatggttcactgccgggccctttaaaagccgagccgggctcgtcccatccgccccacgaccgcttggcgcttcatcactcgttccctttcgaaagcccgcgcacgcacgtcggtcgtcccgagcaggacctcgatcggccgagatggcgacgccgaacgggcttgcgcggatcgagacgaccgggaagaagaagcaggacaacggcgtgtggtacgacgacagctcggcgccggtgcgcgcgcagaccatcgacgagctgcactcgctgcagcggaagcggtcggcgcccagcacgcccaagcggtcggcgcccaccacgcccatcaagggcggtgcccactcgcccttcgccgtcgcgatctccgaggaggagcgccacacgcagcagatgcagtccatcagtgcgtcgttggcgtctctgacgcgtgaaaccgggccgaaagtggtcaagggcgacccggccgcgaagggcgaggccgccgcgcagggcgcgccatcgacgccgagggcgcaccagcagcaccgccaccccgccgcccccgccatcgccgtcagcgacagctccctcaagttcactcatgtgctcaacaacctctcgcctgctgagctgtacgagcaggccatcaagtacgagaaggggtcgttcatcacgtccaccggcgcgctggcgacgctgtccggtgccaagaccgggcggtctcccagggacaagcgcgtcgtcaaggacgaggtcaccgcgcaggacctgtggtggggcaagggctcgcccaacatcgagatggacgagaagacgttcctgatcaacagggagagggccgtcgactacctcaactccctggagaaggtgttcgtcaacgaccagtacctcaactgggaccccgagaaccggatcaaggtccgcatcatctccgccagggcgtaccactccctcttcatgcacaacatgtgcatccgccccacagacgaggagctggaggacttcggcacgccggacttcaccatctacaacgcagggcagttcccctgcaaccgctacacccactacatgacgtcgtccacgagcatagacctcaacctcgccaggagggagatggtcatcatgggcacgcagtacgccggcgagatgaagaaggggctcttcggcgtcatgcactacctcatgcccaagcgcggcatcctctcgctgcactccggctgcaatatgggcaaggacggcgacgtcgccctcttctttggcctctcaggtaccgggaagacgacgctgtcgacggatcacaacaggcttctgatcggcgacgacgagcactgctggagcgacaatggcgtgtccaacatcgagggcggctgctacgccaagtgcatcgacctggcgcaggagaaagaacctgatatttggaacgccatcaagtttggaactgtgctggagaacgtggtctttgatgagcatactcgtgaagtcgactacgccgacaactctgtcaccgagaacactcgggctgcctacccgatcgagtacatccccaacgccaagataccatgcgtcggcccgcaccccaagaacgtgatcctcctggcgtgcgacgccttcggcgtgctcccgccggtgagcaagctgaacctggcgcagaccatgtaccacttcatcagcggctacaccgctctggtcgccggcacggaggacggcatcaaggagccgcaggccaccttctccgcctgcttcggcgcggccttcatcatgctccacccgaccaagtacgccgccatgctcgccgagaagatgcagaagtacggcgccaccgggtggctcgtcaacaccggctggtcgggtggcaggtacggcgtgggcaagaggatcaggcttccctacaccagaaagatcatcgacgccatccactccggcgagctcctcaccgccaactaccagaagaccgaggtgtttggcctggagatccccactgagatcaacggcgtgccgtcggaaatcctcgacccgatcaacacctggacggacaaggccgcgtacaaggagaatctcctgaggctcggcgggctcttcaagaagaacttcgaggtgttcgccagctacaagatcggggacgacagcagcctgactgacgagatcctcgccgcaggccccaacttctgaactaaagcaatggatccggatgaataaaacgatggcgtgcgtgcgtgggtgcgtgtgaagatgattacgacgacgacgacgaaaaaaaaggtgttggatcgatgagccaacatagtaatagattagctgggtattgtcatgggtgcgtctggtgttgttatctataaggctgtctgcctgtctcaagcagctatcatattctatttcaaattctattctgtaagcgtgtagttcaaaacaatgctttacacaaccatatgcacagtctatctaaggttggtctgttctatcagcttgttgggaaaaaaacaa

SEQ ID NO: 10875 - DNA, 647 bp, Zea Mays
ctgactgccaatggaagcacagcctgtgcatccacggcgctggacaatgaccatgcttaagcaagcgtaccacaagtgaaggacttagagaagcctttgcggagtttggtgaagttttgcatgctcgagttgtgaccgatcgtgtcagtgggttttctaagggatttggctttgtaaggtatgctacgaccgaagaggcagccaagggaatagaaggaaaggatggaaagttccttgatggatgggttatttttgcggaatacgctaaacccagaccaccgccggaggaaacagggatgaattcgcagccccagcagtcatggggagctccatcaggttcctggggtgcacagtagatgaagtgatattgtgagagcccctccctgtcccagccctggggctcgtagcggatcgtgagggatgaatttgtgtgtggtgtgtcgcaggtgtgaatgcctttgttgtccaaatattcctacgtgttggggtggtcgcttgctcgcgtccacgtctttcacatgaattggttactgtggtagttgtagttctggatacggtaccaaaacaaaagtattgctgtcaacaatctgcaacagccgggaaaacagtcgaaaacctttgcaaataatgcctgctgccgtggaaaa

SEQ ID NO: 10876 - DNA, 67 bp, Zea Mays
agcgactttggttgactagcctaacgatatagggccaagcgaggtcgacggcgaacgacgatagccg

SEQ ID NO: 10877 - DNA, 775 bp, Zea Mays
tttggcattgcgtggatggttgtttcatagagagtgagatgctgcaggagtccaatatctccaagttcaagtcccaagtgcagagctcgcaggaaaaccatttctctttactacagcgggagactgagaaacttcgcggagatattgataagatgaggagtgaactgaagtatgagatcgacaaggtcaccgcaggacagcgattggatctgaatcttgaaagagggcgcatacgtgatgagcttgccaagcagaatgaggaaaccactgagcttaccacaaagcttgacaaggaaatccactcactgaaggcccagttggaggcagcaaagtacgatgtcatcaagtactgcataggtaccattgtttcgatctcagccgtcggcctcgccgtcctccgcatcgtgatgtgaaggcagcaaagcaaatacgttctttggttttacccatattcgtcgcccgtccgtggaaacccgcaagaagagaataggttctaattctgttcctagtttttaaaggggacaaaacgtgctcaggggagggggacacttggtagtagggagatgttgctcaaacttgtaaaaatagattgcccgtggaagaaatgcatccgaaatgattctttacctgtgctgaagcgtgcctggtctccagagctgctgaagccactgttactgtgggggatcctgaactgtgttagcctcgtcctgtgttggagccagcaatttgggctctgccatctggccgttatcagttctgcccactcgtttgattt

SEQ ID NO: 10878 - DNA, 1176 bp, Zea Mays
gggtgcgggccctcgctgcgcgggcagaatcgctgatatgcccttgggccacgccttccttcttatcccctgcgcctgccctcccctcctgcagcgcccgtcgcctccctttccccttccctccctccctctccccgcgggccgccagaggcaatttcgccctcgattcgaccccgattcgtccgcccgcgaccgggattccctccgccaagcgcggatctgaacgctgcgctccgtgtcgccgctcgaatccgccatgaagggggccaaatccaagggcgccgccaaggccgatgccaagctggcggtgaagagcaagggggcggagaagcccgccaagggcaggaaagggaaggccggcaaggaccccaacaagcctaagagggctcccagcgctttcttcgtgttcatggaggaatttcgcaaggagttcaaggagaagaaccctaagaacaagtctgtcgctgcggtggggaaagctgctggcgacaggtggaaatccctgagcgagtcggtaagctccatcttctgtactaaagtagtagttgattggactagaaatctcgtgctgattaattgttttacgcgtgcgtttgtgtggattgtaggacaaggctccctatgtagccaaggctaacaagctcaagctcgagtacaacaaggccatcgctgcctacaacaagggcgagagcactgcagctaagaaggctcctgccaaggaggaagaggaggaagatgaagaggagtctgacaagtccaagtcggaggtcaatgacgaggatgatgaagagggtagtgaggaggatgaagatgatgacgagtgatggagctcctcgagacaatggaccgtgcttcatccaacaatggagcggctacacaaggccccgtggcgatcacaaaaaaggagcctatatccatgtactagaattattcagtttcactccacatcgtgatgttttatttttacttttgtcgtgctataacggatagcgctcctcgttggcgccactggcgggtggttctgcctctggtctggtgtgtttgtgtgtggtcacacttgccagccagcagaggcgcctgcttgtacctagattactgtttccattgtcgtcatcatcggctaacattgtcataatgtcagtttgggtaatgttagattaagtaattattgtgttc

SEQ ID NO: 10879 - DNA, 77 bp, Zea Mays
aaaggaacctgcgttatcttttaacagatgtgccgccccagccaaactccccacctgacaatgtcttccgcccggat

SEQ ID NO: 10880 - DNA, 2985 bp, Zea Mays
aacctccagcgatcctcgtcttctgtgtcaagtgacggtatttgtgaccatggcagggaccttactccagtcagttgccctgggaacaccatttgggggtcgcatgagaacccattgttggaggtcccatggcaccaggaggcctgcctctatgttggcagtgtcacttagccgccctgtcaagatgtcagcatttgtgggtctaagatcagtgcatagcttctcggtcacaccgacggtgtccaattccaggtcggcagttgcatcttacaggtcatcgcgacagacaagacgatctcgttttgtcactcaggcaatgtttgagaggttcacggagaaagctattaaggtcatcatgcttgcgcaagaggaagcaaggcgcctgggccacaactttgttggaactgagcagatcctcttgggtctgattggagagggcactggtattgcagctaaggtgctcaagtccatgggaataaatcttaaggatgcacgtgtggaggtggagaagattattggccgcggcaatggttttgttgctgttgaaataccattcacaccacgtgcgaaacgtgttttggagctctccttggaggaagctcgccaattaggacataattatattggatctgagcacctgctccttggactgcttcgtgagggtgaaggtgtggcggctcgtgtgcttgagagtctcggagctgaccccagcaatatccgtacacaagttattcgaatgattggtgagaccacagaagctgttggtgctggagttggcggcggcagcagtggtaataagatgccaactcttgaggagtatggaactaatttaacaaaattagcagaggagggaaaattagatcctgttgttggaaggcagccacaaattgagcgtgtggtacaaattttaggcagacgaaccaagaacaatccctgcttgattggagagcctggtgttggaaaaactgcaattgctgaaggacttgctcagcgcatttctacaggcgatgtacctgaaacaatagaagggaaaaaggtcataacccttgacatgggacttcttgttgctggcacaaagtaccgtggagaattcgaagaaagattaaagaagctgatggaggaaataaagcaaagtgatgagataatactctttattgatgaagttcacactctgataggagcaggagcagcggaaggtgctatagatgctgctaatatcttgaagcctgcgttggccagaggtgaattacagtgcattggagccactacactagatgaatataggaagcacattgagaaagacccagcacttgaacggaggtttcaacctgtgaaagtgccagaaccaacagtagatgaaaccattgaaatcctcagaggactgagggaacgatatgagatccaccataaacttcgttacactgatgaagctctgattgcagctgcaaagctgtcatatcaatatatcagtgatcggtttctcccagataaggcaattgacttgattgatgaagcaggttcccgtgttaggctacagcatgcacaggtccccgaggaagcaagagagcttgacaaggagctcaaacaagtcacgaaacagaagaatgaagctgttcgaagccaggattttgagaaggctggggaattgagagaccgtgaaatggaattgaaggcccagataacagccctcattgacaagagcaaggaattgagcaaagcagaggaagagtctggagagacaggacctatggtcaatgaagaagatatccagcacatagtatcttcatggactggcatccctgtggagaaggtttccagcgatgaatctgataagcttcttaagatggaagagactttgcacaagcgtgtcattggccaagatgaggctgtggtagcaattagtcgctccatccgccgtgctcgtgtgggtctcaagaaccccaacaggccaattgcaagctttatttttgctggtcccaccggcgttgggaagtctgagcttgcaaaggctcttgcagcctattactttggctctgaggaggctatgatccggcttgatatgagtgaattcatggagagacacacggtatccaagctgattggttcacctccaggatatgtaggatacactgagggtggccagctgacagaggcagttcgacggcggccatacacagttgtgctctttgatgagattgagaaggcacaccctgatgtcttcaacatgatgcttcagattttggaagatgggagattgactgacagcaagggaaggacggtggacttcaagaacacactcctgatcatgacctcaaatgtagggagcagtgtcatcgagaagggtggaaggaagatcggatttgaccttgactctgatgagaaggacagtagctacagcaggatcaagagcctggtcatcgaggagatgaagcagtatttccgacctgagttcctcaaccgtctcgatgagatgatcgtgttcaggcagcttaccaagctcgaggtcaaggagatagcggacatcatgctccaggaggtctttgacaggctgaaggccaaggacatcaatcttcaagtgaccgagaagttcaaggagcgggtggtggacgaaggctacaaccctagctatggtgcacgcccgctgaggcgagccatcatgaggctgctggaggacagccttgctgagaagatgctcgcaggggaggtaaaggagggcgactctgccatagtagatgtggactcggaggggaaggttgttgtgctcaatggtcagggcggcataccggagctctcaactccggcgatcaccgtttagctcgtacataacaaatgacaaaattaatagcatagtttttgttcaaacacattatcatttatggttagaatatctgtgtatatgtagtggtatagtcaatggggaaatcgttcctgcctctaaattcctttttttcaagttaaggtgtttcttttgtcgcaaaaaaaaca

SEQ ID NO: 10881 - DNA, 60 bp, Zea Mays
taaatatttttttttatttttttttttttttttttttttttttttttttttctacaaaaa

SEQ ID NO: 10882 - DNA, 55 bp, Zea Mays
cggtttctttttctgctattacgccgaggctttcctgctcacagcttcggtgctg

SEQ ID NO: 10883 - DNA, 58 bp, Zea Mays
ccgatccttgggattctttgatgacgcacggaatgacgacgatcttcgattgaagtct

SEQ ID NO: 10884 - DNA, 1004 bp, Zea Mays
ccgtccgatccgacagcacggcgtatctacgccgtcggccgcagccggcgcctgctggccacacccgccggaccggcccggcaggtggcagtttaatagtacaaaccaggctgatcctggcggcaaggaccaacgtgctcgatctccatctcgaccgtcgctcaccgggaagctacgctacgacgaagcatggcgatgctgggcgtggccgggatgctgatcccggaggtgctgaccaaggccgggctgatcaacgcgccgcagtggtacgacgccggcaagtcggagtacttcgcgtcgtcgtcgacgctgttcgtgatcgagttcatcctgtttcactacgtggagatccggcggtggcaggacatcaagaaccccggcagcgtcaaccaggaccccatcttcaagagctacagcctgccgccgcacgagtgcggctaccccggcagcgtcttcaacccgctcaacttcgcgcccacgctcgaggccaaggagaaggagctcgccaacgggaggctggccatgctggcgttcctggccttcctgatccagcacaacgtcaccggcaaggggcccttcgacaacctgctgcagcacctgtccgacccatggcacaacaccatcatccagaccctgtcgggttgagtcgacggtccatcaggtcatgtggtccgagctgaaaggccgagactcgaagacagttcgtgtgatgcgttcttaatcgactgagggctaaggaatgtgacgtactggtatatgtacattagttgaagcggaggctataaagggtgtagagattgtttcatcagtgtatatcatctgtcccgatgggttttgttttgtgcttttcacgattcattgtggaagcacatgtattattagtacaagaactgctagtagatatataggcttataattaagcacgacttctaaaacctcaacgtacgtatgtgaaagccccatatgatggtaaacaaaaggaaaatacaacattacatttgtat

SEQ ID NO: 10885 - DNA, 83 bp, Zea Mays
tccattcccctgctgccaattctctgaactgcttcgacccttcaactcaatctgcatgtacccaggtatggtgatgcttgcaa

SEQ ID NO: 10886 - DNA, 66 bp, Zea Mays
tatcttgatcgcgtcagctcgccagacctgcaactctatatacatcaccctcccgtatcgtcgtca

SEQ ID NO: 10887 - DNA, 1892 bp, Zea Mays
atctccaccgtccatccacttaaaccccaccctcagtcctcacccaccaccttccattcccagtcccaccaccacttgtctcaccgccgccatggcgtcctccaccgcggcctcgccgctcacctgccaccacctcggcagcgttggtgcccgccctcgcctcccgtccctctccatctccctccgccgccgctcctcctcttcctctaagcccacctccctttcccactccctcccctccaagcactcgctggccccaccccccgccgcatccgcatcctcccgtcgcggtctcacccccgtacccgcctccgcctccgccgccgcggctccagcgccggatccagtgccggttccagcaccggctccagcgccggctccagcaccggccgccccgccgaagaagcccgcgctgcagggcgcggccatcaagccgctcctggcctccatcgcgactggcgtcctcatctggctcatcccgccccccgccggcgtgccccgcaacgcgtggcagctcctagccatcttcctctccaccatcgtcggcatcatcacccagccgctgcccctcggcgcggtcgcgctcctcgcccccgccatcccctccgtctcggcgcgcgctggcggcatcttcctaccgctcgtcaagtctctctgtgaggcatgcggctcgcgcgccggcgacggcacggagcgccggctcggagcctggctcatgctcacgtgctttcagacctccgtcgtctcgtcagccatgttcctcactgcgatggcggccaacccgctctcggccaacctcacagctgccactatcggcgaggggatcgggtggacgctctgggccaaggccgccattgtgccggggctgctgtcgctcgtgctcgtgccgctcattctgtatgtgatctacccgccggaggtgaaggcgagccccgatgcgccacgcctggccaaggagcggctcgccaagatgggacccatgagcaaggaggagacgatcatggccggcacgctgctgcttacggttggtctttggatctttggaggcatgctgaatgtggatgcggtttctgcagcaattcttggcctagcagtcctcttaatctcaggggttgtcacatggaaagagtgtttggcagagtctgtggcgtgggatacccttacatggtttgcagcacttatagcaatggctggctacctcaacaaattcgggctgatctcttggttcagtgagactgttgtgaagtttgttggagggcttggcatgtcatggcaactctcattcggtgtgctggtgctgctgtacttctactcgcactatttctttgccagtggtgccgcacacatcggagcaatgttcaccgcgttcctgtcggtggcgagtgccctgggcaccccgtcgcttttcgctgccatggttctttcattcctctcgaacctcatgggcgggaccacccactacggcatcggctctgctcccgtcttctacggcgccgggtatgtcccattggctcagtggtggggctatgggtttgtcatctccgttgtaaacatcatcatctggctcggggtgggcggcttctggtggaagataatcgggctgtggtgagcagagagcagcacattaactgcgacatcccttttgtttttctgttgtttttttgtcgagtggggggaggaaaactatttcctgaatttgcggtgctacagatgccgctgtccacagttttgtcgtcgacatgatcgcaatgcaacccattcttttttagttggtatcgatacatttgttcgaaccttccggtggctaattgcgaggccagggtgcagtttttaacgcgcaaaatttgttatatagagtttgtgctcaatggttcttggagatccctatatat

SEQ ID NO: 10888 - DNA, 428 bp, Zea Mays
gcaatatgcatgcacactacatacatttagtggtctcgatcgatggaagaattgtgtcctagccagccggcaaaggtgacctgctgatgatgatgatgagaggcgagtcctacgccctagtcctactactaccctctttgtgtgctgccatccatccgtccccgctagacgatcgaggagagaataacgcagagctctgtgctcccggcctctgtcttctgccgtcccggccgtttaatttatagtctctactgtgtgttcgtcccatgtgtttagcagcagcagcaggtgtattgtgcgggtatgtaatggtattgcaactatattgggtgtaaaaccataataaatgtggaaaaaatgcaaggaaaaaaggcttctactgtttacacttactaccgtacccctttcattcggtgacgtgacgtgac

SEQ ID NO: 10889 - DNA, 237 bp, Zea Mays
  misc_feature (236)..(237): n is a, c, g, or t
ctcaattgctattaacggaagttattgcataaagggttatttggcactaggtttattcccaattgctaatattttatcgaataatttgtgtggcgtcgcaatgcacaatcatagatggttacagtgatattttgccacatggattttgaatgtcatagtgatatttatcgttatgtatctttgttttatactaatttttaacttccgtgtcaacgcacgggcacaaacctagtacnn

SEQ ID NO: 10890 - DNA, 514 bp, Zea Mays
ctgctagggttaatccactggctctcctatatagaagcgcggcgagagctcgcaccgccgccgccgccgctgtcgcatcacaggcctctcttccggtttccccccaaacccgtccgagaggcagtcatcccgccgcgatgagggccaagtggaagaagaagcggatgaggcggcttaagaggaagcgccgaaagatgaggcagaggtccaagtaggcagattcatggagtgtccccgcctggagtctctctgcgttcggttgttgtttactgagtaattttagtttttttactaagacagtctgttatggatcagaaattccttgcgtttgtccgtggtctagatattgcatcaagtgttctgcactttattctttagttgttaaaaaacacactcaacagattgagcagtcaatttagtacgttcacgaggtgataataggacataacacgtacatccaaaaactcgaaggtggtcatatcgtggaggagttccgaaaagaacttcaccaggt

SEQ ID NO: 10891 - DNA, 59 bp, Zea Mays
acatcagatataagtctgtcaatttctgacattgtggtagcgagattatcaatttcagg

SEQ ID NO: 10892 - DNA, 863 bp, Zea Mays
tcgatccgtcagcttcgtatcgggggaactcggagttcgcgttaactggatcatgttccaggacatcacgacgttgctgctcgatcccaaggcgttccgtgacaccatcgacctctttgtcgagcggtacaaggaccaagggatcaccgtggttgctggtgttgaagctagagggttcatttttggtcctcctatcgctttagccattggcgcaaaatttgtgcctttgaggaagccgaagaagttgccaggcgaggtgatctccgaagagtattctttggaatatggaactgacaagatagaaatgcatgtcggagctgtacaggccaacgaccgggctcttgtagtcgatgatcttattgctaccggtggaacactatgtgcagctgtcaaacttattgaacgtgttggagcaaaggttgttgagtgtgcttgtgtcattgaattgccagaactgaagggccgagacaagcttggggacaggccagtttttgtccttgtggaagcagacgcctgagcggaacttgggacttctcagagagtttggcgccgtcgatgctccctctctggagacaacacagtttcccatgttaccatgttggctattttctggctgacgcgtaataaagttttattccaaattgtgatcccctgaatgatttgtcaatgtagacatgattgctgatctttgtaaactgtggcttatgttttgtcaaaatggttctaattattcacatcaattaaggataaatcctgattggagcttgttgtttgttctagtaatgttgctttattgctttgtttgtgcaaccattgatgaaataaagttgccatcgcaataactgaataatggctgatgtatg

SEQ ID NO: 10893 - DNA, 77 bp, Zea Mays
gcgggattctgcaattcacaccaggtatcgcattttgctacgttcttcatcgatgcgagagccgagatatccgtggt

SEQ ID NO: 10894 - DNA, 669 bp, Zea Mays
gacgaagacagacgcgctccgccgtctctgccttgtgggccttacgtgggcctcatggcttaaaatgccatgccccagcaactacacgagtcaacacaggcccggcccggcccggcccggcccaagaacccccatctctcgattcctccaacaaattcccctttcccttactccccatccccacccacccacgccgacgagcaaaccctagcgagcgagagagcccggagccgagagaccagccagccatggcgctgcgtgccctgtacaacgagatccggagcatgaaggtccgcgacgtgccggcttacctgaagccgcgcttgacctgggacaacgtcaagaagagcgccgaccaggccgtcgaccgctacatcgagaagtacatcgacacgagctcgccggaccctctctaccacgtctgcatcggagggatgatcttctcctacttcgtcaatctgccctgggagcgcgcccacctcgcccacctcgaggagatggagaggaccggtgggaagcactagatccgctgccccgtccctcgccggcagcgcgggagcgcaacaatggattcctgcttaacagatctgtctccttaattcacttcgaatttgtgctactcgtcttgttgagtgtaaaagtctgagtcaacatctggagatatgtgaa

SEQ ID NO: 10895 - DNA, 768 bp, Zea Mays
taattctcccatagcttcatagtgtggctcatcaacttatttttccggctgcatcaccaccaaggaacttggaactgtgatgcgctcgttggggcagaaccctactgaggctgagcttcaggacatgatcaacgaggttgatgctgatggcaatggaaccatcgacttccctgagtttctcaacctgatggcacgcaagatgaaggacaccgactctgaggaggagctcaaggaggccttccgcgtgttcgacaaggaccagaacggcttcatctctgctgctgagcttcgacatgtcatgaccaacctaggtgagaagctgacggacgaggaggtggatgagatgattcgtgaagccgacgtggacggtgatggccagatcaactacgaggagttcgtgaaggtgatgatggccaagtgagatgatgtgcctgttttgaagctagttcctctcttgatggtagtagctagtctagtgttggagactgactgcatttggtccgccttgttcctctcgctgcatcaatggacatatccgtttgttttctcccaagggattttaccatgtcggtaatttcgttcaaatttgtttatggttgtattaacatttgtgttatcttggtacaatgatcatgcctttcccttctaaatttaggtgttgaatttcttgtagaaatacgtggcatgcatgtgcagatatatccgattttgtttggttttctcgttacttgtgctgtaattctttcgcagcattattacccaacgatt

SEQ ID NO: 10896 - DNA, 875 bp, Zea Mays
attaatatgcatcaagttgttttctgcccacagttttggtcctatctgtggtgtgccagacttcaagatgaggggaaagaagagtgatgagctcgaacctgtcgatgctggcgatgaagatgatgatggtggtgacgatggggacgaggatggtgactttggggaggagggtgaagaggacgtctcagaaggggagggatatgacaacccaaagggcaatgagaccaagaagcaaagaggtgatcctgaggaaaatggtgaggaagatgaggaagaaccagaagatcaggagggtggcggcgacgacgatgatgacgacgatgacgatgatgagaacggggatgacgaggacgacgacaatggggatgacgatgaggagggtgtagatgaagaagacgatgaccaggacgaggatgaggaggaagatgatgatgaagactcgctccagcccccaaagaagaggaagaagtgaagatcttctgccgctttagttaccgtgcgctgagttctgcctggcttttcgtcatatcctcgcatttcaactttcccatagagagttaagaaggatccacacgttcagcagcacgtgtgggcttgtaggagctttatgatttgaggcaattagggacaactcttatgtcattgttgcttgcttctgtggagtcgaacagatgtttcgctaacataattcgacttgagtgatgaaagcctccagattgaatatgccttctcttttatctcgtatggaatcattgatgcagccctggttgatagcgttccttcaataaatgaattatattggcatcatgacagcttcatgtgaattgcacgtttatactgtgcgttcaaatctcaactaatgtatgactgatcgg

SEQ ID NO: 10897 - DNA, 413 bp, Zea Mays
atgggtgttgctcgtgggtcggttggtaccaccatcgggcgccgtgacacttcgaggagaaggggcggtgaaggaagcattggtgccgacgatgagggcggtggtcggaggcggaggaggcgcgctggagtcgatctcctcaaggatgagatcattacaaacgtccagttgcaggggtcgcacttgcagttgccaccgcagctgcagccgtgggcggcctcgccggactccgccgcggcctcgacgaactcgggcgcggccttcttctccggggccacgccgaggacgacggtggcctgcgcggcggtgctcgtctcctccagcttgagccgcagccgcagcttgatccgcagttgcaagacatcctcgaccttgtggtgcaaaagaagctcgatctcttcaagaatcaatga

SEQ ID NO: 10898 - DNA, 943 bp, Zea Mays
atgaatcagcttgattcgttgattagatcagcaattgagaatagcacttcagattatgataaggaaaagctccaggagcggttggcaaaactctctggaggtgttgctgttctgaagattgggggagctagcgaagcagaagttggtgagaagaaggatagagtgacagatgcactgaatgctactaaagctgctgttgaagagggtattgtaccaggtggtggtgttgctcttctctatgcatcgaaggagcttgataaattgcagacagcgaacttcgatcagaagattggtgtgcaaatcattcagaatgctttgaagacacctgtacacacaattgcctccaatgctggggtggagggagcagtagttgtaggaaagcttttggagcaagaaaatactgacctgggttatgatgctgctaaaggtgaatatgttgacatggtgaagaccggtatcattgacccgctaaaggttatcagaactgctttggtggatgctgctagtgtgtcgtccctgatgacaaccacggaatccataattgtagagattcccaaggaagaggcaccggctccagcaatgggtggcggcatgggtggcatggattactaatgcatcacacccacatacacatcaatgcaggtttttttttagcggtgaagttcatcttcactgtttagcggtgcaagttcatctctactgtattttgttcgatgatgaggtggttgtcaggcggatacagttttgagtctgcggacgtaggacctcacaatagttccaaacggaatagtgtgagaataataaatatgaacagtagttctttgagatatgaagttgtagaccaagattggcttccgggcattttgtgtggaaccaactgtattctgatcgttacattttttggctggggtaaaatcggattgccgttctgttttgtcaaaag

SEQ ID NO: 10899 - DNA, 80 bp, Zea Mays
ctcaaattgattgtgcacggtaaaactagagtcccttacggccgtatagccccaagctccaccctcaatttcacccgagc

SEQ ID NO: 10900 - DNA, 803 bp, Zea Mays
cttcaagagggcgtgctgtatgccaagaaggactacaacctggcgaagcacccacagattgatgtgcccaacctccaggtgatcaagctcatgcagagcttcaagtccaaggagtatgtcagagagaccttctcctggcagtactactactggtacctcaccaacgatggcattgagcacctacgcaactacctgaacctcccgtctgagatcgtgcctgccacgctcaagaagtctgccaggccactgggccgtccatttggctctggccctcctggtgaccgcccaaggggccctggtcgttttgaagacagaccaaggtttggagacagggatgagtaccgtggtggccctcgtggtgctcccggtgactttggtggcgataagagtggagctcctgctgagttccagccatctttcaggagttctggcgcaaggcctggctttggccgtggtggtggcagcggctttggcgctggcccgacctcttccatggagtgaacagtgaagctgcccttagtttggacatgatgtttcccctcccgtgaggcgtttaattttgaaggacggttattatgtactagtaatgttttccggatcggctagtgctgacatgcaaaaaaaatgttccatatttatacattggttccagtatagtagtctttgcaaaacgtttggattttcaagtaagtacgttttcgctaatttacgagtaatcagtcctccgtatggtggttgactggtctgaagggttggtgatgctattttgttcttttgttgtttctagttgtttgcctgtttcc

SEQ ID NO: 10901 - DNA, 626 bp, Zea Mays
cgagaacaagttaacacgggaaagcacaaagcacccatgattccagttcatgccaacctcgccgccgtggaccgttgccatctgtgcatctggattccataaaggcacgcgtgccctgacctctccacaccccgcgtcccaccaacttccattccctaccgcccgcccaccccactccactccgctcctcccactcgagccatcatggccctcgcctcccgcgccgccgcagccgccgtggcgtgcgtcctcctggcgctcgccgcctccgccgcgggggcgggctccaactcccctgcaccggcgccggcggtggactgtatctcccaggccgccagcctgatcgactgcatcgactacgtccagaaggggagcagcgcgcgccgtccgtccgctgcctgctgcggcgaggtcaagaccgcagtggccagccccgtcatcgtgggctgcctctgctccctcgccggctccaactccagtaacctgggctttcccatcgacatgaagcgcgtgctggcgctccccggcgcgtgcggcgcgtccaacgccgccttcagcaagtgcaacatttccgcgcttcccccaaccgaagaaaagaagctgatgagctgtaacacgctcaaaac

SEQ ID NO: 10902 - DNA, 1769 bp, Zea Mays
cccctgccgtcattcagtgtttggaggagttaaccaggcgagaactagaactggctgccgcgtcggcatcacgcggaagaactttggccgtgtcatgatggcccttgcagtggatgtttctcgttttgaaggagtgccaatggctcctccagacccaattcttggggtttctgaggcctttaaagcagataaaagcgagctgaagctcaatcttggtgttggtgcctataggacagaagagctgcagccctacgtgctcaatgtagtcaagaaggctgaaaatcttatgttggagaaaggagaaaacaaagagtatcttcccattgaaggtttagccgcgtttaacaaagcaacagcagagctattgcttggagctgataaccctgttattaatcaaggactggttgctacacttcagtctctctcgggcactggatcactgcgtctcgctgcagcattcatacaaagatactttcctgaagctaaagtgctgatatcgtcgcctacctggggtaaccacaagaatatcttcaatgatgctagggtaccttggtcagagtaccggtattatgaccccaagactgttgggttggattttgagggaatgatagctgacattgaggctgctcctgaaggttcttttgttctgctacatggttgtgctcacaacccaactggaatagacccaactcctgaacagtgggagaaaattgcagatgtcattcaagagaaaaagcatatgccattctttgatgttgcatatcagggttttgccagtggaagccttgatgaagatgcattttctgtcaggctttttgttaagcgtggcatggaagtgtttgttgcacaatcttacagcaagaaccttggtttatattctgaaagggttggtgcaataaatgtcgtgtgctcagcaccagaagttgcagatagggtaaagagccagctgaaacgattggcacgtcccatgtactcgaacccccctattcacggtgccaagatagttgccaacgttgttggtgatccaaccatgtttggtgaatggaaacaagagatggagctaatggctggacggatcaagaatgtaagacagaagctctacgacagtttgtctgccaaggacaagagcggcaaggactggtctttcattctgaggcagattggcatgttctcctacaccggcttgaacaaagcgcagagtgacaacatgacggataaatggcatatttacatgaccaaggatgggcggatctcgttagctgggctgtccctggctaagtgtgattatcttgccgacgccatcatcgattccttccataatgtgaactaggctgaggtacgatagttgagggtcaagctattgatgtttagttccgtggacgctaggctgggatttttgggtccttccagctatacagctcttccgttgtgctccatctggtgtaacttggataaataaaaattttgtcgctgaactaaaactcgtgtgcttttttacctgtaactgtaaggtcagcgcgtggctacagacttgtaaacacttgaatggaaaaaaaacaatgacattaccggatattaatggccaactggccggtatgcgcttaagaagtctgatcttggagatctcgattacttcgactatgtttgcttttttctttcttttcttttggtgtaaactgacaggaaccgcaaatatgattcaaggcacaggcgcagtgcttgcacgtggctggaggctgtagcaggaggatatccttcaagccttcagg

SEQ ID NO: 10903 - DNA, 1052 bp, Zea Mays
gcggctctgcctgaccacactgcatcacaacacacgccagccagccatcgtcacactggtgagctctgcactctgcttagctccgagcttcagtgccttcgttgtttgctccacagtccacacacacacacgtccagctagctgcactgcaccaatggccgccgtcgaggtccaggtcccgactgccgctcccgtcgaggaggctgcccagctggccgccgcctccgccgtcgagaccccgaacgaggagaccgctgctccggcggtggagaccgaggtcgtcgtcgctaaggagccggagccggtggaggccgagactgagactgagaccaaggaggccgaggccgttgctgagccgaccgaggcagagcccaaggaagcagagccggaggccgccgcgccggcagcagagacggaggctaacgaggaggaggaggaggcagcgcctgctgttgctgccactcctgaggtcgcagcgaccgaggaggaagcggcggcccctgctcccgaggccgccgtcgagaagtccgtcgagtgagtccagcccagcgccggacggcggccgatctagctcgctgcgtcagcctgtcacctggcgactggcgtgcgccgcgctggtgccactgccacggcaacagcacggcatggcgccggcataggtcgctaggaaaaacctgcttttgtgttcgggttcacgtcgtgtcctacgtggcgcggcgggccccgcctagtaaaggagcgtcgttttgtgttgtggtcgaataaataatgtgtctgtgtgctgattccgtgtcgggttagtgggcccagtgtcggtgctgatgtggcctacctttacagcacatcggtgggactgggccgttgagctcctgtgtcgtttaatatgtgtacggtgtacccatctagtatgtgtttcgagtgtgtagtaagtatatttgtgtcccatccatctttcgaaactttctttttgttaagctcttgaagcgtgaactctgttacgagctgctcgccctattctaaattataaaatattttagtattttcggcatata

SEQ ID NO: 10904 - DNA, 65 bp, Zea Mays
gttagtccctgttgtgctgtcaccttggaactcttcaccactaggctagctgaacctgaagacgt

SEQ ID NO: 10905 - DNA, 69 bp, Zea Mays
tgtactctaatgcatttattcccttgcacacaaaatcaaacaaagtttttaagttctatggacttggag

SEQ ID NO: 10906 - DNA, 52 bp, Zea Mays
aggctacgccctatgcctataaatagatgaacaatacccctgtactgttcac

SEQ ID NO: 10907 - DNA, 134 bp, Zea Mays
ctaggtttttgatcttactattgtgaagccttctgactttgtggaatatgctctggcttgtttggaacaacttgctgactctggtgatcacagtgcgaggtttgttcgccataatctacgagtcatggtatgta

SEQ ID NO: 10908 - DNA, 63 bp, Zea Mays
agagctccaacggtcggaacccaacggcttttgtgacgtggctggcgcaccggacatgtccgg

SEQ ID NO: 10909 - DNA, 1047 bp, Zea Mays
aaactgaagttctcgagcacctgcagcgccgccagacactccgtagtctgtaccccaagcaccggcgcggcggcggcggctaccatggcagtcgggaagaacaagaggatctccaagggaaagaagggtggtaagaaaaagaccgtcgatcccttctctaagaaggactggtatgacatcaaggccccatcggtcttcagtgtgcgcaacattgggaagactctcgtgtccaggacacagggtaccaggattgcctctgatggtctgaagcacagagtctttgaggtttgtctagctgatcttcagggtgacgaggatcaggcttacaggaaaatcaggctccgtgctgaagatgtgcaaggcaggaatgtgctcacaaacttctggggcatgaattttaccaccgataagctcagatctctagtaaagaagtggcagacattgattgaagcccatgttgatgtcaagacaaccgacaactacatgctgcgtttgttctgcattggttttaccaagaggcgcccaaaccaggtcaagagaacctgctatgctcaggcatcccagattcggcagattcaccgcaagatggatgagattatgatcaaccaggcttctacatgtgacctaaaagaacttgtttctaagttcattccggaggttattggcaaaaagattgagaagtctacctccagcatcttcccacttcaaaacgtcttcatccgcaaggtgaagatactcatggcccccaagtttgatctcgggaagttgatggaggttcatggcgactacaaagaggacgttggtgtgaagcttgagaggcctgtcgagggtgatgaggctatgcaggaggttgctgctgccgagtagtttatttgctacttctttatctagacgaatctggacaggaggtcccttatgacgcgaacttcataaaattgtctggcgacatgttttcttctgtccctgccctaaactctaaacccaaaggttattcgtaacaagtgttttaagattatttttgtttatgtttgggttcgaaaaaataaa

SEQ ID NO: 10910 - DNA, 61 bp, Zea Mays
tttttatgtatttttttttttttttttttttttttttttttttttttttttttgattactg

SEQ ID NO: 10911 - DNA, 1246 bp, Zea Mays
ctgaccccccgcacacaaaccctagtaacctccacctatatagtctcttcccactgcgtcaagcctccattcgcaccaccgccgcgccgcccaaatcacagccaccgccgccatggccgcctccagccgccctctcgtctccgtgaaagccctggagggcgacatggtcacggacgcccccggcatcgccttaccgcccgtcttcggggcaccgatccgcccggacgtggtccgcttcacccacaagctgctgtcctgcaacaagcgccagccttacgcagtctcccgccgcgctggccaccagacgtcggccgagtcctggggtacgggccgcgctgtgtcccgtatcccccgtgtccccggcggcggcacccaccgcgccggccagggagcattcggcaacatgtgccgcggcggacgcatgttcgcgcccaccaagatctggcgcaagtggcaccgccgcgtcaacgtcaacctccgccgcgtcgccgtcgcctcggcgctcgccgccaccgccgtcccggccctcgtccaggcgcgcggccaccgcatcgagaccgttcccgagatgcccctggttatctccgactcggcagagtccatcgagaagacctcccaggcgctcaagatcctgaagcaggtcggcgcctacgccgacgccgagaaggccaaggactccgtcggcatccgccccggcaagggtaagatgcgcaaccgccgctacattaaccgcaagggcccgctcgtcgtctacggcacagaaggctccaaggtcgtcaaggccttccgcaacctccccggcgtggacgtcgccaacgtcgagcgcctcaacctgctcgacctcgcccccggtggccacctcgggcgctttgtgatctggaccgagagcgcgttcaagaagctcgaggaggtgtatgggagcttcgacgcgccgtcgcagaagaagaagggctttgttctgccgaggcccaagatggccaacgctgacctgggcaggattatcaactctgacgaggtgcagtctgtggttaagccactcaacaaggaggtgaagcgcagggagaagaggaagaacccgctcaagaacatggctgctgtgctcaagctgaacccctacctcggcactgcccggaagatggccacccttgctgaggctgcccgagtcaaggcccggaaggagaagcttgattccaagaggaccaagcttacctcgaacgtgactgagattaatgttctaatcaggtag

SEQ ID NO: 10912 - DNA, 87 bp, Zea Mays
ttacaataccggggtacaagctcgagagagccagaataaaaaacgcagtaggaaaatatactagcccaagccacaggcagaactggg

SEQ ID NO: 10913 - DNA, 97 bp, Zea Mays
gttgcatatagtattgaaagtgatattgagaatgttaggctacttctaacttacacaaatctcattcctaaaggtcttttacttgatagagctatgc

SEQ ID NO: 10914 - DNA, 226 bp, Zea Mays
gtatactgtcttgttttcttggtgtcatgataatcacggttgggaatggttaaggtttcaagatttgcacaggggatatttggcctagtgtaaggcataagaaggtggttgatcttggttcactgggcctatacctgaataacttgcacagcacagagagctcgcatttcgctttcctttgtggtcagagatccacatccgacaagagggggggggggggggggaa

SEQ ID NO: 10915 - DNA, 50 bp, Zea Mays
gcccgtcggcatcctaggcgaggacgacggcgccagcgagtccttcctat

SEQ ID NO: 10916 - DNA, 920 bp, Zea Mays
cctggtaccctgtgtcctggatacgagaattgcttctgagggtctgaagcacagagtctttgaggtttgcctagctgatcttcagggcgacgaggatcaagcttacaggaaaatcaggctccgtgctgaagatgtgcagggcaggaatgtgctcacaaacttttggggcatgaattttaccactgataaactcagatccctagtgaagaagtggcagacattaatcgaagcccatgttgatgtcaagacaaccgacaactacatgttgcgtttgttctgcatcggcttcaccaagaggcgcccaaaccaagtcaagagaacctgctatgctcaggcatcccagatccgtcagatccgccgtaagatggttgagattatgatcaaccaggcttctacatgtgacctgaaagaacttgtttcgaagttcattccagaagttattggtaaggagattgagaagtctacctccagcatcttcccacttcaaaacgtcttcatccgcaaggtgaagatactcaaggcccccaagttcgatcttgggaaactcatggaggttcatggcgactacaaagaggatgttggtgtgaagcttgagaggcctgtcgagggagatgaggctgggcaggaggttgctgctgccgagtagtttgtttgctacttctgtatctaggcgagtctggacatgaggttgcttatgacgtgaacttatagagttgtcttggctacgtgttttcatctggccctaagattttgtcttgaaacaagtttaaaattaagattactcgtggcgatcttctgtgttcgagtactgatgtactaagttcctttgcatcctcatttttgtttggtcatcgataatttactttctcattcatatgagatgctgttctctgcttatttattgttagctgacactggcg

SEQ ID NO: 10917 - DNA, 73 bp, Zea Mays
gaggctagtaaacacatttatacatcagatgattccaaatctgcttaaatgagacaaacctataaaggtggcg

SEQ ID NO: 10918 - DNA, 594 bp, Zea Mays
aaaagagctactcgagatagtataaagctgcaggcctgcagtcgcccccaaattccccgaaccaaatcactcccaccgtctccacagcaaccagcacacatttccctttggcggatcgaaggaaggaaggaggagatgggtggcggcatggaggtgcacaaaaaccggtggatcgaagagtggaacgccggccgggagaacctcgagttcaacttccgctggacccgccgcagcctcgccgtcgtcggcctcttcggcctcgctgtccccatcctcgtctacaagggcatcgtccgcgaattccatatgcaggacgaggatgcaggtcggccatacaggaagttcctgtaagcggcgtccagggctgcaggatacgtcgattcctcgaccggggctgcgaggaggggagtttccgttcagtttgtgtcggtattgttttagtctgaatctgatgaagcaatttggaatgctgaattattgtgcctgatccaaatgaataaggtgtaatgactcgtcttttcaattactgaaactggagatgtttgaatttacttggtcacttgtatggtaaaatagcagcgttttcaaaaaaaa

SEQ ID NO: 10919 - DNA, 129 bp, Zea Mays
gtacaactattaggctacgcctacgcgtacatatgtatttatgaataaatggccgacatgtggaggagtgatactatatattgagtactggaaaacaagctagtgaaacaaatctgattacattaccac

SEQ ID NO: 10920 - DNA, 52 bp, Zea Mays
catttgttgggcctatgcttcgtcgccgaaggtcttctaggaagaagcggct

SEQ ID NO: 10921 - DNA, 82 bp, Zea Mays
gtgaagtgctggaaacttagatgcttggagtggtggtggttggggtatttatagccctcaaccaccacatagccgttaggga

SEQ ID NO: 10922 - DNA, 1195 bp, Zea Mays
aggattcacaagtgctcgtagcaaatctacaaaatccccaaccgcctctcaacaaagtctccccacggaggtacacagctacgcgcaaaccgcgtctcgcgcgaagaatccgcatttccccttccccgcaccgcaccgcacccaacccccgtcggagagagagatggcatcggtggcggagatgcagcccctcgcgccggcggggtaccgccgcgcgccggagatgaaggagaaggtggaggcgtcggtggtggacctggaggccgggaccggggagacgctgtacccggggatctcgcgcggggagagcgccctccgatggggcttcgtccgcaaggtctacggcatcctcgctgcgcagctgctcctcaccaccgccgtctccgccctcaccgttctccaccccaccctcaacgccacgctctccgactccccgggcctcgcgctcgtgctcgccgtcctgcccttcatcctgatgatcccattgtatcattatcagcacaagcacccacacaatttcgttttcctgggtctgttcacgttgtgcttgagcttcagcatcggtgtggcttgtgctaacacccaagggaaaatcgttctggaggctttagtgctgacggctggcgtggtggtttctctgactgcgtatgctttctgggcgtcaaagaagggcaaggaattcgggtacctggggcctatcctgtcttccgcgcttactatcctcgtcctaactagctttcttcaggttttcttcccactgggacccgtgtcggtgggcttgttcggtgggctaggggctctggtcttctcaggcttcatcctgtacgacaccgagaacctgatcaagcgccacacctacgacgagtacatctgggcgtcggttgggctgtacctcgacatcctgaacctgttcctctccatcctgaacatgctcaggagcatgcaatccgacaactagcctcttgatcgaacacggtatacccccatggtaaatgcggtcctgtgctctggttgttagaggacgggatcgacgtgcgacatatgtattgtgtgagcccactcgtgtcaacactgcaaacaattgtggtcatgtcaccttgtatgttcttggtcacttttcaaacaattgtaagtacctcatatcgttttgcgctcgtgctattcgcgctaaaaatcacaatgatccaaaaaacaa

SEQ ID NO: 10923 - DNA, 84 bp, Zea Mays
ccacctcccgaccgtgggggccccacatccggtcgaagagggctcctgcggattccttcaccacagggtcctcgaccttgtaaa

SEQ ID NO: 10924 - DNA, 1350 bp, Zea Mays
cagcagtgtttcaaaggcgtcacctaggctatgctgtttttgaacttctccaccggaccttttgattctttcaagtctgcctactctgctgccgcggaggaattcaaggacaaggaaatcaagttccttattggtgacatcgaagccagccagggtgccttccagtactttggcctgaaagaggaccagacaccccttatcctcatccaggatggtgactccaagaagttcttgaaggttcacgttgaggctgaccagatcgtcgcttggttgaaggagtactttgtaagtgctggttgacttcaatacactcttgcgagtacttgttcggtttaattagtactattgtagagctcattgacctgttatatttgtaggatggcaaattgacgccgttcaggaagtctgagcctattcctgaggtcaacaatgagcctgttaaggtggttgtcgctgacaacgtccacgacttcgtcttcaaatctggcaaaaatgtccttattgaattctatgccccctggtgcggacactgcaagaagctggcgcccatcttggacgaggcagccaccactctccagagcgacgaggaagtcgtgattgctaagatggacgcgactgccaatgacgttcccagtgagtttgacgtccaaggctacccgaccttgtacttcgtgaccccgagcgggaaggtgacatcctacgacagcggcaggacggcggacgacatcgtcgacttcatcaagaagagcaaggagaccgcaggcgccgccaccaccaccaccacccaggcgccaccggcatccgagaaggcagccgccgccgagcccgtcaaggacgagctgtgagcatccaaggtgtggacggctgtggctgcgtaagcatgggaggaaaacctggcgctaacgtgcctccaacgcctagtttttgcgggaccagagggagagagagagagggacggagttagagagagaggggatctgcgacgtgttttgctctgcggcggcatgtctgtgtatcccattgaggttatgtacacaattacaccgcggtcggtgggtgttttttagttaattatcacaagtgacagtagaaaggaacagattgtgatgaggttgaatggatgaataaatcgctagtccgccccgcctcgttggatgcgtcaatgaaacaggcgcttttgtgacgtgtccaccagcactaacgctggaagcaaactcgaacggagaatgcgcttcggagctcgcacatgtaaatttaaattctaaagagagcacagggtagggtcgtcaatcactgaatcctcgtgtccttaatgtcttgcagtaggggattggagcgttggagggcgat

SEQ ID NO: 10925 - DNA, 944 bp, Zea Mays
cgcgtgatgcgaaaatggtttggttgtttggtgctgtgaatgacatcttctgcttgttccaagggcatattgagaacattgccaacctgaagcagcattatggcctgagcaagactgcaaatgaggtgactatcctcatagaggcctacaggaccctgagggacaggggccctgtcccagccagccaggttgtgagagaccttagtgggaagttcgcgttcatcctgtatgacaccctgtcgaagtctacctttgttgctgctgacgctgatggtagcatccctttcttctggggcgttgactacgaaaaccaccttgtgttctctgacgatgttgggatcctcaagacaggctgcggcaactcgtacgctccatttcctaaaggttgcttctacaccacctccggtgggctgcagagcttcgagcacccgttgcacgaggtcaaggcggtgccacgcgtggacagccaaggccagatgtgcggctccatcttcaaggtcgacagcgagagcaagaagaagcaggacgctagcatcccccgcgtcggcagtgctgccgactggtccaaccagttctgaccatcttcttgccatccattgtcccggctagtacgaggtgcagagctgtgtatctgatgaatccatgagacgatttctgctacgtttcttgcacgcttgtcgaacactgtgagactcacatcgcgctcatctacgctacgtgtaactgatactaatgatacggagtgttccaggtggtggtagatgtactgcagaatctatctcccatgtttcaataaacctgaataaggtgctcggtttggatctatgcatttatgattctagtacttctgaatcgaattttatcgcatcctttcctttttcttcttgttctcctgttctgcatttcagttctgtctggcggacggttacccgttaccgtggtag

SEQ ID NO: 10926 - DNA, 71 bp, Zea Mays
ggaaacggaggtggagaccgagctggaagtgggcgcgagctgggcgagcacggacctgaggaggggcgagc

SEQ ID NO: 10927 - DNA, 793 bp, Zea Mays
ggataagataaaataaaacaagcaccagggacagggagtggctagaccgcagcaattgcgattgcgagtcctccaaaccatggcgctcgccctggcctctccaatggcgtctctctccttccactccgggaggatctcggcggcgtctatcggaggcgtcggccgcactcgcagggcggccccggtgggcgtatccgcctcgccgttcctccggagctccttcgtctcgtcctcctccacgtcgtccgcctccgcctccgcctcccccgcttcgctcgcggcggctgtctcggcgtctctggcatttacgtcctcctccgcgtttgcgggttcatctttgggaatcgagttcagctacagtataatgacaacacggagatcccgtggtatgcagattagggctggaaaggctgccctctgcatgaccaagaggtcaaggtctaggaagtcacttgcccgtacacatggtttccgcaggcggatgcggactacttctggaaggaaggtactgaagcgcaggcgcgccaaaggcaggaaggttctttgcacaaggacaaactcaaacagtgggaagaaaagaatgttctaattacactgcaatttgatgtgctcgcaactgtaagtgtaatgtctacttgcaatcttctaagccgccatctatgtgtaacaatcatgtagcatcctattcctgtttaattggttaaaaatatctggatcaccttctgcttccaaggttttatttggtgtatgaatgatattttcttatgaatatttactcttccctaaaaaaaaa

SEQ ID NO: 10928 - DNA, 1124 bp, Zea Mays
atgtgctctaaattaactgcagatttgggaaaagccaggtcacagtcccttgtttggatatgacttctggtaccagcctcgccacaagacgatgatcagttcgtcatggggagcccctgcagcgttcaggacaggtttcgatcttcaacatgtccaggatggcctgtatggaaggcacctgcatgtgtacgactggcctggcggtgagctcaagcagacacttgatctaggtgacactggactccttccccttgaggtgaggtttttacatgatccatcaaaggacactggctatgttggctgtgctttaacaagcaacatggtgagatttttcaagaccgcggatggatcgtggagccatgaggttgctatctctgtgaaaccactgaaggtccgcaactggattctgccggaaatgccaggattgataactgatttcgtcatctctcttgatgaccgttatctctactttgtaaattggcttcatggcgatattaggcagtacaacattgaggatcccgcaaagcctttcttggctggacaagtatgggttggtggtcttcttcagaagggcagtgatgtcgtctatgttactgatgatggtcaggaacagcagtacaatgtgcctcaagtcaagggtcatcgacttagaggtgggccacagatgattcagctgagcttggatggcaagaggatatacgtgacaaactcacttttcagccgatgggatgagcagtttttcggtgatgatcttgtcaagaagggctcccacatgttgcagatcgatgtcgacaccgagaaaggaggcctggctgtcaaccccaacttcttcgtcgattttggcaccgagcctgatggtcctgccctggcccacgagatgagatatcctggtggggactgcacctctgatatatggatctgaggtcaaggattcggcgtaattaacaggctgctggagaatccctgttgttgtatgcactgtaattaacatggtatccgtgcggtgttctgtcttgtactgcgactgttgccagtggaataaggcatggtttcatgagaactctagattaataaaagaagtcctgattctaaattttctgattgtcactgctctggtttcttta

SEQ ID NO: 10929 - DNA, 68 bp, Zea Mays
cactgaacgggctcccaaaggctgtgccacgaacagtgtttgactttttaaaaccacagataatatgt

SEQ ID NO: 10930 - DNA, 59 bp, Zea Mays
aggagatcgacaccggaccatctatagtgactgtccggtggcgcaccggactgtccggt

SEQ ID NO: 10931 - DNA, 54 bp, Zea Mays
gcctgtatttagccttggacagagtttaccgcccgatttgggctgcattcccaa

SEQ ID NO: 10932 - DNA, 1318 bp, Zea Mays
aaaaaccacaccgcggcggcagctatataaaagccttcacctgacccgggcgctagggtttattcgctcctcccgcccgccgccgtcgccgcctcctctccccagcacccggagctcgcccgaccgccgctcaccatgatcatccccaagaagaaccgcaatgagatctgcaagtacctcttcaaggagggcgtgctgtatgccaagaaggactacaacctggcgaagcacccgcagatcgatgtgcccaacctccaggtgatcaagctcatgcagagctttaagtccaaggagtatgttagggagaccttctcctggcagtactactactggtatctcaccaacgatggcattgagcacctacgcaactacctgaacctcccgtctgagatcgtgcctgccacgctcaagaagtctgccaagccacctggccgcccatttggctctggccctcctggtgaccgcccaaggggcccaggtcgttttgacggcgacaggccaaggtttggtgacagggatgggtaccgtggtggtcctcgtggtgctcctggtgactttggtggcgataagagtggagctcctgctgagttccagccatcattcaggaggcctggctttgggcgtggtggcggcagcggcttcggcgcaggcccaacctcttcttccatggagtgaagttgcccttggtttggacatggtgtttcccttcgcatgtggcctttagttttgaaggacagttattatgtactagtaatattactcggatcggccagtgctgacatatgcaaaaaaatgttctgtcgttatacattggttccagtattattgtcttcgcaaaactcttgggttttcaagttactactttttcactgatatacgagtaatcgtcctgcgtttggtggttggctgatctgatcggttggtcatgctgggatgttgttttgttcgtatgttgtgtcgtctagctgtttctgtttggacccaagaagttctaatctgtcaagtaactgtagcagatataatctctgagaactggttgtgtagtgatattagccatgatgttctgatggtacgagccttcctggggttgtcttttatatttgcagatgattgcatgtataacatgttggtccaggattggtttgttttttttcttttgttttttccggcttgtttgcctctatgttccagcaactgatagttgtcttttatattagcggaagcagatgatgtacaagtatggcatatatgtgttgtattgagatgatgtacacgtattgcattccaatacataaaaagtcgaaagatgagccttcat

SEQ ID NO: 10933 - DNA, 73 bp, Zea Mays
gggagagctttcaccagttggaacacaggcctccacacactttacagcggtctgtgggtagggttaaggcaag

SEQ ID NO: 10934 - DNA, 2138 bp, Zea Mays
ccctgtcccccgctcctgcctcgcctcaccaccattagagcgcgcgcgccaagctcgtggtgaggttttcgagatgaaggttatcgagaagatcctggaggcggcgggggatggccggacggcgttctcgttcgagtacttccctcccaagacggaggagggggtcgagaacctgttcgagcggatggaccgcatggtggcgcacggcccctccttctgcgacatcacctggggcgccgggggatccaccgctgaccttaccctcgaaatcgccaaccgtatgcagaacatggtgtgtgtggaaaccatgatgcacctgacatgtacaaacatgccagtagagaagattgaccatgccttggaaaccatcaaatccaatgggattcaaaatgttttggccctcagaggggatcctccacatgggcaagacaaatttgtgcaagttgaaggcggatttgcttgtgctcttgatttggtgcagcatattagagccaagtacggtgattattttggcataactgtagctggttatccagaggcacaccctgatgcgatacaaggcgagggaggtgctacattggaagcatatagcaatgatcttgcgtacttgaagagaaaggttgatgctggtgctgaccttattgttacacaacttttctatgataccgacatctttctcaagtttgtgaatgactgccgccaaattggtattacttgtcccattgttcctggcataatgccaataaataactacaaaggtttcctgcgcatgactgggttctgcaaaactaagataccttctgagatcactgctgcactagatcctatcaaagacaatgaggaggctgttagacaatatggaatccaccttggaactgagatgtgcaagaaaattcttgctactggcattaagactttgcacctttacacactaaacatggacaagtctgctataggaattttgatgaatcttggattaattgaggagtccaaggtttcaaggccattaccttggaggccagcgactaatgttttccgtgttaaagaggatgttcgacctatattctgggccaacagaccaaagagctatcttaaaaggacattaggttgggatcagtatccccatggacggtggggtgattctcggaacccatcatatggagcacttactgaccaccagttcacaagaccacgaggccgtggtaagaagctccaagaggaatgggctgttccactgaaatctgtggaggacattagtgagcgcttcacaaacttctgtcaagggaaactcacaagcagcccatggtcagaattggacggtcttcaaccagagacaaagattatcgatgaccagttggtgaatattaaccagaagggtttccttacaattaacagccaacctgctgtaaatggagagaaatccgactcgcctactgttggttggggtggtcctggaggctacgtttatcagaaggcctacctcgaattcttctgcgcaaaggagaagttggaccaactaattgagaagatcaaagcattcccttctctcacttacattgctgtgaacaaggatggagaaacattctccaatatttcaccgaacgccgtgaatgctgtcacgtggggtgttttccctggcaaggagattatccagcctacggttgtggatcatgcaagttttatggtttggaaggacgaagcatttgaaatctggactcgggggtggggttgcatgttccctgagggtgattcatcgagggagctactagagaaggttcagaagacctactacctggtcagcctcgttgacaacgactacgtccagggggacctgtttgctgccttcaagatctgattatgctctcatggtctgtattgttgtatggttggacccaacaatattcttgcatccccgactacaggtctgatcgccatgaaagcttctgttcatttgagctcgggggagtccgctagtcttatttttcttgatttctcttggctttctggaaccatacgaatcaataagaaatgagctgtgttcactttccagttcctccgtgcaagtggcgcaacggccaggttctagatgtaaaattcgtcctctaatacagagattggtattgtatgttaaaaaataa

SEQ ID NO: 10935 - DNA, 912 bp, Zea Mays
gacgcgacccgcagcaaaaggaagcttggctcggttcccctcctgcggcctattggcttctggcctcgtataaaaaaggcgaggacgcgctccaccgccagaatcatcgtcaccccggagcctctccttcccggtctcctccgcccgttgccttcgtcccctccatctccggctgcgtcgccggcgagcccgacaccgcgaatcggatccgccgacaaggtgagagggaagagatggggctcacgttcaccaagctgttcagccggctgttcgccaagaaggagatgcggatcctgatggtgggactcgacgccgccggaaagaccaccatcctctacaagctgaagctcggcgagatcgtcaccaccatccccaccatcggattcaatgttgaaactgtggagtacaagaacatcagcttcactgtctgggatgtcgggggccaggacaagatcaggccactgtggaggcattacttccagaacacgcagggtctcatctttgttgtggacagcaatgatagggaccgtgttgttgaagcaagggatgagctccaccgaatgctgaatgaggatgagttacgtgatgctgtgttgcttgtttttgctaacaagcaagatcttccaaatgctatgaatgccgctgagatcactgataagcttggactgcattcacttcgccaacgtcattggtacattcaaagcacttgtgctacaacgggtgagggattgtatgaaggcctggactggctgtccagcaacattgcaaccaagtcctaaattgtcaagcgaggtttggatcatctaggagcttttggatgatgatgatgatgatggtgctggatatttagggttgggttggtatttccgtatgtaagatgtacaagaagtccaagtgggcagcttcaaatgc

SEQ ID NO: 10936 - DNA, 80 bp, Zea Mays
gttgctggtgtgacttggcctccatccctgccaccgggatagacggtcaagtgggttattgcttccgcaggagaggaccg

SEQ ID NO: 10937 - DNA, 384 bp, Zea Mays
gtgggcatttctggaatcgccccagtctagggtttcacctgcgtgccctatataattctctccatccacacccgccgtcgtctccgcatttccatcctgtcgtgggatcccagccaccgccgctagaagaagagctcggcgattcccaggtcccgcgagaagatgccgaagcagatctatgagattaaggacttcctcctcaccgcgaggaggaaggatgcccgctcagtgaagatcaagaggagcaaggatgttgtcaagttcaaggtgcgctgctccaagtacttgtacacgctctgcgtcttcgatgctgagaaggcaaacaagttgaagcaatctcttcccccaggttcagtcccattgaagaaaatattatttgaccat

SEQ ID NO: 10938 - DNA, 571 bp, Zea Mays
atattgaccaagtaactagaaattggtgtgagcctactacataaaagtcatttcggcaaaaaaaaaagtctaaattgctctccctgctggtcacttgatcagcagatggcagagaaagtctatatttgattacagcagatttcagagtgttcaaaaggttatagtgaagagatgacaaacagctgtgttcttgtttcatgcagtgtgtgtaatatatataatttggaggcaagaggcaagtgaatttgtagcaacaacgccctcggagaaagcctatgagtactgagcaccgcttgtgtcggatgatcctcctcatgcactccaccacgggtcctggccggtcctgaagtcggtctccacccacgggacgaagaggaccttgccgtcgtcgacgtcggcgtgaaccagggccagcgactaggcgccggtccgcggaccaccttgccctggttgttgtactgggatccatggcaggggcagatgaacttgttctcggcgccgttccacggcacgacgcagccgaggtgggtgcacacggcgttgatcccgtaggtggccagcgtcttgtcct

SEQ ID NO: 10939 - DNA, 999 bp, Zea Mays
aggagacgctgaaagggaagtggaaagtcttgagggaatgaaaaggaaagaaagcaaagaggggaaaaaaggcgagcaaaaggaggcggaaacatgctttcagccgtccgtggcgtgattcaaacgcgagaagatgccctgcccctgcagccgtacacggtccgatcacctgaccgaactgacggctcagatttgctcaacatctgcactataagtcgttccaccgacatgcgggcccgttatacatagaaccccacagtcagtgagacacatggtcttctctctggtggaagcggtgggtgcacatgctgctagcagtataaatatgctgaaagcctgaaaccctaggcgaagcttatcgcttatcatccgcgcctctacatttcttctctctctgctcctccgcctccgcctgatccatccaagacagggatcgccatgtcggactcggaggagcaccacttcgaatcgaaggccgacgctggggcgtccaagacctacccgcagcaggctggcaccgtccgtaagaacggcttcatcgtcatcaagaaccgtccctgcaaggttgtggaggtttctacctccaagactggtaagcgtgagccttcttacttcagatggcaacactaaggatgatcttagactcccaactgatgagactcttgtggcccagattaaggaagggttcgaaagcgggaaggatcttgttgtgactgtccagtctgcgatgggggaggagcagatctgcgcgctgaaggatgttggccccaagtaacttccttggctttggagacggaaccctactctatctcaacttaaatcggaaaagaagtgtatcaccaaaggattgctaccgagacattcacctggcttgagctggcttttgctatagcgtgcaaggggttgctgggtgtcgtacctacctgacttatcattatctgtgagcatcaggcgcgatgtggggctgtaatggccagatcacatgacacaatctgaagg

SEQ ID NO: 10940 - DNA, 57 bp, Zea Mays
acgccccttacaaaagattacaattatgactcagacccttatggactaagaagtcat

SEQ ID NO: 10941 - DNA, 1261 bp, Zea Mays
atcacatacagacaggcagcggcaaccaacccgatcacgttgcccccgcgcggctagacgcctagactagccccacgacctccacctcgaccagtctcgatcccgtggactcccgattgcctcctcagcaacttccatacccccagcgcggcggtgccggagcgagcagagcagccggagggcctgtcggatccgccgccgtcaagatgaatgacgccgatgtatccaagcagatccagcagatggtgcggttcatccgccaggaggccgacgagaaggccaacgagatctccgtctccgccgaggaggaattcaacattgagaagttgcagcttgttgaagctgagaaaaagaagatcaggcaagagtatgaacgcaaagagaagcaggttgaagtacgcaagaaaattgagtactctatgcagttgaatgcttctcgcatcaaagttcttcaagctcaggatgatctagttaacaaaatgaaagacgatgccatgaaggaacttctccttgtcagccacaaccaccatgaatacaagaaccttttgaaagacctaatcattcagggtttgctccgtttgaaagagccagcagtattgctccgttgccgcaaggatgatcaccatcatgtggaatcagtgctgcattcagcaaagcatgagtatgcatcaaaagcagatgtccatgaaccagagatatttgttgatcatgatgtatacctgccacctgccccaagccatcatgatgctcatggccagttttgctctggaggtattgtattggcttctcgagatggaaagattgtgtttgagagtacacttgacgcaagactagaagttgttttccgcaagaaattgccagagatccggaagcttctttttggccagactgcagcctaatcgactcatctgccgatggtacggctgcttctatgtaatggttgccggctgcacgcctgcactgcagccataaggaactccgcctgtttttgtcaaattgattgtttaaggtattcatcccctatgtacaaactacctattggttcattattgtcgccgagagcaccgactgtttgtactctgtttgctccgaggaataagaataaagcaccgccagactttccatcgcgaagctgaataaacgttgtaaatgcatttgttgcgctgaacattccgtttatggtttctccatgtgtatatttagttaatgtcggatgtggttcttatggaaaatagtttgtttgggcttaaaaaaaaaaaaa

SEQ ID NO: 10942 - DNA, 1777 bp, Zea Mays
ctgagagatccaagtccagcagggacgatgagcagtagccagcggacaaaactcaataactcatcacctagtatactggccaaggtcatgcttgtggggtggggaggcaacaacgggtccacgctgacggctggggtcattgccaacagggaggggatctcatgggcgaccaaggacaaggtgcagcaagccaactactacggctccctcacccaggcttccaccatcagagtaggcagctacaacggggaggagatatatgcgccgttcaagagcctcctacccatggtgaacccagacgaccttgtgtttggaggctgggacatcagcagcatgaacctggcagatgccatgaccagggccaaggtgctggacattgacctgcagaagcagctcaggccctacatggagtccatggtgccacttcccggtgtctatgatccggacttcatcgccgctaaccagggctctcgtgccaacaatgtcatcaagggcaccaagaaagaacaggtggagcagatcatcaaagatatcagggagtttaaggagaagaacaaagtggacaaggtagttgtgctgtggactgcaaacactgaaaggtacagcaatgtatgtgctggtctcaacgacacaatggagaatctgctggcatctgtggacaagaacgaggcggagatctcgccatcaacactatatgccattgcctgtgtcacggagggggtgccgttcatcaatgggagcccccagaacacttttgtgcctgggctgattgatcttgctatcaagaacaactgcctgatcggtggtgacgacttcaagagtgggcagaccaagatgaaatcggtcctggttgattttcttgttggtgctggaataaagcccacctcgattgtgagctacaaccacttgggaaacaacgacggcatgaacctgtctgcccctcaaacattcaggtccaaggagatctccaagagcaacgtggtggatgacatggtctcaagcaatgccattctctatgggcccggcgagcatcccgatcatgttgttgtcatcaagtatgtgccgtatgtgggagacagtaagagggctatggacgagtacacatcagagatcttcatgggcggcaagagcaccatcgtgctgcacaacacctgcgaggactcgctcctcgccgcaccgatcatcctcgatctggtgctcctggctgagctcagcaccaggatccagttaaaacctgagggaacggacaagttccactccttccacccggtggccaccatccttagctacctcaccaaggcaccactggttccacccggcacaccggtggtgaacgctcttgcaaagcagagggcgatgctggagaacatcatgagggcttgcgttggcctggccccagagaacaacatgatcctggagtacaagtgagcgaagtggcgtggcctgcagctagatatggaggaggctgcacgaaggggactagagaggcgagattagctgtggaattgtgttggcttctcgtgttttcttttgcgttcttttcctggtcatcgctgtggcgcttttgtattttatttgttggacccgtaacactatcagggctctgctattagcgcttgaagcctgtaatggcattggcatcgtatgataatgtgatcgagggtgctagttcccctaagcattatttatataagttcaaatggcggcccggcccggtccggcctgagcctgagcccgctgtggcctggcacgaattgggacaggcccgttacgtcac

SEQ ID NO: 10943 - DNA, 87 bp, Zea Mays
tgcctgaccatatcacttattgaagacattagtgctatagaagactgagctttggagtgttcagcaaggcgtgaagtaacttcaatg

SEQ ID NO: 10944 - DNA, 1678 bp, Zea Mays
ttcattttgtgtgaatgagatcgatgactttatccgcactcaaaattgagggtacgcggcgcgggagttcgccaagcagggagttaagcctggggagcttgcaatcatctccaaggaggctgtggctccttacgagcgtcctgccctaagcaaaggttacctctttcctacgaatgctgcaagactcccaggattttatgtatgtgtgggaagtggtggagagaagctattgcctgagtggtactcagagaaaggcattgagctgatccttagtacagaaattgtcaaagctgatctttccaccaagactctgactagtgcagctggagcaaactttacatatgagatcttgctcattgctactggctcctcggtcataaagctcaccgattttggcacacaaggagctgattctaacaacattctatatctaagggaaattgatgatgctgacaagctggttgcagctatccaggcaaagaagggtggcaaggcagtggttgttggaggaggttatatcggcctcgaactgagtgcagccctgaagatcaatgactttgatgtcactatggtgtttcctgaaccttggtgcatgcctcgcctcttcactgccgatattgctgctttctatgaggcttactatactaacaaaggtgtaaagatcttgaagggcacgctagctgttggttttgatgctgatgccaatggtgatgtcactgcagttaagctaaaggatggcacagtacttgaagccgatattgttgttgtcggtgttggaggcagaccattgactactctcttcaagggtcaagttgctgaggagaagggtggaatcaagactgacgcttcctttgaaacaagcgttcctggagtatatgccattggtgatgtggctaccttccctttgaagatgtacaatgagttgaggagagtggaacatgttgaccattctagaaagtctgcagagcaggctgtaaaggcgatcaagggcaaagagtccggtgaaccagttccggagtatgactacctgccatacttctactcccgatcattcgacctggcgtggcaattctacggcgacaacgtgggcgaaaccatcctgtttggcgacagtgaccccacctccagcaagcccaagttcggctcgtactggattaaggacggcaaggtcttgggcgccttcctggagggcgggtcaccggacgagaacaaggtcattgccaaggtggcgaaaacccagccgccggtcgctaacctcgaggagctcaagaaggatggcctccagttcgccagcaagatctgagacgctcccgttccatgtaaaattccgtgtcatcgtgaaggttcttctggagctctggtcatgattgagaaatgttctgctacagatgttatactacatacgtgactacactacatgatatattcggttttctgattgtgatatctgtacgtggctacactcacatgtgagatttgaataagtcctgcagcctcagggctcagctagcacagcacagaccacagataccctttttttttattattattgttctcgcccggtcgctcgcgtcctggcaggcactgaaatggcggcggccaccagctgcctcgcttcatcgcctcgcctataggctacgctggccgcgagctccaggcggaggagttggcatcccag

SEQ ID NO: 10945 - DNA, 492 bp, Zea Mays
aactttgatttgtttagatcaaatgtcgactcggtgatcgatagaggtgcttgaaatggtgcgggccttgcaaagtgatggctccgaaattccaggagatgtctgagaagaacctggatgttgtgttcctgaagctcgactgcaaccaggacaacaagccgcttgcgaaggagctgggcataaaggttgtgccaacgttcaagatcctcaagggtgggaaggtcgtgaaggaggtgaccggcgccaagatcgacgagctagcgcaagccatcgacacagtcaagtcagactgacaaagaaagcaggactgcttcaagcgcaagcggtgcaaatgaggaccagtattcttttttttcttcagcaatatcagaatgtatccctaaggggaaaagtcaccattagccaaactagacattattgtaatttgtaactggacattattaaaacattgaaacagaaaggttgcaatatcagaatgcatcctagcccatg

SEQ ID NO: 10946 - DNA, 661 bp, Zea Mays
gcgcgccactgccactgccaccgtcgcgtcgtctcagcagcacatgagcgcgcataccttctacgccatgttcaccgtctggggagtctgcttcttcgcgtccatgaaggatcccttctacgacagcgagacgtacaggagccagggtggcgacgggaccgtgcactggtactacgacaggcaagaggacctggaggcgtctgcgagggaggagctgctgcgggaggagctgctcgaggagattgagcagagggttgggggcctcagggagctggaggaagcgagcaaggaggagcagctcacaaagtgatcacgcgggcgaatgggctactcatcagctctctatctgagcttcgttagcaaataagttcagacttctctttactgccatgctcaagtctgtatatggccaaaacccaaaacgattgatcaactgcgctactgcagtgcaatagcaggatacgtatagttttcttttcaagggaaacaggaggggagtgcagtgcacccccgcccatactgcatgttattaataaaagaaagttatttacagaatcaggacaggctctacaggatacatggcaagctactctgcgtatagtacatggcaaactagaactgtaattgaacagcatcgatcgccgctcggcacagatagttc

SEQ ID NO: 10947 - DNA, 870 bp, Zea Mays
gcccccggcgcctctcggacatagagtggcctccctctttttcctcgcactccgcaagacgcaagaccacctcaccagcctcctcgtccccgatctcctcccacccgcatccaagggtttccttctcgaccgtgcggaacgagccagagaacaggtttcgaggggcttcgcgtcgcaggccgccaagcccaccgggaaggagatcaaggttccaaaggctctgtttggcggcacaggcaactatgccagtgcactgttcctcacagcagctaaatctaatgcattggacaaagttgaatctgagattaaagctattgtagaggcttccaagaagagcccgttgttttctcaattcataaaggacttgtcagttccaaaagcgaccagggtgaaggctatagccgaaatatttgctgacgctgggttttcagatgttacaaagaatttcttggctgtcctggcggacaatggcaggctgaaatatattgaacgcattgcggagagatttgttgatttgactatggaacataagggggagatgaaggttgtggtcaggacagttatttcactcaccaaggaggaggagaaagaactcaaggaaaccttgcaggatatccttggggaaaacaaaactattttggttgaacagaagattgactacagcatcatgggaggattagtgattgaattcgggcagaaggtgcttgatatctcaatcaggaacagggcgaagcaaatggaggcgttcttgaggcaaccacttgacttctaacagccttttggataaaagaagcatcatcggaatgcagaggctgtcctgttgaaggggtggatgacgacgatggtggcaggaggaggggttgacagcag

SEQ ID NO: 10948 - DNA, 81 bp, Zea Mays
taaccggaccgatacgcaatcgtggtcgcaggatcaatcatccacggcccggattcgagataggcgaaggggtatgttccc

SEQ ID NO: 10949 - DNA, 2220 bp, Zea Mays
atttggcggcatttttactggtttccgagcgatcggcacagaacacgccacggcactgacggccagccacagccagccaacaataggaacctgtcgggacgttccccgatcggcgatcgcgcgcgcgcatcgcaagcaccgaaattagaccgaggaagagggtaaggaaaggtcgaggcacgagggggctagcggcggagatagcgagcacccggcgtcgggcgacggtggcgccatgggtggctgccactccgccatcgcggccaccaagctgaagattctgcgccgcggaggccggggtgccgctgccgtcctccccgtcaccaaccacgacggcccgtgctgctcctccgaccacggcagcaaggagaagaagaagaaaaagaagggcgccaggaagggcaggaaacgcgcctccatcctgggcgacgccggcaccttcgacccggacttctcgcggcggtaccggctcggcgcggagctcgggcgcggcgagttcggcgtcacgcggcggtgcgaggacgccgccacgggggaggccctggcgtgcaagacgatccggcggaagcggctgctcctgcgcctcgccgggcccgacgcgaccgacgtgcagcgcgaggtggagatcacgcggcgcatgtcggaggtgagcgggggcagggtcgcgtgcctgcgcgaggcgtgcgaggacgacgacggtgtgcacctcgtcatggagctctgcgagggcggcgagctcttcgaccgcatcttcgagcggaagcactactccgagcgcgccgccgccaagctcgcccgcaccatcgtcgaggtcgtgcagctgtgccacgagaacggagtgatgcacagggacctgaagccggagaacttcctgttcgtgaacaagtcggaggagtcacctctcaaggccatcgacttcggcctctccgtgttcttcaagcctggagatcggttcaccgaagtggttggcagcgggtgttacatggctccagaggttctcaagagaagctatgggccagagatagacgtgtggagcgctggtgtcatcctgcacatccttctctgcgggttccctccgttttggggaggctccgatgagaaaattgcacagtcgatactccgtggggtaattaacttacagaaggatccatggcccaaggtctcccagagcgcaaaggatcttgtcacgaggatgcttgacccagatccttgtacacggttgacggcaaagcaagtccttgagcacccttggctcaagaatgctgataaggcttcaaatgtgtcactcggagaggttgttcggtcgaggctgaagcagttgtcgtctatgaacaagcttaagaagaaggcacttggagtcgtcgccatgaatttaccgatggaagagattggcaaattcaaagagatgttccatacaatggacaaaaacaaggacggtagtttgtcacttgaagagctgaaggagggtttccggataaacgatcatcctgttccagaggaagagataaagatgttgttacaagcgggcgatatacatggaactgacacattagattgtgaggaatttgtgacagtcttgcttcacattaaaaagatgagtaatgacgagtatctacctaaagctttcgagttcttcgacaaagacgggaatggttttattgaaatgtccgagttaatggagactctaagtgatggtgaactaaagcctgatgagcaattggttaacgacattattcaagaggttgacaaggataaggatggtcgcatcagttacccagagtttgaattgatgatgaaaagtggatcggactggaggaacgcctctagacgttactcaacagagaatttcagcagcctcagtcaaaaactgtgcaaagatactttatgaaacaagaaagtagtttccaagcagcaattactgactgaagtaccacaccctcaactaaacagcatcagaagacaacgcaaaagcaggattactggatctggtggaaataagggttgaaggagatcacatataccagttgcatgcttgacaaacttcgtcaactagcaagccctctggcattgtcctttgctctggaagtaaaatttactattccaatagaatacatgacttagacatagacagatgtaaaggatgccccagcatccatgcaatccactaaccaaaatttggcattttactactgtcaaatatataaagaaaagaagatgtcc

SEQ ID NO: 10950 - DNA, 700 bp, Zea Mays
cagcgagggaggagatgaagacgttcgacccgtggccggtcttcttccgccgggagtggaagcgcaactggcccttcctcacgggtttcgccatcaccggattcatcatcacgaagatgacggccaacttcaccgaggaggatctcaagaactctaagttcgtccaggaacacaagaagaagcactgacgaaccaggtgaaggagttgtcagaaacgcatgtttggccagccagttctgttatgcttttgaatgaaaaatttagacccttctttctcgtttccttaatcgaaatgcttgcactctatgttccatttgtaatgtaataagaggcaaatggattgaaccaacaacaatcaacttctgattgaaaaatatcgatgtgtggcctgaatgttgtgggatcgcatctaatcctgtcgatttggtgaagtgaagattctgccatattactgcagctatttgaaactgaggtgtggagagcctgtatggtcttttagcacttgcaacgtactaattctgaagcagatgtgttgtaccacgagtccatgactctcatgagtagtttgtaaaaactattcccttccaactatatggatcgaggagggaagtgagctaaggccctgattggatctcaggagctaaaatttagttattgtagaagctaaagttttaaacaagagagaactaaaaatgacaaa

SEQ ID NO: 10951 - DNA, 569 bp, Zea Mays
tggatcttgcatatctgcagaagaagaaagatgaggaaaaagcactgaaggagcttaaggccaaggcacagaagggcgcgattgggggctcgggtctgaagaaaagtggaaagaaatgagactggtcacccgtctccaatacctagaggatgataaggcagctgtctatctgtgttgcgcttcactaagtgtgattgtaacagtggtacctcttgtgttctgtgttccgcgatgttgcagttggttgcttgatcgaaagatgtttcaacctcccatctgctagctatgatacagatggtcccctgataataatgatgacatattctgtgatggatgccacagcattttttgtttttgtttttgcattcagatatttcagcttccttatagttttacatgtcccaactaggaatgagaagtcattctgttggtccaatctaaattttatgtgtgttagtggagtgccaaagagagtggatatgtagaacaatggtttgcatctagatctttttgcctagaacaaatgttcgcatctagatctgacctaatcttcagggctagtgtgcacg

SEQ ID NO: 10952 - DNA, 146 bp, Zea Mays
cctaggttgcaggaggcgatggtacaataggttgggtgttgggatgtttaggagagctatacattcagaacagagagcctgtacctccagttgctgtaataccactcggaacaggaaatgatctctccaggagttttggatgggta

SEQ ID NO: 10953 - DNA, 807 bp, Zea Mays
caacagtctcggcctctcctcccggcttcctcacacggcactccagccgctagccctcactcaaccagacaaccagtacaccaccgccaccaagcccgggccgaataactctgccgggcaaccgccgcccttcgccggcaaagaacgcccaccagatccaccccggcctgctatggagtccgcggtgaacccgaaggcgtacccgctggctgatgcgcagctgacgatgggtatcctcgatatcatccagcaggccgccaactacaagcagctcaagaagggagcgaacgaagcgacgaaaaccctgaatagggggatatcggagttcgttgtgatggcggcggacacggagcctctcgagatcctgctccacctccccttgttagccgaggataagaacgtcccatatgtatttgttccatcgaaacaagctcttggccgtgcttgtggtgtgacaagacccgtcattgcttgctcagtgaccagcaatgagggtagccagctgaaacaacagatacagggtctcaaggactcgattgagaagcttctcatctgatttacctaagatctttcagtgtgatgggcctcggcgacacatttttcagaggcttggactggtgatggtgtcttgtttacattacgctttccaaactatatttgaacactgctaagtcaatcatatttgaattgtgcttcactttatatttgtgattgtcatgtatcctcaagatgcctctgtatcgtggtggctggtttctgttctggatccgaccacatcattgtgatggctgattgctatgtttataa

SEQ ID NO: 10954 - DNA, 52 bp, Zea Mays
gagctctagtcatagtccaacttgtgggagtggtagtccttgtgttcctgct

SEQ ID NO: 10955 - DNA, 1448 bp, Zea Mays
ttggaataatattagtagtgttcaggtgtatatgaagctctggagttgagggatggtggctctgactatttggggaagggtgtctccaaggctgtgaacaatgtgaattctgttattggacctgctctgattggcaaggaccctacagcacagactgagattgataacttcatggttcaacaacttgatgggaccaaaaatgagtggggatggtgcaagcaaaagcttggtgctaatgcgattctggctgtgtcattagctgtttgcaaagctggggctagcatcaagaggattcctttataccagcacattgccaacctagctgggaacaagcagttagtgttgcctgtccctgcattcaatgtcatcaacggtggttcccatgctggaaacaagcttgctatgcaggagtttatgatccttcctactggagctgcctcatttaaggaggctatgaagatgggtgttgaagtttatcaccacctgaagtccgttatcaaaaagaagtatgggcaagatgccacgaatgttggtgacgaaggtggttttgctccgaacatccaggagaacaaggaaggacttgagctcttgaaaactgcaattgagaaggctggatacactggcaaggttgtcatcggaatggatgttgctgcttcggagttttacagtgacaaggaccaaacctatgacctcaactttaaggaggagaataatgatggttcacagaagatatctggcgatagcttaaagaatgtatacaaatcttttgtgagcgaataccccattgtttcgattgaagatccttttgaccaggatgactgggttcactatgctaagatgactgaagaaattggagagcaagtgcagattgttggtgatgaccttctcgtcaccaaccccactagggttgctaaggctatcaaggagaaatcatgcaatgcccttctgctcaaggttaaccaaatcggatctgtgactgagagtattgaggctgtgaagatgtcaaagcgtgcgggctggggtgtgatgactagtcataggagtggtgagactgaggacactttcattgctgatctggcagttggtttgtccacgggtcagattaagactggagcaccctgcagatcagagcgtcttgccaaatacaaccagcttcttaggattgaagaagagcttggcgctattgctgtctacgcaggtgccaaattccgtgcacctgtggagccctactaaacgggcgggatgcaagtgcttttatgtctgcacaagtcctgtgaaactgtttactgcgacctgcagattttactcttggagtgccctgagtagattttagcaataatatccaacatgtaacatgttacggacatgtacccaaacgtgatccagttttagttaatgtgctccatgcttgacgtttttaaaaaataagaatcccttagaaaaataaa

SEQ ID NO: 10956 - DNA, 92 bp, Zea Mays
caccaagtgctcgacgcaagggctgaaccagaatccttgccgtattcgcggatagcgcgtcagatttagtatggtaagccgattcatatttc

SEQ ID NO: 10957 - DNA, 776 bp, Zea Mays
atgtttgcaggatttgcaacccatttctctcctcgactcccacaacacggtccgtacgggaaagagagagaaggtgggagtggaatcgacaggggaaaaccaagcctgtgtttcagagacaactcaggcgacgcgatggcgatggcggcgctgcgacgcgaggggaggcgcctcctcctcgcccccaccgtccccaacccgtcttcggcggccgcttccgctgcggtgacgcgatcctccgccatgtcgcaaccggagatggctccaattggtgcacgttctatttcaactcaagttgtgaggaaccggatgaagagtatcaaaaacatccagaagatcacaaaggctatgaagatggttgcagcatcaaagcttcgggctgttcagacgaggactgaaaattcacgcggcttgtggcagccgttcaccgcccttcttggggacactcctagtgttgacgtcaagaagaatgtgattgtggccattacctctgataagggactctgtggtggtatcaattcaacctcggtgaaagttagcagggcccttcacaaactgacatctggtccagaaaaagaaagcaagtatgttatattaggagaaaaaggcaaagttcagctgttgcgtgactcgaagaacagcattgaaatgaccgcaagtgaactacagaagaaccctatcaactatacacagaatcatgctgtggtgtttgttctctgggctatagaactcctcgaataatttgcaagactaatctggatgcacagaaaaggatg

SEQ ID NO: 10958 - DNA, 106 bp, Zea Mays
tcactcttgctgtctcacaccccccacaggtcaataacaggtaccacaggatgaggcgcgtggaggatgctgcgatgtgttcgtgagaggtctaggtcgtcgtctc

SEQ ID NO: 10959 - DNA, 801 bp, Zea Mays
gtgatggctgatgtcgacgagtaccgttgcttcattgggaacctgtcctggtcaacgactgatgaaagcctcaaggatgcgttcagcaaattcggcaacctcactgaggcaaaggtggttcttgacaaattttcaggacgttctcgtggtttcggctttgtaacttttgatgagaagcaagccatggaggatgctattgagggaatgaatggactggacttggacgggaggaacatcactgttgataaagctcagccacaaggacctggtagagaccgtaatggtgaccgtgattatgaccgcgagcgtggatctcgttatgaacgtggtcgtgactatggtggtgggcgtgcaccgcgaggtggtggtggtggtggtggtggtggtgactgcttcaagtgtgggaaacctggtcattttgctagagagtgcccatctggggatggtgggagaggggacagatatggtgggagagatgacaggtatggtggcggtggcggtggcggtggcggtcgttatggttctgaccgtggtggtgaccgatactctggccgtagccgagatggcggcagctatgggggtggcgatcgctacagccgtgaccgatcaggtccttactgatggccttagttcttgattgagaagtatgtgccatccagtccattggcgcctgagactgcgaaatattcagtcatttacaacacaacaaccaacggttaaaagtacagtgtgatcattttacagtgatctagatggtccagcttgcttgtttctcaactgctgtattgttcaaatcgtatt

SEQ ID NO: 10960 - DNA, 64 bp, Zea Mays
tacctatttctgtgcagccctactaatttattaaaaatgtgatatcttttaggtcaaataattt

SEQ ID NO: 10961 - DNA, 59 bp, Zea Mays
tgtcgccagcccccatccgcttccctcccggcaatttaaagcactctttgactctcttt

SEQ ID NO: 10962 - DNA, 712 bp, Zea Mays
catttatgtagatacttgtccccattctgatcaactggtgaacgttcctaagaccaagaagacctactgcaagaacaaggagtgcaagaagcacactctccacaaggttactcagtacaagaagggtaaggatagcctgtctgcccagggaaagcgccgttatgaccgcaagcagtcaggatatggtggccagaccaagcctgtcttccacaagaaggccaagaccaccaagaaaatcgtattgaagctgcagtgccagagctgcaagcactactcacagcacgcaattaagaggtgcaagcattttgagattggtggagacaagaagggcaagggaacatctctcttctaagtttctcatcgcccatctcgatgttggatcgaacctgtgggtctactactgttctaaaaactcgtcaaatttcaatgttactagtagttctgaaagcaggtcatgctgtgtatcaaattccaatgcctgacatttgcgctgagtgtgggttgtcttttggctaaatgaagttttgcaccctgaatcttcattgaatgtgttgtgtgtttgtttgattttgttctgcgattgccttagtctaaagcttgatcacaccgaggatggtttatgtaatgtaactggctgaatggaatcccacagttcgctcactgaattgttggagatgatattgcatatgaaataaatccatcgattttgtaa

SEQ ID NO: 10963 - DNA, 1184 bp, Zea Mays
cggtttggccgttccgttccattccattccgctctcctcccctcccctcccctcccattcttctacacggccgatcgcgaccctcgccccgcccccacacggccacgcaccgaaactgccccgcccccgcagcacactcgtcctccccgcgccacctcggggacgtcccggtccgcgacatccctgaccaccgcgatggccgccgccgccctccgctcctccgcacgccggctcctgcgtctcaccccggcaccctcgtcggctctgttcgccgcttcccggcccaccgccagggttgcaccgctctcacgccccatcgccgctctgtcaggtggcaacaatcctatctcatggaaactgagacgcttcttcagttcaaatgaaaagcacttgcctgcaatatctgatccagagatcgaagctgcatttaaggatttgttggctgctagttggaatgaacttccagattctctcgtagcggaagcaaagaaagcagtatctaaagcgaccgatgataatgctggtcaagaggctttgaaaaatgtatttggtgcagctgaggcatgtgaagaattcagtggaaccttggttaccctaagaatggctcttgatgatctgtgtggcctgactggcgaaaatgtgggtcccttacctggttatattgaagatgctgttaaagctgcatataatcgctacatgacatatctggagtcctttggccctgaggaaaattatctaagaaagaaggtggagactgagttgggcacaaaaatgatacacctcaaaatgagatgcagtggcataggttccgagtggggaaagatctccctgattggcacctcggggatctcaggctcctatgttgagctaagggcatgatgtgaagcctgcagatcagaaccatggaaattatcgatgagctgaggaagtctgtagatcagaatatgccgttctacattttcctttcccctttgtagctaccatggcaataacaatgagaccatcaaacagctgtgcattttaagtatggaaatactcccgtctgtgtctgtaataaggacgtttcatgtggctgaaacctgtcaattctgttaatttttgcatgacttcttgttcaactggtgtgaattgtatactttgttcacgaggcactgatcatatatgccttcgctcgcaaaaaaaaa

SEQ ID NO: 10964 - DNA, 673 bp, Zea Mays
actcaccggctgagtcagcttcaatctcacctgtgacctgtacactcccagatcagacggttcaccgacaagatccaagaactcgctcgcgcgcacggacagggccggaacccagggatcgagactgaacagcagtccgagacgccatgaacgtggaggaggaggtcgggaggctcaaggaggagatccataggctcggccagcagcagcccgatggctcttacaaggtcaagtttggcgtcctcttcaacgacgaccggtgtgcaaatatctttgaagcactagttggcaccttgagggccgccaagaagaggaagatcttgacctacgaaggcgagctgcttctgcaaggtgtccatgacaacgtggagataaccctgttgcccccacctgcagttgctgccgcttgaagcgaagagcaccaccaagttctcgattccatacaactcgtatgcttgtattctgccgtgcctatattagattctctcgaaccatttggtgttccttgaaaactgctatcgtgtgatatatgaaattgtggtgctcaagaaattgccttgcttgcatatggttgtgttgcttaataaattcaatgctggtatagcattcgtgtcatgagacatgaaaacagcagactggagttaatggccgcgggttattgacgtcttccata

SEQ ID NO: 10965 - DNA, 54 bp, Zea Mays
aaaactataaataatttataacatttcaaagttatttctttgaatcacttttgt

SEQ ID NO: 10966 - DNA, 1245 bp, Zea Mays
acgaatagttcataaattgctggaatgctggtcggtacataacctgagaagctaagctgtcttctaactctctctctcgagttcatagtttttgctcttcctctctcatggtcacaatgcttgcagctagttctctagtgaacagcaacctcgcttgctcatcaaggatatcatcctgttcagacttcacatatagccactcctggcgtcccatacatgctatgaaactccatcagatgcgtgctgtgagctcaatacgtataagttgtgctgccactaaacctgcaaagactcctgctgaagaagaatggaaagttaagcggcaactgctatcagaaaagcgggtacgaagtgtcgatgtgaaggaagcactgcgccttcaaaaggaaaacaactttgtcattcttgatgtcaggccagaagcagagtttaaagaggctcatccacctggcgccatcaatgtacaaatatacagattaatcaaggaatggacagcgtgggatattgcgaggcgtgcagcgtttgcgttcttcggcatatttgctggaacagaagagaatcctgagttcatacagagtgttgatacgaaggttgggaaagatgcgaagataattgtggcatgctctacaggagggacactgaagccaacgcaaaatttccctgatgggaagcaatctcggtccctgatagctgcgtacttgttggtcctgaatggctacagcaacgtgtaccatctggaaggaggactttacacatggttcaaagaaggactaccagctgttgcaggagaagagtaagagagacattacgaacatagtgttcgcatgctggagagagtggagagtggagactagagttgcgaggacttgtagtgatgtgcttgcttcacagtcacagggttgtcgattgttgtgtacggattgagatgtcgaagatttctcctgccaatgtgatgctgtcctagattttctcgcggcgcctttgttgctcgaacttgtcagtgcttgagccatgcatcgtcatgagcaagcgcactgcgagctcctcttcatggcgctggtctccatgatggagcccacgtccaccgcggtccccttgagcgacagcacctcgccgccgccgtcgccctggtcgccgcgcatccggcgggcctcgtcgagctccagcgccctgcgcgacacggcggcgaagacctcctcgaggagcgtgaggaaggcgcgctccacgttgtcgcccgtgagcgcg

SEQ ID NO: 10967 - DNA, 75 bp, Zea Mays
ctgtgccgcgagaagccagtagggcacagaagtcaccatgcccagctattacttcgtcaagcgcctcaacttcgc

SEQ ID NO: 10968 - DNA, 1076 bp, Zea Mays
cacacgccagccagccatcgtcacactggtgagctctgcactctgcttagctccgagcttcagtgccttcgttgtttgctccacagtccacacacacacacgtccagctagctgcactgcaccaatggccgccgtcgagaccccgaacgaggagaccgctgctccggcggtggagaccgaggtcgtcgtcgctaaggagccggagccggtggaggccgagactgagactgagaccaaggaggccgaggccgttgctgagccgaccgaggcagagcccaaggaagcagagccggaggccgccgcgccggcagcagagacggaggtcaaggaagcagagacggaggccgccgcgccggcagcagagacggaggctgctgctgccccggtcgaggctgctgagccggagatagccgccgagaccaaagaggtggcggctgtggaggctaacgaggaggaggaggaggcagcgcctgctgttgctgccactcctgaggtcgcagcgaccgaggaggaagcggcggcccctgctcccgaggccgccgtcgagaagtccgtcgagtgagtccagcccagcgccggacggcggccgatctagctcgctgcgtcagcctgtcacctggcgactggcgtgcgccgcgctggtgccactgccacggcaacagcacggcatggcgccggcataggtcgctaggaaaaacctgcttttgtgttcgggttcacgtcgtgtcctacgtggcgcggcgggccccgcctagtaaaggagcgtcgttttgtgttgtggtcgaataaataatgtgtctgtgtgctgattccgtgtcgggttagtgggcccagtgtcggtgctgatgtggcctacctttacagcacatcggtgggactgggccgttgagctcctgtgtcgtttaatatgtgtacggtgtacccatctagtatgtgtttcgagtgtgtagtaagtatatttgtgtcccatccatctttcgaaactttctttttgttaagctcttgaagcgtgaactctgttacgagctgctcgccctattctaaattataaaatattttagtattttcggcatata

SEQ ID NO: 10969 - DNA, 59 bp, Zea Mays
tttcccaaaaaaaaaaaaaaaaaaaaaaagaaaaaaaaaggaaaaaaagaaaaaaaaaa

SEQ ID NO: 10970 - DNA, 83 bp, Zea Mays
cgagcattcaatctctaatgtgtttttagtagaatcgctcgggtacaacttgttgtctgtaagccaattatgtcacatgggct

SEQ ID NO: 10971 - DNA, 576 bp, Zea Mays
ttccagaagggacagcgtccgtgtcttccttgctcactctcctcaccactaccctgacctgacctgctcccaagctccctctgcctgcctttataaatcaccggggcagagcgcctcagtgacacacgccgctgctccaagaaaccaccgccgagcccaaccgcacaagcgcgcgaggcaggagagagagagaggcggggagcaaaacaatggaggggaaagaggaggacgtgcgcctgggcgccaacaagttctcggagcgccagcccatcgggacggcggcgcagggcgccgctgacgacaaggactacaaggagcccccgccggcgccgctgttcgagcccggggagctcaagtcctggtccttctaccgcgcgggcatcgccgagttcgtcgccaccttcctcttcctctacatcaccatcctcaccgtcatgggcgtctccaagtccacctccaagtgcgccaccgtcggcatccagggcatcgcctggtccttcggaggaatgatcttcgcgctcgtctactgcaccgccggcatctccgatacatgcttaatttcaaagcatcgaactg

SEQ ID NO: 10972 - DNA, 84 bp, Zea Mays
tttaaagagttaataacaagctaggaataaaaaatagatattctagtgttgttatgtcaatttggttaatagatgtagtcgatg

SEQ ID NO: 10973 - DNA, 691 bp, Zea Mays
gatccataggggaggaatccccaaaccgagtttgttggttgttgttcaactctccacttattatcttcccgaatacactaacttgatcaatctgctgcataattctctttttacctttagactaaaaaccagttacctgaaaattgtaaccttgattgcaactagcttaccgcagttgtaaggaactaccgagtactgacaatttgttcctacaatcctaatggaaagaaaaggggtgactccgtcaacaggaggaacaacatgtactatggcacaccattctacggcggatatggctatgcctccccggtgccacacccaaacatgtacgctgcagcgtatggcacgtacccgctatatggcaaccagcagctagtgagctagagagctcccctccgacgtgtcccctctgacgggaaacaaaggttttggtccggtgagcatagtagcgtcaggtgagaaggtgcctttataaggctgtcctaagaagtgggcgagatatgttgttgcatcgttatcgttatggtgcctgtaactgttgtgtgtgccgtgtgcgtccggaagaattggatggaatggaactcgtggcttgttgtagtacatcagagagtcatgttattctttcaagaaattttgacttgctcttgttgaagccccttgcaaagatgcccttaggaggactaagctttcg

SEQ ID NO: 10974 - DNA, 51 bp, Zea Mays
ggacggagtttaccgcccgatttgggctgcatttcccaaacaacccgactc

SEQ ID NO: 10975 - DNA, 72 bp, Zea Mays
agttgcccctcgcccgaccctgcaacgtatcaacagttaaaaaaaacctcgggctaacgacttaccaatgag

SEQ ID NO: 10976 - DNA, 1055 bp, Zea Mays
ttttttttcaacctattaaaatggcttttttatcccacaataagtgatagtcaatccccacattgggggaacacctttattgaagcatcttatcagctgcttttacaccaatagcttgtacattaaattgtaaaactcaacacaaacaacaaagcaactcaaaaactcacttcgttttgacactgacaccgtccgttccagcaatgatcactgaactcgccatgttcaagaacaacccatggtcaacaactccttccagagctgcaatttcctgtcctgctgccaacgcatccttgattggcgtcttgaagtataaatcgacgatgtagtttgagttgtcagtaacatagggcttgtcgccttcaaaccttagctttgcctcgactccttcctccttaaacagttcctgcaatcttacaaggttgtacttccagcagaactgcacaacttccactggcatggctagaccactacctcctaacccatcaactagttttgtctcgtcaacaataacaataaacttgtccgatgctgcctcaaccatcttctcacgaagaagagcaccaccccgccctttcacaaggttgaggtcaggagcggacctcgtcggcaccgtcgatggcgaggtcgatgagcgggttgtcgtcgagcgtggagagcgggatgccgagcgactgcgcctgctcgaaggtgcgcttggatgtgggcacgccgacgatcttctcgagcttgcccgcggccaggagcgcgccgatctcggcgacggcgaaggcggccgtggagcccgtcccgagcccgagcaccatcccgctcttcacctgctcgacggcgcgcaccgccacatggcgcgcggcggttgggtggaggcggactgagatcgcggtggcggccatgggagcacgtgtgggtggcgggaggggaggtgctgcagttcggagaggtgaggtcaggagtgtggggagatgagggggaggcgatgggaagttggtggtggaggctagcggcgatggtgatcgtcagaggttgggttggtggtgacttggaaggccaggctt

SEQ ID NO: 10977 - DNA, 371 bp, Zea Mays
cttcatgcccgttgtagcgactaggttccagcgcaggaacaggatctacaaggaggagcaacgtcagatcagagctgctgctcgtaaggccaaggaggaagctgagggtgcccctgctgttgcagcacaccattagtctccctgtctattttttgtgttgttgttttctgttaactcatctttggttcagttatgatgctaagggcaaggcaataatctccagctgttggactacacagattttttcccccatgacttaaatatcaagactcattttgtgcttctgctggtttctgcttgttggtttacccaatcgatgacatctctagtcacctcgtctgcccaaaatagcttgagatatcatttgatgg

SEQ ID NO: 10978 - DNA, 1221 bp, Zea Mays
gcccatccctccacggcccggcctgctttcctgaggccagttctgcgcccaccacgaagcgcaccaagatccgacggctagaaatctccttccgccgcctatataaccagcagcgaaatgcgcgtggtcaaaccctagccgcctgcctctcctcctccagagctcgtcgccaccggccaccgccaccctcgatcacgccgtccgtcgaggtaaggtcagcatggtgagggtcagtgtgctcaacgatgcgctcaagtccatgtacaacgctgagaagatcggcaagaggcaggtcatgatcaggccgtcgtccaaggtcatcatcaagttcctgacggtcatgcagcgccacggctacattggagagttcgagtacgttgatgaccaccgatcgggcaagatcgtggtcgaactcaacgggaggctgaacaagtgcggcgtcatcagccctcgctttgatatcggcgtgaaagacattgagggatggactgcaaggctgctcccgtccaggcagttcggatacatcgtcctcacaacttcggcaggcatcatggaccacgaggaggcccgccggaagagcgtaggaggcaaggttctaggtttcttctattgaagaagctgagaatctttgttatggcctgcctgcctgtcttactctctcagactagagtacctgttattttactttaatatgtctctctcagactagagcgccttcttttacttgaatattggtgactgcattggtctttcactttaaaatcggtgactgcattgatcgaattatctgagccggttcttcagatactagttggcacaacccttagttgcccatggtaatttgagcagttcggattactaaaaagattagtcacggacatcttattttcccaaggtgctcaaacagtcaaactaactgcaccttggggtcctacatttcgtgcgtgcaaggcaaatgcgctgcaattcgcaagtaaacagcaaagcgaaatcttgaggccaacgtaggtataagcgtggtaatgggttggtaaagtgtttcataataataaggtgctgtttggttttttatatttgtaacatggggtgctgtttggcagatttgtaatgtgatggtaaccgataatgttgcattggatagcaaattagaaagtgatattggcctatttaaacttattaactaagttagagcctttatgggtgcttaaatgtagactgtgt

SEQ ID NO: 10979 - DNA, 206 bp, Zea Mays
tgactcaacacggggaaacttaccaggtccagacatagcaaggattgacagactgagagctctttcttgattctatgggtggtggtgcatggccgttcttagttggtggagcgatttgtctggttaattccgttaacgaacgagacctcagcctgctaactagctatgcggagccatccctccgtagttagcttcttagagggacg

SEQ ID NO: 10980 - DNA, 311 bp, Zea Mays
gcgttcccttcgttgcgtcttgaaaggggagagagagagagagaagagagagagaagagagagagagagagaggagtgggagacccgcgagaggctgccgtgtagggaccgtagactcagcgactgcgaaggagggataaggggatggccgggatcggaccgatcaggcaggactgggagccggtcgttgtgcggaagaaggcacccaccgccgccgccaagaaggatgagaaggccgtcaacgccgcgcgccgcgccggtgcggagatcgataccatgaagaagtccgggtttgctgttcggtgatggga

SEQ ID NO: 10981 - DNA, 749 bp, Zea Mays
gttggaacactatgtcatcatttgaagttgcagatgaacctgctcccgagaagcctgcccctgcgaagcaagggggctccaatgacagggatctcgctcttgcaagggtggaaacagagaagaggaactctttgatcaaagcttgggaagagaatgagaagacaaaagctgagaacaaggctgctaagaaagtatccgctattctttcatgggaaaacacaaagaaagcaaacatagaagctgaactgaagaagattgaggaacaactggaaaagaagaaggctgaatatgcagagaagatgaagaacaaggttgcaatgatacacaaggaagccgaagagaagcgagcgatggtggaggcaaaacgcggtgaggaggtcctgaaggccgaggagatggctgccaagtaccgggccaccggccacgctcctaagaagctcatcggttgcttcggagcctaagaaaccttccaagtcagaccgagcagaaagtgaaaaacgtcagccagtgattgcttggtcctctcgctctatcaagtgtgtagtgtgtcttcgaaagtttgtaaagcctactgctgctgctgtatatactgatatcgcttccaaggcaggcgtttggtggtgtacatgttgaatgcttgacgagaaacattcttgtgtgtagttaagaggtcacgctgttgttgttgttgttgacattcaagcagacattttgttttcttctggtttttaaatcataataagaaaaaa

SEQ ID NO: 10982 - DNA, 87 bp, Zea Mays
cagggcaccttcccaaggagtcattccttcagcatggaacatccaatgtggccaagatggtttctagcacattctggaatatgaact

SEQ ID NO: 10983 - DNA, 381 bp, Zea Mays
atgttcatttgctgtggactgccccgaatatgcatagccccagtcggtgttttacagggtaaacaccacactggtgatgtccgggaatttctccttgatggccgccttgataccgctgccgatggattccggcccgtcgtacctcaccaggcagtcctcgccatcgacggccaacacatccacgctcccgccgtagttcgcgatcgctggccgcagtatgtccaggtgccggttcaccgcctcggccgttgtctccgccgccggctggtccccgtcgaacacctgacggatttccttgaaagcgtcgccgaacttctccttgagcacacgctcgatgcccatattcatcgtcgtcgtcgagctggggcagctgccgcaagc

SEQ ID NO: 10984 - DNA, 64 bp, Zea Mays
ccttgtttcaatattgacaatctctctccaagtagtgacaaccaatctatgaataagaatagaa

SEQ ID NO: 10985 - DNA, 935 bp, Zea Mays
gaattcggtgataggaggcgacgacttcaagagtgggcagaccaagatgaagtctgtgttggtcgatttcctcgtcggcgctgggattaagcccacctcaattgcaagctacaaccatctgggaaacaacgacggcatgaatctctctgccccacaagtcttccggtccaaagagatctccaagagcagcgtggtggacgacatggtcgctagcaatcccatcctctacaagcccggcgaacatccggatcacgtaatcgtgatcaagtacatcccctacgtgggtgacagcaagagggctatggacgagtatacctctgagatcttcatgggtggcaagaacaccatcgcgctgcacaacacctgcgaggactcgcttctcgccgcgcccatcatccttgacttggtgctcctagctgagctcagcactcggattcagctcaaggccgaagggcaggataagttccactccttccaccctgtcgccactattctgagctacctcagcaaggctcctcttgtacctcctggcacaccagtggtgaatgctctagccaagcagagggccatgctggaaaacatcttgcgggcctgcattggccttgcccctgagaacaacatgatgcttgagcacaagtgaagagtttcacgtcccttaattaactaccacaagataggatgaatggaaaaaggagggatcaagcgaaggtgtgggaataatcagtgactcctctgagcccaacgaagaaatgtcaggaggctacaggaaggagaagtgtaaggagagaagaccaagcatggatatatcctcttttcgaaggcaatctatctattctttttttgtagatttgactcgttttttgtactcgtgggacgagattgtgtactggctatatatccactgtatgcagcatgaaacctttatttaaaaaaaa

SEQ ID NO: 10986 - DNA, 1579 bp, Zea Mays
tttttttttttgcgagcgaaagggcttgggatgcacgtgatagctcatgatccctacgcccctgccgaccgggcccgggccctcggggtagagctggtttctttcgacgaggccatcgcaagagccgacttcatctccctccacatgccgctgataccgacgacgtccaagatcttcaacgacgagtcctttgcaaagatgaagactggtgtccggatcatcaacgtggctaggggtggagtgatcgacgaagacgctctggtcagggcgcttgactccggcaaagttgctcaggcggctcttgatgtcttcaccgtggagcccccgcccaaggacagcaagctggtgttgcatgagaatgtcactgtaacaccccaccttggagctagtactgtcgaggctcaggaaggcgtcgctatcgagattgcggaagccgtggttggtgcgctgagaggggagctcgcagcaaccgctgtgaatgcgcccatggtcccagctgagatcctgtcagagctggctccatacgtttctctggccgagaagctcgggaggctggcggtgcagctcgtggccggcgagagcggcatcaagggcgtgaaggtggtgtacaccacagcgcgtggccccgacgacctggacactcggctcctccgcgcgatggtgaccaagggcctggtggagccggtgtccagcacgttcgtgaacctggtgaacgcggactacacggccaagcagcgcggcctccgcctcacggaggagcgcgtggcgcacgacagccccgcggcggaggcgccgctggagtccgtccaggttcgcctctcgcacgtgcagtccaagttcgcgggtgccatcagcgacggcggggacgacatcgtcctggagggccgggtcaagtacggcgtgcctcacctcaccctcgtggggccctacgaggtggacgtcagcctggagggcaacctgatcctgtgccgccagatcgaccagcccgggatgatcggcaaggtcggcaacatactcggcgacacgaacgtgaacatcaacttcatgagcgtcggacggacgttcaggggcaagcaggcgatcatggccattggcgttgacgaggagcccgacaaggacacgctggagaagatcggggccatcccggcgatcgaggagttcgttttcctcgaactatgatggctagcagcgagttttctctaggattgatatttgttatagtacgtactgaactggggtttgacgtctcatgtcatggccacagggaggaacctgatccgctctggtctgtctgtctgtctgtctgtttggtgacctctacattttttatgcggggagaaggaagcaatatatattgtaaaaggtgggtgccttggcttgcccccctgcctaaataagaggtgtgtgccgtttgtttatctgtaaactgtgtatgtgtatgtgcttaatgcgtgattctaattaagcacatcatcattgcgtctgaaatgaagacgggatgtgtactgtgtggggcaacaaattgtggtactgtttgttcaactcgaaaaaaaacaggtcaccccaaaaaagaaagaaa

SEQ ID NO: 10987 - DNA, 1399 bp, Zea Mays
ccttataaaagccatgactgccgccactcgactcagtaggttaaagcgacgcccgccgccgcaagccgtccgccttgcccctcgaaggcttggtcctcctccttgtatcccgacctcccccgcgacagacccgtttccccgctaggctagagttatcgttcctctgcagcgatggcgatcaagcggaccaaggcggagaagaagatcgcgtacgacaagaagctgtgcagcctgctcgatgagtacaccaaggtgctcatcgccctcgccgacaacgtcggctccaagcagctccaagacatccgccggggcctcaggggcgactcggtggtgctcatgggcaagaacacgctcatcaggcgctgcatcaaggtctacgccgagaagaccggcaaccacacctttgacccgctcatggacctgctcgtcggcaacgttggcctcatcttcaccaagggagacctcaaggaggtgcgcgaggaggtcgccaagtacaaggttggggctcctgctcgtgttggtctggttgctcctgttgatgttgtcgtgccccctggcaacactgggctggatccctcccagacctctttcttccaggtgcttaacatccccaccaagattaacaagggtactgtggaaattatcacccctgtggagctgatcaagaagggtgagaaggtgggctcgtccgagtctgctctgctcgccaagctgggcatccgccccttctcgtacggtctccaggtcaccagcgtctacgaggatgggtctgtgttcagccctgaggtgcttgacctttctgaggaggacctaatcgagaagttcgccactggtgtctccatggtcgcttctctttccctggcactatcgtacccaacccttgctgctgtgccccacatgtttatcaatgggtacaagaacgtgcttgctgttgctgtggagactgactactcgtacccacacgccgacaagatcaaggagtacctcaaggacccgagcaagtttgctgttgctgctcctgtagctgctgcggactctagtgctgctgctgcccccaaggaggaagagaaggctccagagcctgccgaggagtcggacgaggaaatgggcttcagcctgttcgacgactaagccgctcttatcgtccatccgccgcaacctattccatgtggaaaggattgatgaagaagatgcaacatgcgaggatgaacgttgagattcgtaattttttttaatttagtgcactttgtatcaaattttgtatgaatttatattttatttatgaatatatattacctataccatatctggagcgtgcaatctattttttaaatggtatcaaataaaaggactaagcgcactgtagaaaagtattcagaggacacgaaaatggcacacc

SEQ ID NO: 10988 - DNA, 59 bp, Zea Mays
cagcctcactcctccgtgcactatttccgtctgctagatgacgaagaagaggaaccgga

SEQ ID NO: 10989 - DNA, 79 bp, Zea Mays
gtattttgaacaggtaggccatatggtccgtcaaggaagatcagagggttgtcaagaagcaaaaagttctagcggagcc

SEQ ID NO: 10990 - DNA, 954 bp, Zea Mays
ttcctagctgatcttcagggcgacgaggatcaagcttacaggaaaatcaggctccgtgctgaagatgtgcagggcaggaatgtgctcacaaacttttggggtatgaattttaccactgataaactgagatccctagtgaagaagtggcagacattaatcgaagcccatgttgatgtcaagacaaccgacaactacatgttgcgtttgttctgcatcggcttcacgaagaggcgcccaaaccaggtcaagagaacctgctatgctcaggcatcccagatccgtcagatccgccgtaagatggttgagattatgatcaaccaggcttctacatgtgacctgaaagaacttgtttcgaagttcattccagaagttattggtaaggagattgagaagtctacctccagcatcttcccacttcaaaacgtcttcatccgcaaggtgaagatactcaaggcccccaagttcgatcttgggaagctcatggaggttcatggcgactacaaagaggatgttggtgtgaagcttgagaggcctgtcgagggagatgaggctgtgcaggaggttgctgctgccgagtagtttgtttgctacttctatatctaggctgagtctggacatgaggttgcttatgacgtgaacttagagttgtctacttgttttcatccgcccctaagattttgtctggaaacaagtttaaaattaagattattctcaacaagtgtttaagattactcgtggtgatcttctgagttcgagtactgctgtactaagttccttgcatcctcatttttgtttggccatcgatattttacgttctcgttctgtgctctgtttatttattgttagctgacactggtcatccagaattgtaaacttttaacactatcagttaaaactagtactacctccattttttattcatcatgttttagtttaaaattgaactagtaatcg

SEQ ID NO: 10991 - DNA, 278 bp, Zea Mays
tttcattggattcattgttcatgacgatgcaaagaagatggacaagggactgaagaaccgttacacggtttgatcccagagagtagtagcatgtagggtggttctttccgattccgtagcaccttgcagagtgtgttgaaggttctctatttgctgaggagttgcttaagcataatctaacatgatgtcgaatgtattcctgtatgttccataggtcagtcacctaggtgcctaggtgttgtttttgtctcagctttgtgtgtgtgtgtgtgtgtgta

SEQ ID NO: 10992 - DNA, 284 bp, Zea Mays
ggccgtctcgcttcggcttctcccacttccttccccagatctccaagaccaggagccccggcgaagccaccacgcacgcagcgatgtcggcgagcagcacgcccgtagacgctttgggggagccgatcccgacgtcgtcggtgctgatggcagcgtcgaagcacatcgcagtccggtgccgcccggagaacgtcgccttcctcaactgcaagaagaaggaccctaatcctgagaagtgcctcgagaagggtcgccaggtcacaagctgcgtccttagccgcttc

SEQ ID NO: 10993 - DNA, 917 bp, Zea Mays
ctctcacgctcacggccgccgcctccacccgtcgccgcttcctcccgttagactaggttaggctagggtgtcgaccagctcgcggaaatggtggccttcaggttccatcagtaccaggtggtggggcgcgcgctgccgacgcccggcgacgagcaccccaagatctaccgcatgaagctctgggccaccaacgaagtccgcgccaagagcaagttctggtacttcctgaggaagttgaagaaggttaagaagagcaacggtcaggtcctggccatcaacgagtcttcgagcgtaacccgacgacgatcaagaactacggcatctggctgcgctaccagagcagaaccggctaccacaacatgtacaaggagtaccgcgacacaaccctgaacggcgctgtagaacagatgtacaatgagatggcttctcgccaccgcgtgaggtccccctgcatccagatcatcaagaccgccacggtgcacttcaagctgtgcaagagggacaacacaaagcagttccacaacagtgagatcaagttcccactcgtgtaccgcaaggtcaggccgccgaccaggaagctgaagaccacgttcaaggcttcgaggccgaacctgttcatgtgatttagctgtggtcagtgtatgtgatcgtaagaatctgtgttttaagttttgacgctaagacttgggtggtttgatgattcaactcgttttgaaacgtgcttggtgaaccatttgtgcatcgacttgtgccgagttgttcgtactcggcacactaatgttgatctatctggagtgggtgatttatttccttacctcggtcatcgcttctcctgcgttactgaatgaacgaatggtaatggtagtctcatggaaaaagagttccaaatttttgaactcatggaattcgaaatttcg

SEQ ID NO: 10994 - DNA, 59 bp, Zea Mays
ccacggcgcgctcgccgttcatctctgacgcggcccgtactggccatggctggcgatgg

SEQ ID NO: 10995 - DNA, 1335 bp, Zea Mays
ataataataataataatgattaaatataattagtagtttagttaagctttcatcaataaatactttgttcataaatactttcttcataagtttagcttgtccttgtaaatggaaaaatgataaatagttgatctataattcagaacactacaatggtattgactattaagcacacagcacttgcaacagaatgaaatatactacatcgaacttcgatgaatagcattgcaaatcaaaacaggatgatatgaacaacaatcatggccaatagggggctacgaacaatttatcacaaaatacaaaatggaaacacacagcagcagcacgcaatggagtggacccatacagagtatactcaaaataactcaaccattaagcaccagcgaactaattattaaccggctactcaatagtcatcgccctcgtcaccctcgtcatctgcaccctctgcgccgacttcctcatagtccttctcaagagcagccaagtcctcacgggcctcggagaactcaccctcttccataccctcaccgacgtaccagtgaacgaacgcccgcttggcgtacataaggtcgaacttgtgatcgatgcgcgagaacacctcagcaacggcagtgttgttgctgatcatacacacggcacgctggacctttgccaggtcgcctccagggacaacagacggtggctggtagttgatgccacacttgaatccggtggggcaccttccacaaactggacagttctcttggtcttgatggttgcgactgcagcattgacatccttgggaacaacatcaccacggtacatcaagcagcaagccatgtacttcccatgccttgggtcacacttggccatcatgcttgagggctcaaagacggcattggtgatttcaggaacagagagctgctcatggtaagccttctcagcagagattacaggggcatatgaggaaagcatgaaatgtatacgtgggtatggaacaaggttggtctggaactcggtgacatccacattgatagcaccatcaaacctcagggaggtggttagagatgatatgatctgtgagatcagcctgttcaagttggtgtaggttggcctttcgatgtcaagggacctcacctcatcaatgacagtgggttcaaggtcgacgaagatggccctcggcacatgcttgccagaaccggtctcgctgaagaacgtgttgaaggcatcatcattcacctgggcatggtgccatcgggctcgatgccgtgctcgaggcagtagagctcccagcaggcgttgccgacctggatcccggcctggccgatgtggatgctgatgatctctctcatc

SEQ ID NO: 10996 - DNA, 874 bp, Zea Mays
agggaaaggggcattgtgatatctgtgacgtttttagtgaggtaccttgctgagttcaagtcaggtgcagagaggaaggatgctgcggagagcaccatgaatgcctacaaagctgctcaggatattgctcttgctgatctggccccaacccaccccatcaggctcgggcttgctctcaacttctcagtgttctactacgagatcctcaactcccctgaccgtgcttgcaaccttgcaaagcaggcctttgatgaggcaatctccgaactagacagcctgggagaggagtcctacaaggacagcactctgatcatgcagctcctgcgtgacaacttgaccctatggacttccgacaccaacgaggacgccggagatgagatcaaggaagcagctgctgcccccaaagaatccgcccccgagggccagtaagacggatccgatctcccgacctgatgcgtgtctgctgatgtcggggagtttaccaggactgtgccgttcttgatttctgatagcttatcttctagtacacctcgtgttgttctcttcgtcacggcgccggtgcgtgtgcgctgaagctgcctgccattgccattgccgctgtttttaattaagcacacactctagatgttatgcccgcatgctatgtttcgattctcaaagttgataaatgatggctggatgctggttttcgtgctccaagcctgctgcttcttccagggaaaaaaagacctgcccttgttgcagcgttgttgtttagaatgacctatatttgactggtattctgttacggtggctttgcaaagctgtttgtttggtttaatgtctcggaataatatgaattggctgcattggacgtgtgtgtttcttttaccat

SEQ ID NO: 10997 - DNA, 879 bp, Zea Mays
caactggccaaccctatctatctacatgtaagacgcgctatcctatgtgtcgaaggctacacacgaacagccgcagcaagtatataatacttggccagttccagttgtgccattgccgcgtccacggctccacccctataaatgctggccatgaggcaccacggtttcttcaattcatccagacaagtcatatctagctagtagctccctgaaaagttcactagagaagcatttgagggaggagccatgtctgaggagaagcaccaccaccacctgttccaccaccgcaaggcagaggaggaggaaggcgcctccggcgaggtcgactacgagaagaaggagaagcaccacaagcacatggagcagctcggccagctcggcgccatcgccgccggcgcgtacgctctgcacgagaagcacaaggccaagaaggacccggagaacgagcacggccaccgggtcaaggaggaggtggccgccgtcgccgccgtgggctccgccgggttcgccttccacgagcatcacgagaagaaggacgccaagaagcacgcccacaactgatccgtcgcaggctgcctcagccgaagcagcagcacatcgtcgcggttgctgtttcatctgttctcccagcctcgtcttcgtctactgtgtgccgggcaggccttgatttgaggctttgagctaccgatatttgcacggacgtaggaactgtgttggtcctcggcgttcttgtatcaagatcaaatcaggccttcaataagtgtgtgtgtgtgcatatatcttttttttaaaatttatctctttttttttgtatcgagagatgttctgaataatgtgaatttacgtgtgtttatataaacgaatttaagaaaaagaaag

SEQ ID NO: 10998 - DNA, 64 bp, Zea Mays
aagtggatcgaagtctgacccctaaacagcatcaggtccgaacaggcggtggcattcttcacca

SEQ ID NO: 10999 - DNA, 605 bp, Zea Mays
tttgtaagtaatcaatttgatttgtgatgctactgaatgggtgaagggaaaaccaatggatgaagttttgacaatcaagaacacggagatcgcgaagcacttgtcccttccaccagtaaagctccattgcagcatgcttgccgaggatgcgattaaagctgctgtaaaagactacgaagccaagaagtcgaagatggggcagaagggtgaagacagcccttcagagaaggctgctgaagcatgaaaggttctgccgtgaagtatattgtgctgatacgtttctcagtccatgactatccgccgcatattgccaaagataaatgattctgtttgtgaggcgagggattgtgtgtaatgttcacgaagtgtggtagtgcggcatgtggctcaactgttttaaggatggtgacgactgatttcaaataaatttgctgtcatcgtagaattagaagaaagtactatgtggatttacaggagctgtttctggaatttgtgatatcatggtactttctttttgcaagaatgttactgttggtattggcattccggcagtataggttgacgattgacgaatagctagccaaagtaatgcaaagtgaaatcta

SEQ ID NO: 11000 - DNA, 74 bp, Zea Mays
atcgacggcccgaagggttatacgcctagatctaatctgtgccctccgcaatcgatccaacggttcgatgttta

SEQ ID NO: 11001 - DNA, 2006 bp, Zea Mays
tatttatataaaatcgctatatatatacatttatattttgatatttttgtatcttacttatatactttaaagtattatttttagtttatagatttagccaacgagaaattcaaaataagtaactacatttaaataaatatttaaaaagctatgggagtttttttaccaaaaatatataataattaaaaagaatataaaggcttctagttgctctcacgccaggtcacacgaaaaagaaaataaaagaaaagcagacaaaaatgttttaaatcgacaaaaatcagagaatgcgaggccggcaagtcggcaaccctaggtctgtggttgatccccaacacctcctgccctcctataaaagccgcccgcctccgtttctcgcctgcaccgcatcgcctcgccgctgttccccgcaacctatcgacccaatctcgtccgacccggcgcgtcgtcccctccagatctccgtcgccctctccaggtacaagatgcccagaatgattaccaagatagaaggccgtggtaatggtatcaagacaaatgttgtgaacatggttgacatagcaaaagcacttgccaggccagcttcctacacaaccaagtactttggatgtgagcttggtgcacagtccaaatttgatgagaagacagggatttccttggttaacggggctcatgatactgcaaagctggctggtctccttgaggtattcatcaagaagtatgtccaatgttatgggtgtggaaatcctgagacagagattctcatctcaaagacccagatgatatcactgaaatgtgcagcctgtgggttcgtctcagatgttgatatgagggacaagctcacaaccttcattctgaaaaacccaccagaacagaagaagggcggaaaagacaagaaggccatgaggagagctgagaaggaacggctgaaggaaggtgaggctgctgatgaggagcagaagaaactgaagaaggatgcaaagaagaagggttccaaggattccactgctaagggtttgaagaagaaggctactactgctactggctctgatgaggatcactcatcctctccaactcgcagccatgatggtgacaaagcagctgcagatgatgatgacgatgatgtccagtggcagactgacacttcaattgaggctgcgaagcagcgcatgcaagagcagctgagtgcagcaactgctgaaatggtgatgctgtcgactgaggagactgagaagaagatgaaacaggcaacccacaaagatggaagcactaatggttcagcaaaagaaatccctaatgacaagcctgccgtcactaagcctagtccctatgaagaactgattggagacatcaaggctagcctaggaagtgctccgacccctacccagctcaaggctgtgctggcctcatcaacccttcctccccaggacgtgatgaatgctctcctggaggctctctttggtggtgtgggtaagggattcaccaaagaggttgtgaagaacaagaagtaccttgcagttgctgtgccagatgagggtgcccagacccttctggttcaggccattgaggcttttggtgggaagtgcaaccctgaggcgctgaaggaggttcccgttgtcctcaaagccctctacgatggagatatcctggacgaggaaaccattgtggactggtacaatgatgctgtcgcagctgggaaggactcccaggttgtcaagaatgccaagccgttcgtcgagtggctccagagtgccgagtctgatgaagagggtgacgacgagtgaagaggccacgctgctctactgctaatggccgaacttgataatattatttcaataagtttgttttgcttgcctggtgtcggtgtttaaaactgttaattgtcgtgtggcgcagcatactcttctgttgctgcatgtgtcgtcgtcagtttggttgtctgttggatgtcacagtttattatggattgctactatacaagtatttgtttcggatgtaaaaaaaaa

SEQ ID NO: 11002 - DNA, 658 bp, Zea Mays
caatgagtaggttgactcattgcatggaggccctgaagtgatggaggctacttcaatgcaataatgaccttcccccagaactatcccaacagcccgccatcagtaagatttacttctgagatgtggcatccgaatgtttatcctgatggacgtgtttgcatttctattcttcatccacctggtgaagatcccaatggttatgagcttgcaagcgaacgatggacaccagtgcacacggttgaaagtatagttctgagcatcatttcgatgctctctagtccaaatgacgagtctccagcgaatatcgaagctgccaaggattggagagaaaagcgggatgagttcaagaaaaaggtaaggcaatgtgtccgcaaatctcaggaaatgctctgaaggagaaacatatggggagttgaacgagtgctgcaacttcacaaccagttacctagccagcattcttttgcttttcccctgtatattttccattcagtgtcattcgtatggtggtgttgggtctctttagacaaactggggactgttgcttatcctaaaaattcgattgtattgtgtggcatgaaatgatcgatgtcaaagaatattttgaacatgctgccacctaattatacttttcatatgaacatcataaagaatatttgga

SEQ ID NO: 11003 - DNA, 76 bp, Zea Mays
agctctgaatttagcgtatcccaaggaaatagggaggatggtaccggaccctccagcacctagcttttcatcactg

SEQ ID NO: 11004 - DNA, 340 bp, Zea Mays
ccgttctatcttctccagctccaaatggcgccatcgcggcggccgggttatcttgtccagacgtgcatcatatcctccgtgtgatccattcatccccgcgccgtgctagcttgctagttgcaagcaccagccgaccaccaaacggtagcgcacgcggacaatttaacagcatcaggtttaggccctgctgccgtcgtcgagcgcccgggccaccgcacacctgaaagcaatggagatcgtcgccacgcgctccccggcttgctgcgccgccgtgtccttctcccagtcgtacaggcccaagaagccttaagtttgctgatgatgttgatgactggcgcca

SEQ ID NO: 11005 - DNA, 104 bp, Zea Mays
cttgtactacgcgttcttcttttgtaaagcatctctgcacacgtccacagcaaaaaaaaaaaaaaaaaaaaaaaaaaaaaaaaaaaaaaaaaaaatcctgagac

SEQ ID NO: 11006 - DNA, 576 bp, Zea Mays
ttcagagactacaagatacctgatggaaagcctgccaacaaatttggtctcggcaacaagcccgcaagcaaggtcattcaagagaccaacgaatcatgggagaaattggtaaagagaaatattcccgctggagagctctcgttggcctgattttggcccatggaagccaccacattcttttgaactgctttcgtgagcatgtcgttttgtatgctgtgaccatgcttcttcgtttgcattccaaaccttttttacgaactgtttaacaaaaatgatcttgtcggataaataatgattctggtgcgagtttaccagaacggcaaggagtttctcaagtaaatgcagcgtatttttctatacatacaaatgtgtaatttataaagttggaacacaccattcaactgagcaaaagcagtttgaggtcgttaagcaagtcttcccacaccgtgctttgtgatgttggatggatagcggaaaatagaagacgtggcactgtagatgtaacattgcgtctagagaaattcccatgtccaaaataggtttaaagtgtagaaattaaccactttgaacctaaag

SEQ ID NO: 11007 - DNA, 57 bp, Zea Mays
catccactgtgaagcatcaccttttgttttaaaacgaaacatttgtttttctaaagc

SEQ ID NO: 11008 - DNA, 727 bp, Zea Mays
ggtatgtgcacttccttccagccaggatttgctttccagcaacagcttgttccaggcatgaggcctgggggtcctcatatgccaaactattatgttccggttgtccaacagggccaacagggtccacgcccaggtattaggcgtggagctggagcccagggccagcaacctgtgccaccatttcagcagcagattcttccgcgaggacggatgtaccgttacccaactggtcgcaacatgcctgaagctccagcgatgccaggggttgctggaggtatgattcaggcatatgatatgggaggcttccctgtgagagatgctgccttatcaccggccgctcaaattgggactctgacttctgcccttgcaaatgctaatcctgagcagcaaagaacgatacttggtgaaaacctatacccactggttgagcaactggaaccaaaccaagctgcaaaggtcactggaatgcttttggagatggatcagaccgaggtcctccacctgctcgagtcccctgatgctctcaagtccaaggttgctgaggcgatggatgttctccgcaatgtggcccaccagcaaaacccaaacctcccgaccagtcagcttgccgcattatcactgaccgaaggcattatgtcctaacttgaaggccataacaaactatcttcagtttccaactcagtgcgggtgtttccagaggttgagtacaacgaaagggagccgtgac

SEQ ID NO: 11009 - DNA, 926 bp, Zea Mays
ccacctgtaagccgccgcacacatatatatgccgtgaccaaaccgtcgcttccatttttcgaccgccgccgcccccagtccccgatccgaagctgtgcctcgtaccatttcgatccaatggcgccgacgtcgaagctgtcgacgggcatcaagcgcgcttcgcggtcgcacacgtaccatcgccgtgggctgtgggccatcaaggccaagaacggcggcgccttccccaaggccgacaaggccgccgccgccgtggaacccaagttctaccctgccgacgacgtcaagccccgcgttcccagcacccgcaagcctaagcctaccaagctcaggtcgagcatcacgcctgggacggtgctgatcctcctcgcagggcgcttcatggggaagagagtggtgtttctcaagcagctcaagtctggcctgctccttatctctgggcctttcaagatcaatggagtaccgatccgccgtgtgaaccagacctatgtcattgctacatcaaccaaagttgacatctctggtgttgatgtcgccaagtttgatgacaagtactttgccagggagaagaagcagaaggtgaagaagaccgagggcgagctttttgagacagaaaaggaggcatccaagtcactgcctgacttcaagaaggatgaccagaaggctgtggattctgctctgatcaaggctatcgaggctgtcctggagctgaaaacctatcttggcgcccggttctctctcagggatggtgacaagccccatgagatggtattctaagtttctagttttggagttcgtaggaagctgttttgtctgtgttcttgtacttctgagttttgtaccagtagcgaacacttcaaccacaatgaaacattcgctactggtacaaaactcagaagtacaagaacacagacaaaacagcttcc

SEQ ID NO: 11010 - DNA, 79 bp, Zea Mays
aaggtttcttattcacttctaaatagtcaatgatttctttacaacacttcaccagtggttcgactttaaactgtgagca

SEQ ID NO: 11011 - DNA, 59 bp, Zea Mays
ggctcggaaggtggaaggacgcgatgcatgaggggagtgcaaaggcatggctgccaccc

SEQ ID NO: 11012 - DNA, 2604 bp, Zea Mays
atcgtctcgtctcctatcgccacccctccgtggctccgtcatcgcgcacggctaccaacccctcctccgcccgccaataagtaccgccccgctcgccacctccatctcagaggagagagtcgctcagcactgcacgactcctcccccatctaccactacctgtctacctacccagcccatcgatcacccctcgcaacgcaatggcgctggccaccaactccgccgctgccgcagcagctgccgtatccggcggcgcggcatcccagccgcaccgcgcggccacgttcctcccgctgaagaggcgcaccatctccgccatccacgccgccgacccgtctaagaacaacgggcccgccgtccccgcggccgccgccgctaagtcatctgcctctgcggtggccacgccggagaagaatccggcggcgccggtaaagtgggcggtcgacagctggaagtcgaagaaggcactgcagctcccagagtacccgaaccaggaggagctggacacggtgctcaagaccatcgagacgttcccgccggtggtgttcgccggagaggcgcgccaccttgaggagcgcatggccgaggccgccatgggccgcgccttcatcctccagggcggcgactgcgccgagagcttcaaggagttccacgccaacaacatccgtgacaccttccgtatcctgctccagatgggcgccgtgctcatgttcggtggtcaggtgccggtcgtcaaggtggggaggatggctggccagtttgccaagccaaggtccgaaccgttggaggagagggacggcgtcaagctgccaagctacaggggcgacaacgtcaacggcgacgacttcaccgagaagagccgcgtgccagacccgcagaggatgatccgcgcctactcgcagtcggtggcgacgctcaacctgctccgcgcgttggcgaccggagggtacgctgccatgcagcgcgtcacacagtggaacctcgatttcatggatcacagcgagcaaggtgataggtaccgtgaattggcccatagggtggatgaggctcttgggttcatgactgcagcagggcttacagttgaccacccgataatgacgactactgacttctggacctcgcacgagtgccttctcttaccctacgagcagtctcttacccgtaaagactccaccagtggccttttctacgattgttcggcccacatgttgtgggttggtgagcgcactcgtcaactcgatggagcgcatgttgaattccttcgtggtgttgccaatcctcttggcataaaggtgagcgacaaaatgaaccccagtgacttggtgaagctgattgagattctgaacccttcaaacaaacctggaaggatcaccataattacaaggatgggggcagagaacatgagagtgaagttgcctcatctcatccgtgctgttcgcaatgctggattaattgtcacatggattactgatcctatgcatggaaacaccatcaaggccccttgtggcctgaagactcgtccattcgactcaattctggctgaagtgcgcgcattcttcgacgtgcatgatcaagaaggaagtcacccaggaggcatccaccttgaaatgactgggcagaacgtgaccgagtgcattggtggatcacggactgtgaccttcgatgacctgagcgaccgctaccacacccactgtgacccaaggctgaacgcctcccagtccctggagctcgccttcatcattgcagagaggctcaggaagaggaggatgcggtcggggctcaacaacagcctgcctctgccaccactggctttctaagtagccgaagctgaacagagaaggtagagggatagttgcggcgactcgaaagattacgcctgtttatttgttgatgcttggtgtggaggcctggtgggtgctcttggcacaagttacatgctggggagctataggagggtacctgttgcgttgtggaagacagtagctagtattatgtgttgtaattgtatgccttcgtttcatgttctgggtgcgtgacttgtcgactttgctgcttctggggttctgaccttggtaaggagagaataaagagataatatgagtgcgagatgcttgctgaactggtgctcagtaaattgatcccttgattgaatggttctgttctgttatcttttgccgcacttctccgaaaaagtttcaggataatctattacaggaaacttcgtcttcaagatacaagctcttctcctttatgacgaaggcatacaagataaagacagatcaaagaggataaaagtaaacgctgaagctatcaccagatagacagcttcggctcgcaatgaagatgatgaataatgatgatgatcgaaagaggaaaagactatttagtccttaataaattgtattacgatcatgtgtaaatgttgagagcataaatgtacttttgtccgggctgcgtcccgtgcctataaatagatgaacaataacactgtactgttcacgctgaattgtattcactttctcgcatccacacatttgagcaagccgaatgtattaatgtaatattaacattattgatattcatttatgttctatggaattgaag

SEQ ID NO: 11013 - DNA, 1296 bp, Zea Mays
cagaagagagcaataatgctttcggttgcattatttcttcgcctcgcgagaccaccggctagttaggcgagtaaaaccattacaacacgcgcacacacttgacaataacaagagggaaaaaaaagaagaagaagctccctagctaagctagaaagacgggtatatatctggtggcaatggtcacctcacctagggctgctctgcatgctcggggtcaggatcagccacacgtacgtacgtacacgcttctattgtctccaatcacatcaccggaaaattttcttctttttttctgtaacaatcacatgactccgtcgtcgcaagaacaacaagggtggcatggcaaaggtgttttcgtcgacatcacagcacacatctcacaccgtgtagttctgctggatggtgtcgatgtccaggcccttgagcttgaccaccgactccacgtggcccttgagggtgttgagctcccgcagcctcgcgatctcggcgcgcctcttggcctgctccgcgatctcggacagctcgcggtagctgttcttgtcgtggaacagcgtgctggtggcggcctccggcggctggagcccgtgcagcgtcctctgcgcggtggcccactgcgcctccctctcctcccgcccgtagtccttcttggtggtgaaggcggtctgcacacgcacgaggttgtcccatgccctgccgctgagcacgaaacggatgaagaacttgatcaggtccagagggaagtagaacacgatgctgtagagccagaccacaccggcccagccccagccgatacccttgatcctggcgaagccccagttggcgtagacagcgaggaaggtcgcgacctgcacccgaaaagagcaggcacggattaggcatgcttccacgaattgaactaccaccaccattcgtcagctcacagtcatgcagtccggtatacttacaagctgggcgagcaggaacgcggtgaccaggagcaggccagggcgctccacgaaggaccagctccgggaccgggtgacgaagatcagagcctggctcacgatactcacttggaggtacagcgcggacatcatctcatgctcactgtccctgatcgacctcacaccgaatttgtcctgcgcgatgacacggctaaagaagtcggtcttgtgcatagcccagaagaaaatgacagtcatcagagcgaggtagcttccaagcacgatgcccgtggcaaagatctccttcagcttccagctgtccggcaacggagacggcttaactctgtccttagagatggtcatgatagtgcct

SEQ ID NO: 11014 - DNA, 79 bp, Zea Mays
gctgccttcggcacccgtgaaaaatgaaggttgaatcgggtgatggatgctcttaactttgaatatccagattacgaca

SEQ ID NO: 11015 - DNA, 53 bp, Zea Mays
attagctggaacgattccaggtgtaatccgatagaaacgaacaaggccttaat

SEQ ID NO: 11016 - DNA, 1559 bp, Zea Mays
accatatcattgggccgcgggactcggcgacaggccttttgtagaccgcagccggcaccatctcttgccgcaccccccattcgaacgccggagctcgacaaggacgaccgacgacgcacgcggagatccggcgtactgcaaattttgaaaactgaactgtaagatggcatcagcagagctttcccgtgaggaaaatgtgtacatggcgaagctcgctgagcaggcggagaggtacgaggagatggttgagttcatggagaaggtagccaagactgttgactcggaggagctcactgtggaggagcgaaacctcttgtctgttgcatacaagaacgtcattggagcccgccgcgcctcatggcgcatcatctcctccatcgagcagaaggaggagggccgaggcaatgaggaccgagtaacactcatcaaggattatcgtggcaagattgagactgagctgaccaagatctgtgatggcatcctcaagctgcttgagacccatcttgtgccgtcttccactgcccccgagtccaaggtcttctatctcaagatgaagggtgattactacagataccttgctgagttcaagactggagctgagagaaaggacgccgctgagaacacgatggtggcatacaaggctgcccaggacattgctctggctgagcttgctccaactcaccctattaggcttggactggcacttaacttctcagtgttctactatgagattctgaactcacctgatcgcgcctgcagtcttgcaaagcaggcttttgacgaggccatctcggaactggacaccctgagcgaggagtcctacaaggacagcactttgatcatgcagctccttcgtgataacttgaccctatggacctctgacatctcggaggaccctgctgaagagattagggaggcgcccaagcgggactcgagtgaggggcagtaaagccggctttatgtgcctagaaactagtagctagtgtttgctgctgtcgaatgacactatgcaatgtgatctggaacctggtttcttgggtgcgacgcttgtagccgtgttatgactgtcgtccgtaaaatttgggggctccccgtaagggatgctgcctggcaaggcctcggtgtcccacctcgtctgtggcgtggggcgctggagcccggtctggttgggttgggaagccctttaaactgttgtcacttgcattttaccttttccatcgctgtttattgtgagtggtcctatatcaatggctggtctcagtggtctatacgtatgctttttggttctcttgattcctcacagggtgagtgggggcatgagcatttctctgtctcatctcaatgatatgacttcagaatccgtaaatctctgaagtctaaacgctctatctaaacctttggattcgattacaattgtagatatagaaatctgtagaagggtgcaattcagaatactttgccatgaaatgaatatccttcttgtgagactctgtattaagactaaaacagctcaaattgatagagattctgtgattccttccctacacgatgagagcctt

SEQ ID NO: 11017 - DNA, 89 bp, Zea Mays
ttacccgatctgcaggcctgtcagcggatagacatctggcagagtctccatatatgccagctagctatacgtaccgcgtcgctcgctgg

SEQ ID NO: 11018 - DNA, 656 bp, Zea Mays
cgagcgaagggtcaccgtggacgccacgcagctttccacattgccagggcagggtccccgacctcgcgcgcgcgccaaaaggcgaaaagggggcgacctggctgtacatctacaacgacaggacgccgttcgacaagctggctgacaactacttctgccctgtttgtggagctccgaagagaaggttcagaccctacgagccagcagtctccaagaacgcgaacgccaccgatgccagaaaggcgaggaaggaggagctgaagaaggaggagagcatggggaaagccttgcctattgccatcgtcgtcgggatcattgccttggctggcctgtacttctacctcaacaatgtctacagctaaacgacgaatagatccgtttggtgcggcgaacaggattcatgccgttttgcagtctttttccctttgttaatcgttgcaatgtgctgtcttggtgcatgtactactagggctccaagactgtatacaagttttgctgttcatcttgaaataccacacattacataaccagcagttaacatgaagtgttttacttacttatttccagcgtttagtttggcgttcggattcgaacaggtcatctgtgggctaaacgagtttgatcaagtaaaaatctcagcgagctttatgctgtcc

SEQ ID NO: 11019 - DNA, 1519 bp, Zea Mays
gtgacattattgccccctcttcccttcccaacccaacccattgcatttgcaagcccttttacattgcagagcgccagagcctcgctcgctctcggaacagagctaggcagctaacagacgaagaagaagcaagccaagcagaattgagagagaggcgaggacgtggcgacgacggcagccgcgatggcgacgacgacggacctggggttcgaggcgacggagctccgcctgggcctgcccggcgggggaggtggaggggagccggcgctgggcggcgaggggaggagctcttcctccgcctccggcaagaggggcttcgccgagaccatcgacctgaagctgaagctggagccagcggccgtcgtggaggcggaggaggaggaggaggaccacggcgttgctgttgcccttgagaaggaggaggaggccgggaagatgaagcggtccccgagccagagcagcgtcgccgccgccgccgccgccgtgctggctgaccccgccgagaagccgcgcgccgccaaggctcaggtggtgggatggccaccggtccggtcgttccggaagaacatcatgtccgtgcagtccgacaagggcgccgccgccgccaacggcgacaagtcctcgccggcggcaggcggcggtgccgcgttcgtgaaggtgagcttggacggcgcgccctacctgcgcaaagtggacctcaagatgtacaggagctaccagcagctgtccaaggcgctcgagaacatgttcagctccttcaccatcggaagctgtgggtctcaagggatgaacggcatgaacgagagcaagctggtggatctgctcaacggctccgagtacgtgccgacctacgaggacaaggacggggactggatgctcgtcggcgatgtgccgtgggagatgttcgtcgaatcatgcaagcgccttcggatcatgaaaggatcagaagccattggcctggcgccaagggccatggagaaatgcaagaacagaagctgaggagaagacggacggacggaagcttgcatctcagcaccaccaggggtggatggatgcaagaagaacaaatctccatggcttttgcagctctgctcgtctctgtatcatactcgtcgtccctgcccttcaggcctctgtatctccctgatcaatgaagtcgttttggtgtgtcaactgttctctccgtgcccagcttgtcagtgaaagagtcagtcagtgtccatcaagtctcatcttgtcctatacagaagagagaagccatgcatgaacatgtacctgtcctataacaatgtctttttttgctacctgtttttttttctctctctctctttttttggcacaagatgcaaaggcaccctgctcctgatcaaagggccttttgcatcataagctgtttgattataattaccatggtgtgtcagtggaacaaataactgttgcaaggtgttaaaaaaaagttgtattgtaatatgatcacctctcttccttgttaaaaaaaaaaaaacatggagacagaagc

SEQ ID NO: 11020 - DNA, 74 bp, Zea Mays
ctagacgcgagcgacgacgacggacttccctaggcggcgagcggtggcagatcgacgaccctgtttttatgcta

SEQ ID NO: 11021 - DNA, 65 bp, Zea Mays
tagcagtgaggacacgcgtcatctgaagatcatcctggtacccagaatctcaagtgccaggcaag

SEQ ID NO: 11022 - DNA, 2230 bp, Zea Mays
cagctcagcgttcaccgcgccatccccgatcccggtcgcggcgccgacggatcagacgggacaggcgggctagcctcgacacgacgagaaccccgaggtccgcacggccgggctcttcccgtcgtgccagatgtcagacgccgtcacgacgcgcggagcatccggcacccccgccgcacattccgtcacggcgcctgacggagaccgcggccgctataaatgaaacccgcgctgtcctgctcgctcgcgcacacggcacacacaccacaccacacctcctcgcttgcactccgctcgtctgacatctcgtcccgtcctttcgtttcgaagcctcgcgagccccgacgatggccaccaccgcggtgtcggtcgacgagaagctcgataagcttcgcgccgaggtcgccaagctcgaccagatcagcgagaacgagaagtccgggttcatcagcctcgtgtcacggtacctcagtggggaggcggagcagatcgagtggagcaagatccagacccctacggatgaggtggtggtgccctacgataccgtcgcgtcgcctcccgaagatctcgaggagacgaagaagctgctggataagctcgttgtgctcaagcttaacggagggctcgggacgaccatgggctgcactgggcccaagtctgtcattgaagtccgcaatgggttcacattccttgaccttattgtgattcaaattgagtccctgaacaagaagtatggatgcaatgtccctttacttctgatgaactctttcaacacccatgatgacacacagaagattgttgagaagtattccaactccaacatcgaaattcatactttcaatcagagccagtatcctcgcattgttaccgaggacttcttgccacttcccagcaaagggaaatctgggaaggatggctggtatcctcctggtcatggtgatgtgtttccttctttgaataacagcggaaaacttgacatcttattggctcagggcaaggagtatgtctttgttgcaaactcagacaacttgggtgctatagtcgacatcaagatcctaaaccatctgatcaataaccagaacgagtactgcatggaggttactccaaagacgctggctgacgttaagggtggcactctcatctcttacgaaggaagagttcagcttttggagattgcccaagtacccgatgagcatgtgaatgaatttaaatcaatcgagaagtttaagatattcaacactaacaacttgtgggtgaaccttaaagctatcaagagactcgtagaggctgaggcacttaagatggaaattattccaaaccccaaggaagttgatggtgtgaaagtccttcaactcgaaaccgcagctggtgcagctattcggttcttcgacaaagcgattggaattaatgttccccgctcaaggtttctcccagtgaaggctacatctgatctgttgcttgtgcagtctgatctttacaccttggttgatggctttgtcatccgcaacccatccagagcgaatccagctaacccttcaattgagcttggacctgagttcaagaaggttgccaatttccttgctcggttcaagtccatccccagcatagttgagcttgacagcttgaaggtgtctggtgatgtctggtttggctctggaattacactcaagggcaaggtgacaattatcgccaagcctggagtgaagttggagattccagatggagacgtacttgagaacaaggatgtcaatggccctgaggatctttaagcaatgtttgtcatcaccagtttttcccaaggacatgtcacaggaactgccgagcctaatcactcctactgagctctatatttttgtaattttcatgtgcattccgattccgctgcgagggtcatgtgagcccgctagagaataattgtaatcttctttgctgcgtctgtacttgtgtttttgtgcgccaggacgtatatttttactgaaatgatactccgaagagcacgtatggtgtcttaccgggaggactcattgccgccattctgccacatgcccccggtgctcgagaatattgttatggaaagggcacaaagtggccatattcccaaggtgataaacgccgtcatgcgggacacttttcgagcgaatggcgtttgtggtccgggagaccgggaccttgcggataagttcctcgcctgcttgttcgaatccaagggtgcaaataatcacgaacgagc

SEQ ID NO: 11023 - DNA, 553 bp, Zea Mays
gctgtacctactgcgaaaggacaagcacttgctgatgagtatgggatcaagttttttgaaacgagtgccaagacaaacctgaacgtggagcaagtgttcttctccatcgcacgtgacatcaagcagaggcttgcagagactgattcaaagccagaggacaaggcaatcaaaattaacaagccagaccagggttccgaggcaccagctgcccagcgatctgcatgctgcggttcataagcagacgcacgatagccataatcattggttatttgacactatttatttcctgcttggcttttataggaagaatttgaggaagccacttatgatatactgatgatgtggttgtactcttgtttgcttccactcttcgaagcaagcacctcttgctgttgacgtagctattgcactctggacatccgttggaacaacctctctcctccctacagtctacagtgtgtgatggacgaattccatgccgttgggtttgcattatcgatcaatgcatggattaacgtatcgcccttgtgtggattgttgtaaaaaaaaaaga

SEQ ID NO: 11024 - DNA, 2737 bp, Zea Mays
ctcgcattctcgccggtgctgctgcaattaacgccgcccccggccaaccacccgaaacctacctccgccgccgttgtcgccaccgtcaacatggcgagccaaggggagccctcggcctctgcttccgatccgaaggagaagaaggacttctcgacggcgatcctggagaggaaaaagtcaccgaaccgccttgtcgtcgacgaggccaccaacgacgataactccgtcgtcgcgctgcaccctgacaccatggagaggctgcagctcttccgcggcgacaccgtgctcctcaagggtaagaagaggaaagacactatttgcattgtccttgcggacgaaacctgtgaggagccaaaggttcggatgaacaaggttgtccgccagaacctaagggtgaggcttggtgatgtggtttctgtccaccagtgccaggatgtgaaatatgggaagcgtgtccacattcttccaattgatgatacagttgaaggcattacagggaacctgtttgatgccttcttgaaaccatatttcctagaagcatacaggccgttgaggaaaggagaccttttccttgtcagaggaggaatgagaagtgtggaattcaaagtgatagagactgatcctgctgaatattgtatcgttgcgccagatactgaaatattttgtgatggggagcctattaagagggaggatgaggagcgtcttgatgaagttggttatgatgatgttggtggagttagaaagcaaatggcccaaatcagagagcttgttgagcttccactacgccatcctcaacttttcaaatctattggtgtgaagccaccaaagggcatattgctgtacgggccacctggttccggaaagactcttattgctcgtgctgttgcaaatgagactggagcctttttcttcctgatcaatggtccagagattatgtcaaagctggcaggggagagtgaaagcaatctcagaaaggcatttgaagaagcagagaagaatgctccatctatcattttcattgatgaaattgattccattgcacccaagagagagaagaccaatggagaagtagagcgtcgtattgtttcacagctactgactcttatggatggactgaaatctcgttcccatgttattgttatgggtgctacaaaccgaccaaacagcattgatcctgctcttcgaagatttggaaggtttgatcgggaaattgacattggagttcctgatgaagttggccgtctcgaggttctccgcattcacactaagaacatgaaactagctgaagatgttaatttggaactcatttcaaaagatacccatggatatgttggtgctgatcttgctgccctttgcactgaggctgctcttcagtgcattcgtgagaagatggacatcatagatcttgaggatgagacaatcgatgcagagatattgaactcaatggctgttacaaatgaccatttcaagactgcgcttggaacaagcaacccatctgctcttcgtgaaactgttgtcgaagtcccaaatgtctcttgggaggatattggtgggctggagaatgtcaagagggagctccaggagactgttcaatatcctgtggagcatccggagaagttcgagaagtttggcatgtctccatccaaaggagttttgttctatggtcctcctggttgtggtaagaccttgttggcaaaggcaattgccaacgagtgccaggctaacttcatcagtgtcaagggtcctgagttgcttaccatgtggtttggtgagagtgaagccaacgtccgtgaaatttttgacaaggctcgtcaatctgctccttgtgtcctcttctttgatgagcttgactcaattgctactcagagaggaagcagtgtgggtgatgctggaggtgcggctgatagagtgcttaatcagctactgacagaaatggatggcatgaatgccaagaaaactgtgtttattattggagctacaaacaggcctgacatcattgaccctgctctgctgaggccagggcgtcttgaccagctgatctacattccactgcctgatgagcagtctaggctccagatcttcaaggcctgccttaggaagtcccctgtggcgaaggatgtggacttgaatgctcttgctaagtacactcaagggttcagtggagcagatatcacagaaatttgccagcgtgcgtgcaaatatgcaatcagagagaacattgagaaggatattgagagggaaaggcggagaaaggacaaccctgaggcgatggaggaagacgaagtggatgagatcgctgagatcagggcccctcacttcgaggagtcgatgaagtatgctcggcgtagtgtcagtgatgctgatatccgcaagtatcaggcgtttgcccagacattgcagcagtcccgggggttcggcagtgagttccgcttctcggatcagccggcgacagctggtgctgctgctgcagctgatccgtttgcttctgcgggtgctgcggctgatgatgacgatctatacagctagttgggttgttcaatatcagtcccgtcactcatctgtttaaaactgatcatactaaacacgcttgtcatgcaatgatatttatttgccgtacatttggacgtcgctgagatgatgcactctcggccttcggttaacttttcatgccatattctccatgtcattgtctgggccatgacattttattaattattgtgaaatctatcatctctca

SEQ ID NO: 11025 - DNA, 1142 bp, Zea Mays
ctttttttgctttggatttcccgctattccaatctcttcttggcccccaagcgaggtggcagggcgccggtgccggccaagaagaagacggataaagtgacgaaccctctattcgagaagaggccgaagcagttcggcatcggcggcgcgttgccgcccaagaaggacctgcaccggttcgtcaagtggcccaaggtcgtgcgtatccagcggcagcgccgcatcctcaagcagcgcctcaaggtaccaccggcgctcaaccagttcacccgcaccctcgacaagaacctcgctacgaacctgtttaagatgcttctcaagtaccggcctgaagacaaggctgccaagaaggagaggcttctgaagagggcccaagctgagaatgaaggaaaaactgttgagtcgaagaaaccaattgttgtgaagtatggccttaaccatgtgacttacctcattgagcagaacaaggctcagcttgttgtcatcgctcacgacgtggatccgatcgaacttgttgtgtggcttccagccctgtgcaggaagatggaggtcccttactgcattgttaaaggaaaggctcgccttggatcgattgttcacaagaagaatgcatcagtcttgtgtcttaccactgtcaagaacgaggataagcttgagttcagcaagattttggaggctattaaggcaaacttcaacgacaagttcgatgaggtcaggaagaagtggggaggtggcatcatgggatccaagtcgcaggccaagaccaaggcccgggaaaagctgctcgccaaggaggctgcgcagcggatgacctagattgtctactgctgtgtctgccctgtagtttaacggggaagaactgatgaactcgtattgtggttttccgaatctagtttcatatgtttctgtccaccagaccatgtttagaagctttgcaagacagagtttacagtgtttatgtgatgcctcagatccatgcagctttgcttctaattgcctaagagcaacctcaaaagtatttcatgaaaaaatgcccttctacagctttttaaatttagaattttaaatgttgccatcttttgtgactgtttgcgagcgaatggtttttaaatgaggatttagaaagtgggtttatgctctaa

SEQ ID NO: 11026 - DNA, 52 bp, Zea Mays
gtggggtaagaaaatttatagtgagaaagaacttttgttgggtagtaatgcc

SEQ ID NO: 11027 - DNA, 62 bp, Zea Mays
cgtgctgtgagcaacagcatcgtcattccccttcatgtgctcatcctcgatctctgcctcgc

SEQ ID NO: 11028 - DNA, 407 bp, Zea Mays
accaaccctagggttctcacggcgccataagagcctctcctctctccccggccgcccgctgccgctgcttgcgcctctctcgcccgcatcgccgcagggttcgcaaagatggcagtgccgctgctgacgcagaagatcgtgaagaagcgggtcaagcagttcaagaggccacacctcgaccgctacaagtgcctcaagccaagctggcgtaggcccaagggtatcgactcccgcgtcaggcggaagttcaagggatgcaccttgatgcccaacattggatacggctctgacaagaagacgaggcactaccttcccaacaagttcaagaagtttgtcgttcacaacgtctctgagctggagctgctgttgatgcacaacaggacgaccctatttatcctgtgcttctc

SEQ ID NO: 11029 - DNA, 1086 bp, Zea Mays
ggcagagaaagtctatatttgattacagcagatttcagagtgttcaaaaggttatagtgaagagatgacaaacagctgtgttcttgtttcatgcagtgtgtgtaatatatataatttggaggcaagaggcaagtgaatttgtagcaacaacgccctcggagaaagcctatgagtactgagcaccgcttgtgtcggatgatcctcctcatgcactccaccacgggtcctggccggtcctgaagtcggtctccacccacgggacgaagaggaccttgccgtcgtcgacgtcggcgtgaaccagggccagcgactaggcgccggtccgcggaccaccttgccctggttgttgtactgggatccatggcaggggcagatgaacttgttctcggcgccgttccacggcacgacgcagccgaggtgggtgcacacggcgttgatcccgtaggtggccagcgtcttgtcctgctccaccaccaggtacgtggggtcaccctgcaccccctgcgcgagcgtgcggtcgttgggaccgtgcgtgttgagccactcctccaccgtgatgtcgttgcccagcttgtccttggcgtaggtcccgccgccgccgttcccggagctgcgtgcaaaatcggccggccggccggggtgctattcgttaatagttgctgcgcggccggtaacacgtacacgtgtatacagtgcgccgctagctagctgttgatgcaaagcaacgcggtcgagacgacgacgacgacgacgactcacccggcggggacgaagaaggcgccgtaggggacgaccatgccgacggtgggcagcgatatggcgcccaggaggaggaggttcatcagcttccgcttctccatgtcggggacgcggtcggcggggatgctgctcgccgcctggcacgtgatgctccgctggcttgcgcgctcccgccccatccccaggccaagccccttcactgggtggggttggcggcggtcgagagcgccgcggaggtcgccatggccgcagcagggaaggagcgggccaagacggctggtgttcactcactggcgtccactggcttgcggatgagccgcccggggc

SEQ ID NO: 11030 - DNA, 330 bp, Zea Mays
acggatgcggagcggcgtgcatgctcgcgagtcttgacgacggtaacggtatgggctttcatccgtggcctcttatatcctcctcctgcctcttccgtaggcgcgcctcttccgtaaaccctagccgcctgtcttgctgaagctgaactgctgatccgtcttccaagctgtggtgtcatccctgcgttctgatccaagatgtatctccagtattacatcaacgagaagggtgacaaggtctacaccaccaagaaggagtcgcctcttggggtgccgacgcagtctgctcacccagattcatggttggctaatatgagtattagcattagg

SEQ ID NO: 11031 - DNA, 1599 bp, Zea Mays
gaatacatactcgtgattttcggtgcaatgcttacccctataggagttcttgaagtcggtgatggtgttttcgaggtgctgtctacatcaggtgacactcaccttggtggtgatgactttgacaagagaattgtagattggctcgctgggaacttcaagaatgatgagggtattgatttgctaaaagataagcaagcactgcagcgattgacagaagcagctgagaaggcaaagatggaactgtcatctttgacccaaacaaacatgagcttgccttttattacagctactgcagatggtcccaagcatattgagactactcttaccagggctaaatttgaagagctatgctcagatctccttgacaggctgaggacccctgtggacaatgcccttagagatgcaaagttgcaattcaaagatattgatgaggttattcttgttggtggctcaactagaataccagctgttcaggagcttgtcaagaaaatgacaggaaaggaccccaatgtgacagtcaaccctgatgaggttgttgcacttggagcagctgtgcaggctggagttctgtctggtgatgttagcgacattgtacttcttgatgtgacccccttgtccctaggtttggagacactgggtggtgtcatgaccaagattatcccacggaatacaaccttgcctacctcaaagtcggaagttttctcaacagcagctgatggccagactagtgtggagatcaatgttctccaaggagaaagagagtttgtgagagacaacaagtctattggtagcttccggcttgatggaatccctcctgccccacgtggtgtaccacagatcgaagtcaagtttgatattgatgctaacggtatcctctctgtcagtgctgtggacaagggtacagggaagaagcaggatatcacaattactggtgctagcactctgccaaaggacgaggtggagaggatggttggcgaagctgagaagtttgcaaaggaggacaaggagaagcgagacgccattgacaccaagaaccaagccgagtcggtcatctaccagaccgagaagcaactgaaggaactaggggacaaggtcccaggtgacgtcaaggggaaagtcgagtcgaagctgcaagagctcaaggatgctgttgctggtggctccacgcagacgatgaaggacgccatgagtgcgttgaaccaggaagtcatgcagatcgggcaggccctctacagccagcagggtgccccaggcgcaggacctggtgcagctgatgcttcttctgctggttcagcgggcacttctgagaagccaggtgacggaggcgatgtgattgacgcagattttactgacagcaaatgagggggcatgctaggtattagatggaggcggttttgccgcgagggagataatttgtttccacaagattgtctaggatgtggatgttctactttttggtagattggcacctaactgtggaatgaatatacataggtccttttcttctgctatcaagagcattcgacgtttgacctggcagtgtttctgggttaataaaaacacaaaaaacgtgtcaaaacaaaaaaaaaaatacaaaaa

SEQ ID NO: 11032 - DNA, 68 bp, Zea Mays
tgacgcacgagcgagtacaagtcaacgtgaacagtacggggtactgttcatctatttataggcacagg

SEQ ID NO: 11033 - DNA, 86 bp, Zea Mays
ctcttgggaaaaattcatgccaccgaaacgtatgtatgggggtcttcatgataaccttggtgggttcaacaagaggtttgatctat

SEQ ID NO: 11034 - DNA, 773 bp, Zea Mays
attggagtggtcttatagatcatcttggaattgagcctttgatgatggaagctcttgagaagattgagaaggacattaagaaaccacttttgaggagcgacaagaagaacatggccaccctcttggcagagtttgacaagattaacaaaaagcttggctttcggaaggaggatcttcccaagatcgaggaagagcttgaattggaaattgccaaaagtgagctgactgaacttaagaaggaatgcgttgaagcaatggagactcaactcaagagggaggagtttcaagatgaggagatgcctgatgtcaggaaattggacatcagaaacttcctgtaggcctgatcgacgataatctttgaggcccaacgcacctctggttttggtttcaagttgatcggtgctccacacctatgaatgctgctccttccctttttgtaataaaagaaactgcacggttgggtatgagttggattaaatcttgcctttctgttgttctggactcttgtggctgcagcaacaatgggatgtccttgtgttatagcatatgaactcgttacgaggcattcaggaaaatggtgatacctggtatttaacctttattttggtactcagtttggagagcaaagatccatttgttttattatgtcatttatttttgcaccttgtaaaggaatttgtttctgttgtatcaaccctccctaaagacccacatcttcgattaatgaagagtaaaatataccggctgtctctaaatttatgacacaacgccat

SEQ ID NO: 11035 - DNA, 955 bp, Zea Mays
ccagcctcggcagccgagttgtttaaactttataaatacccgtcgccgcctgctactttcccatcaactcgcaattccgcattcgttccaactcctgagcactttctcctcgtccccgacaagccaatcgaagccgagatacggccatggactccaccggcaccggagcagggggtaaggggaagaagggagcggccgggcgcaaggccgggctccagttccccgtcggccgcatcgggcgctacttgaagaagggccgctacgcgcagcgtgtcggcaccggcgcccccgtctacctcgccgctgtcctcgaatacctcgccgctgaggttctggagctcgccggtaatgctgccagggacaacaagaagactcgcattattccgcgccacgtgcttctggcgatccggaacgacgaggagcttgggaagctgttgggcggcgtgactatcgctcacggcggtgtgctccccaatatcaaccctgttctgctgcccaagaagacggcggagaaggcgtccagtgtggggagcaaggaggcaaagtcgcccaagaaggccgccaagtcccccaagaaggcatagactgactgtctggagtgatctgatgtttagcaggaccttgataccagtatgcggtgatgcgtaggctgtagatgggtcgaatgtgcttgtgtgtgtatgtgccctgctgcaagttgccctttgctatttaaaatggaagaagaaatgccttgtttctctgaggttgcaatgtcttttccctgatttcatttctgcacagctgtgatttgtgatattcaacctgggcgacactgtttactgagattttcgattagaatttgctgtgccagaaaatatgcaaatgcggtagaacggtggattgttctttactttattggattgtcagtttttgaggaggcatagtgtaattgttcgtgattttttgttttcga

SEQ ID NO: 11036 - DNA, 1336 bp, Zea Mays
cactttctgcagagggggcaaaagggtaaagttcttctaccaccgagcgaaccccagcacaccaggtccagtgcccagcctccgtccctctccttcccttacctcgcctcgtctcctctccttgagatctccagggtacgagcgcattcgcgattttggccgcctccgccgccgtccggggagatggcgggtctgggaaaggcgatgtacgcggtggggttctggatccgggagactggccaggccctcgaccgcctgggctgccgcctgcagggcaagtacttcttccacgagcagatttcaaggcatcgcaccatcatgaatatctttgacaaaacccctcatgtgcataaagacgcatttgttgctccaagtgcatcccttattggcgatgttcaagtcgggtcaggagcttccatttggtatgggtgcgtcttaagaggggatgcaaacatcatacaaattggatctgggaccaatatacaagacaattctcttatacatgtggctaaatctaatctaagtgggaaggtctttccaacaaccattggtaataacgtcacagtaggtcatagtgctgtgttacaaggatgcacggttgaggatgaggcttttgttggcattggggcaaccctattagatggtgttgttgttgaaaagcacggaatggtggctgctggagccctcgtacgacagaatactaggatcccttgtggagaggtatggggagggaaccctgccaaatttctgaggaagctcacagatgacgagatcagtttcattgcggaatcagctgccaactattccaatctgtccaaggtccatgctgctgagaatgccaaacctcttgaaaagatcgagtttgagaaggtgttgggcaagaagtttgctcaccaggatgagtatgattcctcgattggcgtcgctgaaggggcaccaccagagctcacgtccccaaatccagcccaatgaacctctgtttctgttttctctttggcgccttaatcattttctgttggacagtgctggatcgttgatcggggtactgttccatgacactggtggtttatgtttacttttcctccccaataatcttgggtcgagcgatgttataaagctggccatgcacttcttccagattctgtattcggcatgtttaagatgtgctcccttgaaagacagaccccaaatagacagaaatgcattgtttttacaggtaaacaaacatatgctcaaccaaagtcaacgtatgaaatggtccagaataagactatgcggccaaccaatcatatgatatatgtcgttgtctgcttattgttaatttgacgtgttagtg

SEQ ID NO: 11037 - DNA, 226 bp, Zea Mays
ttcgattggcttcacttggcgttattttttgtggagttttcaagcttgagctattcttgcctgaggaatatccaatggctgccccgaaagttaggtttctcaccaaaatttaccatccgaacattgacaagcttggtaggatatgcctcgacattcttaaggacaaatggagtcccgctcttcagatacgtacagttctgctcagcatatcagtgtgctaccacac

SEQ ID NO: 11038 - DNA, 1879 bp, Zea Mays
cgagagtccattgatgggctggccggcctacgccgacgcacttatataaaagccccgaaccctagaggccagcagcacattcttccccgagtcgccgtcgtctgctccgggctgctgttctgcgcctccacaaggctttggcctctgttgtaagttttaagcttcacctccagccatgggtaaggagaagtcccacatcaacattgtggttattggccatgtcgactctggcaagtcaaccaccaccggccacctgatctacaagcttggaggcattgacaagcgtgtgattgagaggttcgagaaggaagccgctgaaatgaacaaacggtccttcaagtacgcttgggtgcttgacaagctcaaggctgagcgtgagagaggtatcaccattgatatcgctctgtggaagtttgagaccaccaagtactactgcactgtcattgatgcccctggacatcgcgacttcatcaagaacatgatcacgggtacctcccaggctgactgtgctgtcctgatcattgactccaccactggtggttttgaggccggtatctctaaggatggccagacccgtgagcatgctctccttgctttcacccttggggtcaagcagatgatttgctgctgcaacaagatggatgcgaccactcccaagtattccaaggcccgttacgatgagattgtgaaggaagtttcatcctacctcaagaaggttggatacaaccctgacaagattgcctttgtccctatctctggttttgagggtgacaacatgattgagaggtccaccaaccttgactggtacaagggtccaaccctgcttgaggctcttgaccagatcaccgagcccaagaggccttcagacaagcccctgcgtctgcccctccaggatgtgtacaagattggtggtattggaactgttccggttggtcgtgtggagactggtgtcatcaagcctggaatggttgtcaccttcggtccaactggcctgaccactgaggtgaagtctgttgagatgcaccacgaggctctccaggaggcccttcctggtgacaacgttggcttcaatgtgaagaacgttgctgtgaaggatctcaaacgtgggtacgtggcctccaactctaaggatgaccctgccaaggaggctgctagcttcacctcccaagtcatcatcatgaaccaccctgggcagattggcaatggctatgccccagtgctggactgccacacctcccacattgctgtcaagtttgctgagctcataaccaagatcgataggcggtctggcaaggagcttgagaaggagcccaagttcctgaagaatggtgatgccggtatggtgaagatgattcccactaagcccatggtggttgagaccttctctcagtatcctcctctgggtcgttttgctgtccgtgacatgaggcagacggttgctgttggagtcatcaagagcgtggagaagaaggacccaactggtgccaaggtgaccaaggctgcaataaagaagaaatgatgcgtcctcccatgtgccctcgtttattttgtacttgtgcccgtatacttcgatctgttaaaatctattggttgtgtgccctgtgtctgttgtttgggtatctatactgttattttgagacatgttgacttgcatggtcatctggattgggttcgcatttctgagtcatttgtcttgacatgaaaatcttgctttttttcttgatcttaaaatctaggttgtctttgttgcggggttgattctaatattaaaggggacatttgggattttgcccatgacatcgttccctcgctaaaaatttaatttgtgggttcgtctatgcctatgaatcgagggtctgggcaaaattctgaagctcag

SEQ ID NO: 11039 - DNA, 447 bp, Zea Mays
ttagcattgggtgcatactaaggttgttgaaagtggtgggaagaacatcgaggttgcagtgatgacaaagaaggacggtctccgggaactcgaggagtctgagattgatgagtacgttgccgagatcgaggcagagaaggctgcagctgaggctgcaaagaagggtgccccgaagaacgcctaatttcccgtcttgtgctatggctcccttcaacactgtgtgtgtcccgtttttatgttccatagcaccatcttaactgttctagaaggatgctagatctttaggtgaaactacgcttatatgcctgtgggttaaatggtgtacaatgagctcgtctacatgccttcgtcggaggttttcagtttcgtgtattctgtcatctggacagcgacagttcaaatattgattttacctgattccttgtcatgactcatggcttctctggg

SEQ ID NO: 11040 - DNA, 1299 bp, Zea Mays
ccccgtgtccggtggttgcggctgcccgcatcatattcccaccttgcgaacgaggacgaactgctaccccctcgcctcgccctcgccgcctgctcctctccagttctcccccaccaaccgcagcagcgagagcgagactgagaatggccgcggcgccgtcgtccctcgtgtcctcccatcgtcccacagcagcttcgcgtcggcttctcgcgccgccgcgcccagcgcgtcgtcgccatggctggatccggcaagttcttcgtcggaggcaactggaagtgcaacggaacaaaggactccgttagcaagcttgtctctgaactgaatgctgctaccctcgaaactgatgtagatgttgtggtggctcctccattcatctatatcgatcaggtcaagaattcactaacgggtcgcattgaggtttctgctcagaatgtgtggattggaaaaggaggagcctacaccggagagatcagtgcagaacaactggtggacatcggttgtcaatgggttattcttggacactcagagcgtagacatattattggtgaaaatgacgagtttattgggaagaaggctgcatatgcattgagccaaaatgttaaggttattgcctgcataggagagcttctggaagagagggaagcagggaaaacttttgaagtatgttttgagcagatgaaggcttttgcagatagtatttcaaactgggccgatgttgtgattgcatatgagcctgtttgggctattggaaccggaaaagttgctactcctgagcaagcccaggaagttcatgctgctgtacgcgattggttgacgaccaacatatcacctgatgttgcctctagcacccgaataatctatggaggttctgtgaatgcagccaactgtgcagagctagcaaagaaagaggatatcgatggttttcttgttggtggtgcctccttgaaggccccggacttcgccaccattatcaactcagtgaccgccaagaaagttgcagcctgatggaccaccctgtgaagaaataagaggccatcaccgtgtcgcctcatctgccacgccttaaagcctgtaggaggcgtcacctcctgtttttgctgatttgcagcacggggacagaaaataatgttttgctctcgtggatctgcacgtgacgaggagagttcagttgtcgtgagcgatgtacgttgggaatattgttatgtggtccttttctaaagaaaaaaaaatgttgacagtcaaggagaaatgtaagcgtgtttttttttaacagagaagctacatcttactgtgaaa

SEQ ID NO: 11041 - DNA, 1304 bp, Zea Mays
gtcgtcactcggctcatcggcaacacaccaatggtgtatctcaacaacgtcgtcaagggctctgtcgccaatgtcgctgctaagctcgagattatggagccctgctgtagcgtcaaggacaggatagggtacagtatgataaatgatgctgaacagaagggcttgattactcctggaaagagtgttttggtggaagcaacaagtggaaacacaggcattggtcttgctttcattgctgcttccaaaggatataagctgatactaacaatgccttcatcaatgagcatggagagaagagtcctccttagagcttttggtgccgaacttgtccttactgatgctgcaaaagggatgaaaggggccttagataaggctacagagattttaaacaagacaccaaattcttacatgcttcaacagttcgataaccctgccaaccctcaggtacattatgagactactggtccagagatctgggaggattcaaaggggaaggtggatatattcattggtggaattggaacaggggggacaatatctggtgccggccgttttctcaaggagaaaaatcctggaattaaggttattggtattgagccttctgaaagtaacatactctccggtggaaaacctggtccacataagatccagggaatcggcgcaggatttgttccaaggaacttggatagcgatattcttgatgaagtaattgagatatcaagtgatgaagctgttgagacagcaaaacagttggctgttcaggaaggattactggttggaatctcctctggagcagccgccgctgctgccataaaggttgccaaaagaccagagaatgctggaaagctgatagtggttgtgtttccgagcttcggcgagaggtacctttcatctgtcctctatcagtccataagagaagaatgtgagaacatgcaacctgagccatgagggagccgtcactttaagcgggcatagtaaatgtttctgaaataagacgcgtagccagcatcagtttgctccacttggaatcatttggccatgctcactctatcctttcgctagcctctatgaccggacctaaactggtgtgtgagaaacatccacgactgtcctcccaactgctttcctaaagccaaacgataacactctcaataattgtctatacgattgaagctgatttgattggtaattgtaaacagcttgtctttggatctttgaagtcaaacaaagtcagttggttgaatcagatggatattgtatgccttttgtgtgtgtgtgtgtgtgaaaaaaaaatctgagttgtg

SEQ ID NO: 11042 - DNA, 1646 bp, Zea Mays
caacaaggcttgcagtctagtacttcacgcttgcagcaacaactacaaacacaaccagggtctcttccttttgatgagatcctgttctgcaacattgggaatcctcaatcccttggtcagcaacctgtgacgttcttcagggaggttcttgctctttgtgatcatccatgcctcttggaaaaagaggaaaccaaatcattgttcagtgctgatgctatttctcgagcaaagcagattcttgcaactattcctggacgggcaacaggtgcatatagtcacagtcagggtatcaaaggattgcgtgatgcaattgctgctgggatcacctcacgtgacggattccctgcaaatgcagatgacattttcattacagacggagcaagtcctggggtccacatgatgatgcaattactgattaggaatgagaaagatggcattctgtgcccaattcctcagtaccccttgtactcggcctccatagctcttcatggtggagctcttgtcccctattaccttgatgaaaaaactgggtggggtttggagatctctgatcttaagaaacaactcgaagatgctcggtcaaaaggcattgatgttagggccttggtggttatcaatccaggaaatccgactgggcaggttcttgctgaagacaaccaatatgatatagtgaaattctgtaaaaatgagggccttgttcttctagctgatgaggtatatcaagagaacatctatgttgacaacaagaaatttaactctttcaagaagattgcaagatccatgggatacggcgaggatgatctccctctagtatcatttcagtctgtctccaaaggatactatggagagtgtggtaaaagaggaggttacatggagattactggcttcagtgctccggtaagagagcagatctacaaggtagcttcagtgaacctgtgctccaatatcactggtcaaatccttgcgagcctcgtcatgaatccaccaaaggttggggacgaatcatatgcttcctacaaggcagagaaagatggaatccttcagtctttagctcgccgtgcaaaggcactggaagatgcattcaacacgcttgagggattttcatgtaacaaggctgaaggagcaatgtaccttttccctcagatccatctgccacataaggcaattgaggctgctaaagctgccaagaaagcacctgatgcattctatgcgctccgtctccttgaatcaactggaattgttgtggttcctggatctggatttggccaagttcctggaacatggcacgtcagatgcacgatcctgccgcaggaagataaaatccccgcggtgatcacccgcttcaaggctttccatgaggcgttcatggctgagtaccgtgactgaactgttacagtggctgagtaccaccgtgtagaccgaaacaaaataaagctcccccctctctctgtgtctgtgcgtgtgtgtgaactgatctctgaatggacgaacaatgtactctgttggcgcctttaatggcaattgaggaaaattttgatcaaatttctgttgtctgctgttgtgaaagatgcgggattgtttcctagtgcagcgcaaaatgttgtttccatgtactgaggatattggcagggttgcaagagctggga

SEQ ID NO: 11043 - DNA, 1661 bp, Zea Mays
cagcattatcgcttcagctcggcgtcttcacaaacgccggcgcaaactctcgcccgagcccgacagatcttcaattccccattccgcccaccgatcgaccttcacgccagtctcggtctcttccgaaggcgtcgcgcgcggttgtttgagaggagaggaggaagatgagggagtgcatctccgtccacatcgggcaggccggcatccaagtcggcaacgcgtgctgggaactttactgcctcgagcacggcatccagcctgatggccaagtgcctggagataagaccgcgggacatcacgatgatgccttcagcaccttcttcagccagactggtgctgggaagcacgttccccgtgcaatcttcgttgatctagaacccactgtgatcgatgaggtgcgcactggcacgtaccgccagctcttccaccctgagcagctcatcagtggcaaggaggatgccgctaacaatttcgcccgtggccactacacattggcaaggagattgttgatctgtgccttgaccgtatccgcaagcttgctgacaactgcaccggcctccagggcttcctggtcttcaatgccgttggtggtggcactggctctggccttggttctctcctccttgagcgcctgtctgtggagtacggcaagaaatccaagctgggcttcactgtgtacccatctccccaggtgtcaacctctgttgtggagccttacaacagcgtgctctccactcactcactcctggagcacactgatgtctccatcctgctcgacaacgaggccatctatgacatctgcaggcgctccctcgacattgagaggcccaactactccaacttgaatcgccttgtgtctcaggtgatctcatcgctgactgcttctctgaggttcgatggtgccctcaatgtggatgtgaacgagttccagaccaacctggttccttacccgaggatccacttcatgctctcctcctacgcaccggtgatctcttctgcgaaggccttccacgagcagctgtctgtggcggagatcaccagcagcgcgttcgagccggcttccatgatggtcaagtgcgacccacggcacggcaagtacatggcttgctgcctgatgtaccgcggcgacgtggtgcccaaggacgtgaacgccgcggtggccaccatcaagacgaagcgcaccatccagttcgtggactggtgcccgacggggttcaagtgcggcatcaactaccaggcgccgacagtggtgccgggtgccgacctcgccaagcgcgcgttcgtgcactggtacgtcggcgagggcatggaggagggggagttctccgaggcacgcgaggacctggccgccctggagaaggactacgaggaggaggaatactgatctgcttgcatgaatctgtttggctgtcgagccaggttgtggtgttgaaaaacctttgtttgtgtcctggcccccctgggtaatgtttgggtgtttccttccatcatcacttgctgaactgctctagtatttgcatttgtaattgaagtctgtcgctttaagcactcttggttctaaagatctctgtgcttttggggggtgtttttgcattgccccagattccaataaactcaccaaattcgggtcgtgcgtagtaatttagttccccggaggcgac

SEQ ID NO: 11044 - DNA, 53 bp, Zea Mays
ccactggtactcctagtcgatcaacttttgccaaggttatctggaagtggatg

SEQ ID NO: 11045 - DNA, 58 bp, Zea Mays
gtactgttcacgctggattgtattcactttcttgcatccacacctttgagcaagtcga

SEQ ID NO: 11046 - DNA, 548 bp, Zea Mays
ccatcaccgtgtgctgtacacaaagtcagggaactatgcctcaacatttgtttacatggactggttgttcggcacggacaaggattatcgcaaggcaaagaccattgaggagaaagaagggaaaaatctgtagattgtggaagctgctcagcaagactggcgatagagtttcactcatggaaggagatatggatgcaccctagaaacagtcagtttatctcctgaccatcgatactataggttgagatattgatttcctgtgtttgctatgatcaagaatgaggccctggtggccctggtctgtcatgaactgaatttgatgatttgtcatctcctcctggtggtttgctttgcgtttctttcgtgactcgacgggatgtatacatatggaatggcctggcagcagtaataaccatctgaattgagtcgtcagcgatggtgggggtagctttgcaccctagaaactttcctctgcacgcttgtgtattttgttggtaatcgattccggaattgcattgttcctcgtacacgcgcacacaattgatctg

SEQ ID NO: 11047 - DNA, 85 bp, Zea Mays
ggggtggatctgagcatttgaggaagacatcggaatggaggcgctggatccatgtcggggaagatgccaaaacgatggtggacga

SEQ ID NO: 11048 - DNA, 60 bp, Zea Mays
aataattccaaaaatccccaaactttttatatgaactctaaacattatttagaagcattg

SEQ ID NO: 11049 - DNA, 76 bp, Zea Mays
atggcattgggggtcagctgatgtaggtaaattttgaacttcttcaaaacctcaccgatcatctcataaaggggga

SEQ ID NO: 11050 - DNA, 386 bp, Zea Mays
gtgagcccctcccctcttctcctccccacgtaccctgcgctggctgcctcgcgagatgaatgtggagaagctcaagaagatggctggcgctgtacgcaccggagggaagggcagcatgcgcaggaagaagaaggcagttcacaagaccacgaccaccgatgacaagcggcttcagagcaccttgaaaaggatcggggggaacaccattcctggtatcgaggaggtcaacatcttcaaggacgatgttgttatccagtttcagaaccctaaagtgcaagcatccattcctgcaaatacatgggtggttagtggagtaccccagacaaaaagtctgcaagaccttctgccatcaattatcaaccaactggcttcctcctcctcttcag

SEQ ID NO: 11051 - DNA, 1277 bp, Zea Mays
tccttcccggcggcacgatcgcccgccccaacggccttcgatccacctactagaagcttccggtctacgtacgtaaatatataatacgatgcgcactgcgtcgccgggctggctcccaccgaattcattccacccccgtctcctccgatcggacggaccaccgggcccagcagcggggcggatcgcgtcagcagccatggtgaaggcctaccccacggtgaacgaggactacctcaaggcggtcgacaaggccaagcgtaagctccgcggcctcatcgccgagaagaattgcgccccgctcatgctccgcctcgcatggcactccgcgggcaccttcgatgtggccaccaaaaccgggggccccttcggcaccatgaagaaccccgccgagcaggcgcacggagccaacgccggactggaaattgccatcaggctgctagagcccatcaaggagcagttccccatcctatcctacgctgacttctaccagcttgctggagtcgtggcagtcgaggtaaccggcggacctgatgtccccttccaccctgggaggcaggacaagcctgagcctccaccggaaggccgccttcctgatgccacccaaggttctgatcacctcaggcaggttttctccacacagatgggtttgagcgaccaggacattgttgcgctttctggtggtcacaccctgggaagatgccacaaggacaggtctggatttgagggagcctggacgtccaaccctttgatctttgacaactcttacttcaaggagcttctgagcggagagaaggaaggccttctgcagctaccaagtgacaaagccctcctctctgatccatccttccgcccacttgttgacaaatacgcagcggacgaggacgctttctttgctgactacgccgaggcccacctgaagctttcagaattgggatttgctgaggcgtaacgaaccagaagagtgtggtggctgtcgccggccggccttgtgtttttgttgtctgcttttctcttgaacgaagatgtgatgaactcagctgaagatgtagtgtgtatgttgtcatggtttatttttctattttatttatctatctataatatctatcggagaaggtttgatatgaagcggaacactgattaacgatgccaatgcctccacatccaaacccgttatgtttttgcatgcagtaaaaataggttcagcttcagcatttggttggcttcttctggtatacttgataagcaatccttccgacgatgcacctggaacatgcaag

SEQ ID NO: 11052 - DNA, 1050 bp, Zea Mays
cagcccgcagccgcaggtgcaggtgccgatcagatagcgtggcgccaaaccactgccgtccaactgaaccagtggacaggagccacccctgcacggctgcactagactacacgagggacccccgtccggtctggccgtctccgccctccgccgatcgtgaaacacaaccgtcggtggtttgcttgcttgatcgctgatcctcgcggacgctcacggtcatggcgcctcagcctttgcgcgctccgaggctgagcgcccccgctggccacgcggcgtgcaggtgctcggccgcgccgctattcgggaagcgggcgccccccgtcgtcgcgttcccccgcgcccgtagcggcggcgccgtcgcctcgtgctcggccgtgcaggagtcgtccacctccaccactgttagcaagaagaaggatgccgcggacggggccaaggaggccacagcggaggcggcgaagccggccgcggccgccaagccaaagaaggccgcggcgctgccgctgccggagatgatgcagcaggagatcatcccaccgctgaaggatgccttggaggcggaggacgacgtgtcccaggtgcagctcgccttccaaaacaacacgctggagggatccttcataaagaacgacgtcccttattatttttgggccttctttccaaaaggagacctcacaggaccgaagggctttgcgctatcgtcctacagcaacgaagtgagcaccatcgagccgttcctgatcgatgagaagaggataacggccaagtacgtggtgttctgggtctacaagaggctggctgggcaaggcatccttccggtctggaaggaagaggagggggaggaggaggccgcgaagtagtaggttgcgcaggcgcatacgcatacacatacacacacacagggtgctgccgtgaacatacacatgtaacgctgtaaagttcatctgctagtaaaagttcatctgctgtgaacatacacatgtaacacagatacttcagtttcagcagttaaaaacctaccgtcgttattcttctggtgtgagataagaa

SEQ ID NO: 11053 - DNA, 56 bp, Zea Mays
taatagttagtcaactaacaaattgttagctgggttgagtcagctaattaactaat

SEQ ID NO: 11054 - DNA, 304 bp, Zea Mays
acttactccctctgttccctatcttaaggccacgaaggcaaggacagttggagaaggtgcaaaagatggactcctagttaccgtgggtgaagccagctaattaatgttttagagaaataattctctcttggagactactactactgttctacctcagcatcaccggtgctggtgcgtgtgtaacgtggtcactgtgggtatcatcactaccctaccctaagccctatcagaacataagcaccccttggagatttgtgccgtctaaatgaatatagttggttcagcatcgcaaaaaaaaaaaaaa

SEQ ID NO: 11055 - DNA, 1525 bp, Zea Mays
gcctctcgcgcgttccttgcaggcgtcgaagatcaaagaagatggcagctgtcgacacattcctcttcacctcggagtctgtgaacgagggacaccctgacaagctctgtgaccaggtctcagatgccgttcttgacgcttgccttgctgaggaccctgacagcaaggttgcttgtgagacctgcaccaagaccaacatggtcatggtctttggtgagatcaccaccaaggccaatgttgactacgagaagattgtcagggagacctgccgcaacattggttttgtgtcaaacgatgttgggcttgacgccgaccactgcaaggtgctcgtgaacattgagcagcagtcccctgatattgctcagggtgtgcatggccacttcaccaagcgccccgaggagattggagctggtgaccagggacacatgttcgggtatgcgaccgatgagacccctgagttgatgcccctcagccatgtccttgccaccaagctaggtgctcgtctcaccgaggtccgcaagaacggaacctgcccctggctcaggcctgatgggaagacccaggtgacagtcgagtaccgcaatgagggtggtgccatggtccccatccgtgtccacaccgtcctcatctccacccagcacgacgagacagtgaccaatgatgagatcgctgctgacctgaaggagcatgtcatcaagcctgtcatccctgagcagtaccttgacgagaagaccatcttccaccttaacccatctggccgctttgtcattggtggacctcacggcgatgctggcctcactggccgcaagatcatcattgacacctacggtggctggggagcccatggtggtggcgctttctccggcaaggacccaaccaaggttgaccgcagcggagcctatgtcgcaaggcaggctgccaagagcatcgtcgccagcggccttgctcgccgcgccatcgtccaggtgtcttacgccatcggcgtgcccgagcctctctccgtgttcgtcgacacgtacggcaccggcgcgatccccgacaaggagatcctcaagattgtcaaggagaacttcgatttcaggcctggcatgatcatcatcaaccttgacctcaagaaaggcggcaacgggcgctacctcaagacggcggcctacggccactttggaagggacgaccctgacttcacctgggaggtggtgaagccactcaagtcggagaaaccttctgcctaaggcggcctttttttcagtaagaagcttttggtggtctgctgtgcttaatcatgcttttatatggcttctacatgttgtggttctttcttgatctgcaccgcgcttatcgtttgtgttgtactgccctaataagtggtgcttatgaggactgtttctggttttgctgcttatgttgtaatgctttgaaacaatgaaagaagctacaggccacagctattttgagaagtaatggaacctcgtgccgttttgattatatcgcaatgctgtgcttgtcttctggtaagaccgatcgc

SEQ ID NO: 11056 - DNA, 1391 bp, Zea Mays
gaggataagccaaaccttcgctgtccatcgtcaccctccttccttccccagcctctcatcctatgcaagaacccataatccagacccacgaactcgcagcagccattagcgtgcgctagccggccgcagccatggccgcccccgcaacgacctctctactgagcaccctgctgaatctgccgctcgccccgttgtcggggaagagctcgccgccgtccgtggtgcatgtggcgcggcgggggccgatggtggtggtggccgccaaggggtacaatgtgcagatcctggtggacgagaacgagggggaggagtccatcttccggcggttccggcgggaggtgatgcgggccggcgtgctgcaggagatcaagcgccgtcggaggtatgagagcaagacggacgagaagaagcgcaaggcgcgcgaggccgggcgccgcaaccgccgcaggcgtatgatggatgagccgaggttcccagaagaagacgccgacgctaccgcaaaggctcgggacgaggacgatgacaactgggagatcgatggcatcctgtgaaagagaagcaacggagtccatgatttcacaacgtccagacacacagaccccgacagctaatctgagttctttttggcccccggttggcaggttcactgtcccaaaaatagcacagtgacacccggccaggtggttgctcgcgagaggcgcctccgtgacacccggtccatgcaaccgcggaggccgcgcgcagccactccattgccgctttttaaagcatcgcgcaccaccttcgcctcgccaaaatccacaagccacttcagtgcttgcgatcgcgtcggccacgatctcttgcgaaaaagcttaccctgtgtctgtctgtccgaccgtcagtccgtctaacaatcgatttccatgacgacgtccccgcgcgtgtggctgctcgccatggcactggcgctcgcctgcgtgctgctcgtgaggtccgccgacgctgctgccgaggcgtccccgactccaggcggctccacctacgggtgcaacccggccacggacaagtcgtgcaagcccgagggcgtgggggtggtgctgccgggcggcggcatcgacctcgacggcgacggtgacgaggacgagctgccgcagttccagccccacctcatgatcctcggccatggccactgatgagtgtaaatggttggttggttggtcgtcctcagccgatctactggacgacacgatggcggtcacatttgcgtccgaatttctcttgttaaattgaggccagagtgattaaatgagcatatgatggtaatttattcaccgtgtattgcctgttcaaacatgaaagtgcactgatacaattttaaaaaacttatgcacaacagcatatagcaagct

SEQ ID NO: 11057 - DNA, 881 bp, Zea Mays
gatcagcaagcccatccgggcccctctagagcgcattagcactagggtttcccatctcttaaggctgccaccgccagcgccgccccctcggtgcatcctcagtgcgtactgtctgtgcgaaggcgaccattccttcttcgctccttcgccgccgctatggttaagtactcgcaggagccgggcaaccctaccaaatcggccaaggccatgggaagggacctgagggtccacttcaagaacacaagggagacagcttttgcgcttcgcaagctgcctttgaccaaggctaagcgataccttgaggatgttattgctcacaagcaggcaattcccttccggagatactgtggaggtgttggtcgcaccgcacaagcaaagtctcgccactccaatgggcagggtcgctggcctgttaagtcagccaggttcatattggatttgctgaagaatgctgagagtaacgctgatgtgaaaggcttggacgtggacaacctctatgtttcacacatccaggtgaaccaagcccagaagcagaggcgccgcacctaccgtgctcacggacgcattaacccttacatgtcctccccttgccacattgagctgattctgtcagagaaggaagagcctgtgaagaaagaggctgacaacattgtcgcggcaaggaagcagtgaagtatgttagcctgctgataatggcatcctttcgaagcattatagccgtagctcttttatgtaccttttcaggctggtaccgataccgtggatctggatttgctatgttttgtactgtgctcgagtgtaagatgctaacgccgtgccacaaatcagctcgtgaatttgaacccagattttcaaatacagaaatttaagtgattttgaga

SEQ ID NO: 11058 - DNA, 88 bp, Zea Mays
gcacctgcccttgtctcaaagacctcagacggctatgcatgtgcaccagttaacttaacatgatccgttcgagtgtcccaaggacccc

SEQ ID NO: 11059 - DNA, 60 bp, Zea Mays
gccaagcgctcgacaaattgcctggatcggaaaatcattaccgatctcgtggattcgagt

SEQ ID NO: 11060 - DNA, 425 bp, Zea Mays
cccacctcaaactattccagtttcggttttgttttgcaagaccacttcttcaggttacccgggacaggagagtacaacaaattctacggcgacggggtttataactgcgctggctgcgggactcccctgtacaagtccgccacaaaatttgattctggctgcggctggcctgcattctttgaggggcttccaggagccataaaccgaacaccagatcctgatggtaggagggtagagatcacatgtgcagcctgcggtggccatctgggccatgtgttcaagggtgaaggcttcaagacacctactgatgagcgccactgcgtgaatagcgtctcgatcaagttcagtcctggctcctcctagatcatcttgagattctcgtgtcatggaactgcgggaagtacgacgaataagatttatgagga

SEQ ID NO: 11061 - DNA, 836 bp, Zea Mays
tggtatttcgtcaagaccaggatcctcttttcctagcaaaccaggaaaagttccatgctggtgcagataagcaatactggaaggcgatatctgaacttatcccacatgagattgctaacatcgagaagagaggggcaaggaaagacaaggagaagaagcctgggatcgtggtgatccagggaccgaagcctgggaagccaacggacatggcacggatgcggcagatattgctgaagctgaagcacactcccccaccacacatgaagccacctccgccacctgccgcagctaccggaaaggatggagcaccagctgccgccgggaaggatggagctaagccagcaaccgttgccaacggcagtgtccctgagatggaaaaggctgctgcggaggcatcagtgccagcggcagcaccaccagcagcaactgagccgatcgcagctgcttaatctaatcatctgtggtaggaggatgtgaaaaatctcttattggagttgttgcagaggcggtggtggtgagtgaaactgaaaacgtgtgaatttccggcatggtggaggcatgcactgtgtatttgttacctcgattcatttacattactgctactatatattgttattgcattttgtagagaaggggcgggcgtatcctggttcatggtaataataaggttgtattaggaggatgtttggctgtattatgtttcttcttccaagtgtttgtaaatttcccttttgttattaaaactgattgtattgttaaatttttctttgttattaaaactgattgtattgttaagctactatctgctgcatatacggagtatattttatgatcta

SEQ ID NO: 11062 - DNA, 73 bp, Zea Mays
tccttttgaaaatagtcaaaggtagatgagtaagattttgagaagcattttcaagatttgaaattttctcccc

SEQ ID NO: 11063 - DNA, 644 bp, Zea Mays
ggtgtccacatttcaatgggctgcagatttgcttgataaacaaaacttcctgccctttctgcgtccgtgtgaagcagttgttcgagaagctcggagcaagctacaaggccattgagttggataaggaaagtgatggagctgagctccagaatgccctgaaggagtggactggacagaggactgtcccaaatgtcttcatcaatgggaagcatattggcggctgtgatgatactatggcactgaacaatgatgggaagctggtgcctctgctgactgaggctggagccatcgccggttctgcctcgaagacaaccatcactgcttgacatgtgtgttaccattcccgtgcttaaaaataatgatgctttgcaagtgctgaacttgcagatgctatgtgggagtgactgttcgttccctgtgtaaaactccctagacatcagtcgagtcgtgttgctgtggtggttgtgaaatctacaataatcattgctacaataatgtcgtgttccctagacatcagatgagaaagatgagaagaaataacattataatcttattcgaactatcatctgtaagcttcttttgatacaatatttttatttatagattttaaaaacatttgtaggactaataagatttttaggcac

SEQ ID NO: 11064 - DNA, 81 bp, Zea Mays
atcgcggcgcggtcatcagtagggtaaaactaacctgtctcacgacggtctaaacccagctcacgttccctattggtgggg

SEQ ID NO: 11065 - DNA, 67 bp, Zea Mays
ccgcagatgtcaaaatagaaatagctgcctgcctgatgttcctcaggtggtggtggtggagtcttct

SEQ ID NO: 11066 - DNA, 81 bp, Zea Mays
gtttgtatttctacgattagcagtgaggtcacgaggaatgaagaatcaccctggctactggaatctcaagtgccaggcaag

SEQ ID NO: 11067 - DNA, 67 bp, Zea Mays
agagtgtttccttatggacggaatattgctactgttgtgtcggcagtgatggacaaggatcgtcagg

SEQ ID NO: 11068 - DNA, 619 bp, Zea Mays
cacggagatgccgagaagatggacgcacggagtcaccacgaacctatcgactttttatctccagatccagattagctaccacggcaccgccagcccggacggctataaagacgaggcccatctcgaaatcgacggcgatgaagaagaccagttcccctctcctgatcgtcctgttcctcacagcagcagccatggcggccgagccggagaagcaggcggcccccgcggcacaggagacggccgtgcacatcgtgtacgttgaccgccccgaggacgccgaccctgaggagttccacatccgcaccctcacccccgtcctcggcagcgaacagaaggccagggacgcagtgctctaccactacaagaacgccgccagcggcttctccgcgaagctcaccccccagcaggtcaaggatctcaaggagcaaccaggtgttctccaggttgtgccgagccagacttaccagctacatggtcctgggtctggcactcaccagggcacgacacacaccttgggccttatgtgaaggcgtatgagaatcaagaagactgtgtttagtatggctgtatggcacaggcacccctagatatttgcaagggaaagtgtctaactgacagg

SEQ ID NO: 11069 - DNA, 65 bp, Zea Mays
taagcatgcatctagatcaacattctcttttgagaaatcaactaagtagagcttgtcgtctaata

SEQ ID NO: 11070 - DNA, 68 bp, Zea Mays
cacaagggtccagattcggatcacctagagattctttgcgacgagaatgcgacacaaaagttggtatg

SEQ ID NO: 11071 - DNA, 118 bp, Zea Mays
tcagggtgcttcattttctttctcatggaaagcagctgctaaacgatctctttacaaggctatttttggctcagtttcttgtttagacaggtactcttattaataggataggaatttg

SEQ ID NO: 11072 - DNA, 1367 bp, Zea Mays
gccccaagccccgaaacctgtgagggtcagtactataaatatccgatctcgtcggaaccctacccttttgagaactccccttctccgccactaccgaagcccttgtacccctcaccgccgccgctgctgctagggagcttccatccgcgcgcgcctacaacgagagctagcagcggtagcggccgttatcttgtcgctccggctccgttcgtgtacccaagtcccagcctagatgccgcagatggaggggtccactgatcagatcgccgccggctggttcgctaaggagccggcttccgagcggcccgtgggcttgccgaggaccggctcttccagtcgcctcaacgcgcaggcgccggagttcgtgccgcgggggccgccgccaccggcgccggcggttgtgctgccgcctccgccgcaggtgatccgcatgttcgccgcgcctcccccgccgccgcgtgggggcttcttctccgcgccgcagccccggccgttcgagtactatgcgcctatcggtgaacgcagcggatttgctgccaaggagcaacaggcgccggagctggaagcggagatgctcccgcccgccgcggtgaagacggagccggtggtggatgggctcgacgacgaggtggtgcacaagatcaccaagcaggtggaatactattttagtgacatcaaccttgctactacagaacatctgatgagattcattaccaaggattctgagggatttgtgccaatatcggtaattgctggctttaagaaagtaaaaacttctgtgcgcaataatgtgatgcttgctgcggctctccgaacctcatcaaaacttgttgtaagcgatgacggtaagagagtcaaaaggcagcagccatttacagaatctgatttgcaggagctccagtcccggattgttgtagcagaaaatcttcctggtgatccctcctaccagaatcttaagaagatattttcagctgttggaagtttgatttcaatccgaacttgctatcctcagactccaaatggcactggtcctgcaactaatagatcttccaagttagatatgctttttgctaacaagctgcatgctttcgtggagtacgaaactcctgaggatgctgcgaaggctattttggagctcaatgatgagaaaaactggagaaatgggcttagagttcggttgctgaatacttgcacggtgaagggggcaggcaaaggaaaaaacggaatgaatgaaactgatggaaatagtgaggaggatgtctccactttgaaccattctaacgagaaacagtttgaacaatcctctcaactgttagatgtactgccggaacacttggtgataaagcttcccgataactaaacattgg

SEQ ID NO: 11073 - DNA, 926 bp, Zea Mays
catatttttgaataccgcctgagggttgcacttagtcctggtggtgatttgatgctaacttcacgtataagaaacactaatgcagacgggaagccattctctttcacttttgcataccacacatacttcaagatttctgatatcagtgaggtgcgagtagaaggattggaaactctggattacctagacaacttacaagatagagctcgttccactgaacaaggcgatgcaattgtttttgaatccgaactggacagaatatatctgggcacaccatcgaaaattgccattattgatcatgagaagaaaagaacatttgttgtgaggaaaggaggccttcctgatgctgttgtttggaacccctgggataaaaaagcaaaggctatgtcagattttggggatgatgaatataaacgaatggtatgcgtggaggcggctgctattgaaaagactgtcactctgaagcctggtgaagagtggactggaaagttggaactttctgctgtgccatctagctattacagtggtcagctagaccctgaccgtgtgattcaggattccactgtcccggaggactccatcagctagtccttattctatttttgcaggtagagcattgtatcattatgcataagagatgctggcaacaagggctgtccacatgtttcttccattctgttcaaatcttcggtgtttttttattccgaatgcatatccgaaccaaggaatgtgaaattggtttccgctttttgaggatctatgtagcataatggataagtcggtgtttcgtaccctatttagggatgcttgaagcaagaaacatcttcatgggttgtaaaataaaagaaaaattatctttatatttgatcaattcttttgccttaaaacgtataataagttctatactggagaaaagaaaaaaaaaa

SEQ ID NO: 11074 - DNA, 74 bp, Zea Mays
gctcgaccgatgcccttgagagccttcaacccagtcagctccttccggtgggcgcggggcatgactattggcgc

SEQ ID NO: 11075 - DNA, 802 bp, Zea Mays
ctgacatatctgaacttagtttctgctggcatgtctgaagcgtcatgggacgggtgcattgtttgtccatcaacagacagcacatttgaccttcgcaccggggagataaaagaatggtatccgaaaaaccctgtcctacgggctcttacgccagccttgaggaaactattcacctaccgcgtgaaaacagacgaagaaaacatatacatcagcttcagcggagccgacggtgcggggtcagcggagattatattcagcgggaaagctcagcctggtgtgactgcatcggatgtcaatgtggaagaggtgaggatggtcgtcgacgaggatgtcggaggcttcggcttcaccagtgacaacgagctgatcaacggaaaagccgccataatcggcttcctcctgctgatcgatttcgagcttctaactggcaagggccttctcaaggggacggggttcttggacttcatctacgcagtttcgggagctttcaactgagagtcatatgtgtgtttgttgttcgttccttggtatcaagaatgccatcgaggtgtacttgactacccttagaagcctaggttttgtcagcgtgcgattcagtcagctgtgcttgtatttgaacatcaccatgcttgtctgtgaagtgaggaagggacacgagaaagtcacatttgcggtgcttcttatacacctgtccgtagcagctgcatgccttccacagagcttccatagaatcctaatgaaactggagaagtaataacaaatttgcagccacgtatagtagtatttcgtgggccccctgttg

SEQ ID NO: 11076 - DNA, 62 bp, Zea Mays
tgaaaaaaaaaaaaaaaaaaaaaaaaaaaaaaaaaaaaaaaaaaaaaaaataccaacaccaa

SEQ ID NO: 11077 - DNA, 71 bp, Zea Mays
ctctcgggtttctcagggcgcgctccgctataattcaccagactgtccggtgcaccagcggagcaacggct

SEQ ID NO: 11078 - DNA, 1025 bp, Zea Mays
cgacgcgccgtcatctcgtcttctctttcaacttcgttcgcaagaagctcagaagtcagatcagaagccgccgaggggaggcgccgacgccgagtttttgctccatcccgcatccaccgccagaatgtttctcacgaggacggagtacgaccgcggggttaacaccttctcgccggaggggcggctgttccaggtcgagtacgccatcgaggccatcaagttgggatccactgcgatcgggttgaaaacaaaggatggtgttgtccttgctgttgagaaacgtgtgacctcgccactgctggaaccaagcagtgtggaaaaaatcatggaaattgatgagcacataggctgtgccatgagtgggcttattgctgatgctagaacactagtcgagcatgctcgtgttgaaactcagaatcataggttctcatacggggagccaatgaccgtagaatcttcaacacaagctatttgtgacttagctctgcgctttggcgaaggtgacgaagagtcaatgtcacggccatttggagtctctcttctaattgctggacatgatgagaatggacctagcctgtactacaccgacccatctggtactttttggcaatgcaacgcgaaggcaattggatctggctctgaaggagctgatagctccttgcaggagcagtacaacaaggagctggcccttgaggaggcggagaccatagccctttctattctgaagcaggttatggaggagaaggtgaccccaaacaacgtcgatattgccaaggttgctcccaagtaccacctctacacccctgccgaggtcgaagccgtgatcgcgaggctgtgaaacgctttcggagctcgtgttattcatgtcatcaatcggtaatagacgatccttgtacgaagcgtggacatcttttgttcttgattatggctgtcatcgtactctgttgttaactccacaaggacagtcgatggtactttgattcacacctcagcccgattccgttgtctgattgcctaaaaaaaca

SEQ ID NO: 11079 - DNA, 678 bp, Zea Mays
tctgctttcactagtggttgagttggtgctgaagctgatgaagaaaaactagagttcctgctcacagaactcaaagacaaggacataacagaagtgattgcagctggaagggaaaggttatcctctgtgccttcaggtggtggtgcaattgacatgggagctccagcagctgtagctggcggtggcgcagcacctgctgaagaggcaaagaaggaagaaaaggttgaagagaaggaagagtctgatgaagatatgggtttcagcttgttcgattaaaacaccactgccagtttacagtttctctcgcgaatggtctcacaatattcgctggtttccacaaaataagattgtcaatagctactacgtacttatgctattctgcatgtgatgtacgagtgtgcatcttcaagaatctttaagttgaatggtcccataataatattgataacaatgtaaattgtatgtcctgtacgtactttggtatcgcgacatctcagtgtgcatcttcaaggatcataagttgaatgttatcattaaggtcagtttggttcagataaatttaattgttagttatagctaaacattgccttggtgtcgcaacaactgagttgaatattgtgactgttcgaataaatggtgggggatattgatgatttttttattaaaataggattacat

SEQ ID NO: 11080 - DNA, 670 bp, Zea Mays
ctctgctctccaaggcttatccggttattattatccctacctctcgcaggcgcagccgcagcaaggcaaagaatgccacacccacccatggcgctcctcctctccccgaccgtttccttcctggtctccccgtctgctccacgccctcgagctctctccgctgccgccaatgtatcctaccccgcctcaaggctgcaatgcaagaacctgtcctcccaacagagccctctgaatgtgactgctacttgtgcttctttcgctgagaagaggctggttcttgtccatgccacggcagagggttctgaggctggtgcggagcagccagaagagccgaaaccagcgaccaagatcgaggaaatgccactcgagtcgaagcagaagatgatcatggagcaaagagcgcggatgaagcttgccaagaaactgaggcagcggcgcaagcggcttctccgcaagaggaagcttaggaagaagggcaggtggccaccgtccaagatgaagaagctcaagaatgtatgaacaacgtcaacgttgactgccactctgccttggttttatgtgttgtgattgtgattgcccagcttacgaattttgctgttcagaatctgagacacggtacctacaaaatgtaactctgttttcacgtaatttgaatcttcttacaaaaaaa

SEQ ID NO: 11081 - DNA, 742 bp, Zea Mays
gcctctgcttatatcaaaagcaagtgtcatccctgcgttctgatccaagatgtatctccagtattacatcaacgagaagggtgacaaggtctacaccaccaagaaggagtcgcctcttggggtgccgacgcagtctgctcacccagctcgcttctcaccagatgacaagtactctcgccagcggtacctgttgaagaagagatttggacttctgccaacgcagaagccagcactgaagtactgaagcttcaactttccaaccatggatgtgcagtttgtgtcactgcttaatgcttgttggttggaatgtagaaataggtatctgaggaaacatatcaaacactgctaggcactactatgacatctcagcgcattcaggcactatatgtaatgctatgtgtttgacaggtcttgttcttattatgtacttggtgtgtgggccaaagcatcgtttttggcgttctcttttcgtcttgattgatgacgtcccctttgctaaatcaatttgaagtcaggtctcaagtgctaatcaaggagggtaacagctttggacagctcgaatgtccagaggagacttgggaagaggttgctgaaaaagttcacaaagaccaatggcttaaattcaatggcacaatgatttatattatatggaacctttgaaggatcaattactaaattcaacggcacaatgatttatattatatatggaacatttgaaggatcaattactaaattcaatggc

SEQ ID NO: 11082 - DNA, 101 bp, Zea Mays
caaaacttgtttagctcagttggtagagctctgttatgtacacaaatcttgtggtcgtgggttcaagtcccatgatgggcatgttttaatactttttttgt

SEQ ID NO: 11083 - DNA, 56 bp, Zea Mays
caataaaaaaaaaaaaaaaaaaaaaaaaaaaaaaaaaaaaaaaaaataaccccaaa

SEQ ID NO: 11084 - DNA, 497 bp, Zea Mays
tgtattccggaattacccccggcctaccttgcatattcttcagttatcggttcacgacgcacccaccgaggccaaaggccaccaccattccttccccaactctgcaggctgctcgtcgccctccctccacgccggacgcgccccgatccagatccaggggcgtaacatggcatcaaaacgtatcctcaaggaattaaaggacctgcaaaaggaccctccaacgtcatgcagtgcaggtcctgctggtgaggatatgttccactggcaggcaaccatcatgggtcctcctgatagtccatatgctggaggtgttttcttagtgaacattcatttccccccggactaccctttcaagcctccaaaggtatcttttaagacgaaggtcttccatccaaacatcaatagtaatggaagcatatgtctcgacattcttaaggagcagtggagccctgctttgacaatctctaagctacaccactaactaccatttttttatg

SEQ ID NO: 11085 - DNA, 1088 bp, Zea Mays
aaattagaacagaaggagtattacataaaagcttgtgcgttttccacagtgattttgagcgaccttattgatcttatctgaaagatactcatccgtcgcgctcatcttttgctggttgaaccaaagagcccactaatggaaaaaaacaacacgcaaattcttgttccagaacatttccaaaacatatatcacaagtccaaatcctaaagcagaaacaagccaatttctgagatgttttatcttataccacaaaacaaaataatgaaattccatcagaaaaagcttcagtaaacgtgtaccgggccgaaacgtcccgagcccatgggcgaagcccaacaagcggcccagcacgaaacgtcggagccctagcgaaaatcctcagcgccgccgcgcactataagtagcgcctccaaaccctaggctgctacgcgcttcctctcgccctcgctcctccgccgccgccgccgccgcatcaagcccccgccccgccgtcgcctgaggtagacaccaatccgccgccatggggcgtatgcacagccgcgggaagggtatctcatcgtcggcgcttccctacaagaggacgcctcctacctggctcaagaccgctgcctccgacgtggaggagatgatcacaaaggcagcgaagaagggacagatgccgtcgcagatcggcgtcctgctccgtgaccagcacggtatcccccttgtcaagagcgtcaccggcagcaagatcctccgcatcctcaaggcccatgggctggcaccagaaatccccgaggacctgtacttcctcatcaagaaggcggtggcgataaggaagcaccttgagaggaacaggaaggacaaagactctaaattcaggctcattcttgtggagagcaggatccaccgccttgcccgctactacaagcgcacaaagaagcttccacccacctggaagtatgagtcaaccacagcgagcactctggtggcctaagtgtggtatcctccgacagcttgttctagatatgaatttgtgcaaaagaaaataattccggatattgctgagccgggatgcccttattccacagatctccctagaaaagaat

SEQ ID NO: 11086 - DNA, 58 bp, Zea Mays
ccaatgcttatgatattatgctcaagttttagtgacagtaacaccaggggtgttacat

SEQ ID NO: 11087 - DNA, 57 bp, Zea Mays
gtcgtttaagtactgagatgacgtcctctaacaaatgtctgaccatgctaaccacgc

SEQ ID NO: 11088 - DNA, 886 bp, Zea Mays
atccccaatatatccccactcttcgcctcctttctggagcagctagggttccgtcctcgatccgatccgccgagtgcacaccacctttccccactccgatcgaatcgatggccgccgagggcgagaagaagatgataaccctcaaaagctccgatggcgaggagttcgaggtggaagaggcggtggcgatggagtcgcagaccatccgccacatgatcgaggatgactgcgccgacaacggtatccctcttcctaacgtcaactccaagatcctatccaagcaccgccgcctccggtgaggacctcaagaactgggatgcggacttcgtcaaggtcgaccaggccacgcttttcgacctcatcttggctgcaaactatctgaacatcaagggtctgctcgacctgacctgtcagactgttgctgacatgatcaagggcaagacaccagaagagattcgcaagaccttcaacatcaagaatgacttcacccctgaggaggaagaggagatccgcagggagaaccagtgggccttcgagtaaggaggtgctggatctattgatgcctaagtttggtggtgtctactactatgtctactttatgttgtcctaatggttgtaagtattttgggagtcactttgcttgcgaatgtctcgcgtaagacttatgttggtcaatggtcggttattaacttattaccatgaaagcacttcgtctgctgccctaagaggtttagtcccatttgcattataaccaattcaatccttgtggatgatttgtgtgattccatcgtgaatctcatggtaaaatattttcattgttgtgatactgcctattcgcagtccagttgtattttttgttttttactatttgctgatgttgagtttt

SEQ ID NO: 11089 - DNA, 65 bp, Zea Mays
cagccatccccaacggctttgtggtggttgagggctataaataccccaaccaccaccactccaag

SEQ ID NO: 11090 - DNA, 728 bp, Zea Mays
ggggaaaagaatctgctgaaacgcgcggcacgcgtgagttgtgaaagttgagacgcctcagaaaaacgcaacccttttttgggctttggcttttgctgcaaacaaaaggcgacgcggctgggatctagcacgctagcgagcgagagagacgcacatctatctgtcaagcgacgccgcggcctcgatcagagtcggaggcgaacacccccatggcggcggctggcggcggcgcaggagggaaggttcagcgtgcccgaggcggcgccctttaccgcggtgctcaagtacgccgcggaggagttcaaggtcccgccccagaccagcgccatcatcaccaacgatggaattggcatcaacccccagcaaagtgcaggcaacgtgtttctgaaacatggttcggagctgcgtctcatccctcgcgatagagttggagctgtagtcatgtcttccggttagaggatatatacagtccaatgcataatgagcaaaacttgagagaaataaagctttgatgttggccttgcttggctgtaggatgttgttacaaggataataagcgaaccttaccgtacatgtctcaagttgtatgctctctgtttgtatgtggagagatttctgaaagtgaatccagtatctgaatcgactcaattagccgctttctgtctgcacagagcgatatgatcctgcttcgcgctctgtcagttcaaaagtatagaaatgaggtgttc

SEQ ID NO: 11091 - DNA, 56 bp, Zea Mays
gaataaacactacgttagtgtttgttagacgacgatcacttgtcgatcagcttttg

SEQ ID NO: 11092 - DNA, 536 bp, Zea Mays
cccttcctcaccatcttccccgtagcgaggatggcaatgaggtgttctttcgcataaagaggtccacccagctgaagaagctgatgaacgcctattgcgaccgccagtctgtggacatgaatgccattgcattcctgtttgatggccgcaggcttcgcggcgagcagacccctgatgaggtgacccaattcggctttagatcccagcattgagtggaatcattgatcgatatttattatggctgtgcagctggagatggaggacggcgacgagatcgacgccatgcttcaccagaccggaggcagcgttcctagcaccacctaaaagcagcagctgcggagcctcgttttgctctccgccctgcgtagtactaaacaaaagggaaaaagtctttttaaggaacttgtgatgctctggctccttgtgccattgctgagggacatccttagcctttatttagtggtatggtttggtactttgttctgtcatcactcgtttatctatccctaatacatgccgccatgtttgtaaacaaa

SEQ ID NO: 11093 - DNA, 71 bp, Zea Mays
tatccaactttgcaattttggcttcagcttttgccagtaaaccttccattgtctgaagtttgaaatctttc

SEQ ID NO: 11094 - DNA, 131 bp, Zea Mays
tgacttacatagatcacgatgctcgcgcgaggttgatcggggaaaacgtgagttgtatggtttgcggtggagctacccacaacgccagatcacggcgacatgcccctgttccggcccaagcacgacattag

SEQ ID NO: 11095 - DNA, 979 bp, Zea Mays
ctaaagataggtactatgatctgatcatctccacgaggctggcggggatcgggcacgcgctcttccttttcatgtcgtcggcgcgcgacaaggtcggctacgtttaccccaacgtcaacagcgtcggcgcgggcctcttcctcaacgagatgttcaaggcgccgactaacaacctcgccgacggcgggtaccacatgtataaagacatgctggagtggatcggccggccggcgaagaacgttccccagcagccgacacagccgctgcgggtgtccatctccaagaagctacgggcgtacgtggaggacaagtatagccgcgccggcgtggagaagggcaagtacgtcgtcatccacggcatcgcctctgactccgtcgccaacatgaagtccagaggcgacgacgactgccttcttcccctcgggcactgggctcagatagccaaggaaatcagctccggcgacagggggctcaagcctctgttcgtgatccctcatgagaagcacagagatgaaatcgaggaggaggtgggggacgacacaagcatcctgttcatcaccaccccaggccagctcgccaacgcccgcgacaagccatgtgtggcgttgttctcgtcggcagagaaggcaaggctgttcctgccatacgtggagggcaagagcagctgcaccgtcatatcttcggcgacggggaacctgatcgacatcgacctcaacgcggtgaagaatgtggtgaaggacttggagcccgctcccagcttcgcattggcacagaagtagcagctgcgttccaacatcacccccattgctttgtacatagttcaaacagcagcaacgctagagagaatggtgcagtattacaaactacaaacagcacacatgccgtgtattccgatgttataaataacatctcatatcagctatgcaacgaataaaacttagaacaagaaaccaaaaacaagataacataaatgaattaa

SEQ ID NO: 11096 - DNA, 73 bp, Zea Mays
gaggtggatttggggtagactccctcccactggaagttccagctgtatcctgtgatcgggtcttggacggcat

SEQ ID NO: 11097 - DNA, 77 bp, Zea Mays
aactcctatcacctaatgcatcaagcaagtgagaaagatttaaaaaggaacaaggaggtggcaaatgcatcggggct

SEQ ID NO: 11098 - DNA, 1400 bp, Zea Mays
ccttggagcaactcctgaacatgttcttcgccacttaactttgatgttaaggtccagccgaagaaggttattcaaccgaagaaaagtacacaacctgctaaacaggagtccagtgatgacagcagctctgagagctcctcagacgatgaaccttccaaaaaaccagttgccggttcaaaaaagcctcctgccagtagtagcagcagtgatgatagcagtgacagtgatgatagcagctctgatgaggaaccagcaaagaagcccacggtcctttcaaagaagcccactgtcctttcaaagaagcccactgtcctttcaaaaaaacctgtcacagcagtcagtaatggttcaaaacaggttaaacctgatagcagcagctctgacagtagctcagatgaggatgaaaaacctgctgctagcctaaagaagcctgttgttgcctctgtgcaaaagaagacccaagaatctgatagctctgacagtgattctgatgaggatgaatcagaagatgatattcctgctaaagctcaagtagtagccaagaaaaaggaagagtccagtagcagttctgattctgatagtgattctgagtccgaggatgagaaacctgctgctaacctaaagaagcctccggttccctctgtgcaaaagaagacccaagaatctgacagctctgacagtgattctgatgaggatgaatcagatgatattcctgctaaagctcaagtagtagccaagaaaaaggaagaatctggtagcagttctgattctgatagtgaatttgagtctgacgatgaggatagcaatgcgaaaacagtacaacctgccaaggctgctgctattaaaaagaaggaagattctagtgagagctcagaaactgactcacagtcagattcagaagattcagaacctgaaaaacctactgtccctgcgaaaaggcctctagcaacaaataaaaagaatgaacaatccagcgagaaatctgatgacagctctgatgagagttctgatgaaagtgatgaggaacctccacaaaagaaaactaagaattctgcaccttctggtgctgcaaaggctgccactaatgtttcaaagaaaaaaagcagcagtgatgaagatgatgaaagttcagaagaaagctctgatgatgaggatacagaacaagttgaaactaaggaaacttctgtagtcactacccagaagccggcacataatgaacctaaaactcctgccaaaagccaaagtcaggctactggttcaaagactatttttgttgggaatttagcctacagtatagagcgtgaacaagttaaggaattttttgaggaggctggtgaagttgttgatgttcgtttggctacttttgatgatgggagtttcaagggttttggacatgttcc

SEQ ID NO: 11099 - DNA, 1407 bp, Zea Mays
cctcactccaaactccaaagccaacaaacagagctccaactcagaaagcatccgtcccttggcagcagcaacaagctactagctatgtgtgtttagagcgagcgagggaaaaaaaagaaaacatctaagatatactccatcatcttcgtttgattaacccgcccagtaaagccatgggtactaatgatagagcggtcatttctctggtactcctcgtgtgcatcgctagccgctcgtccttgggtgccgctgaaactgacgttgagcagaagcgcttgtcagtcccgttgatgtttgtgttcggtgattcgctggtcgatgtcggaaacaataacttcctgccgccgcctgcaccccgtgctgcatctccgtacggcatcgacttccatgctggcaccgccggcgccgtctcaggacggttcacgaatggctacaaccttgccgatttagtcgcgcgacgtctggggttcaagatgagtccacctgcttacctctcgttgacaccggtatcaaagtttgacctgttcacgtgccgaattggtgccaattacgcgtctggcggatctggcattctcaacaccacgggaaacgggacactcacgctgcagaaacaaatcacgctgttctccaaaactcaagcaagaatgtcgtgggcccgctgcaagctcaggtctatggtatcgaggtccttgttccttgtcagcgccggcggcaatgacttctccgccttcagtgaaatgggcatgggcgaacaagacgccccagcctacatcagtagcatggtctcaacctatgtccagcatatcgacgcgttgtacaagttgggagcacggaggttggggatcctagacgtgccagctatcggctgtaccccaggctccagagtccccatggccaacggcggatgcaacgacgctgccaactctatggcgcagaacttcaacagactcctaaggctcgagggctccgggtggtcgacagggcatgctgcggatcgggaaaactgaacgcggcggtcatgtgcgcccagccaaacacgacttactgttcggatcgcgacgactacatgttctgggacatgctacatcctacgcaggcaacaaatgaacgtggggtggtcgccatcttctacggcccgcaggagtacgcggatcccatcaactttgcacagttggccgctgccacagcaaatgatgatgatgatataaatactgctatgaccgcaggcgtctatgccgccatatgataaacactatttatgtctattggcatgcagctgcgacatgtcactacctgagtactatatacgtaattcagttggaataatgtacgttgtgtgcatcatcagtctctctctatatatgctggaaataaaatgaagacaagagaccacaatgttagtatcac

SEQ ID NO: 11100 - DNA, 2111 bp, Zea Mays
gcggagcacggggactcggggagagagataataccgtggacaaaattgggcacgtcttcttctccgcgaacctcgcgtcctcctcgcctgcctgcctacaagtctcccccctcccctccccgtgcctccctcgggcctcgcttctcgcgctcttcctctcttgcctccgcctgcctccaggctccaacaacccgggagggcgccgtccgcccccgcctccgggagcgatgatgatcgcgcgacgcctgctccgatccaataatgcccccgcccaggcaaccagcttattgaagcatgtaactggcaccgcaagtttgcaaggcaatgcggatagcttgttggatggtacagtcagacattttggctcagcaccgtctgcccagcctgaagaaaatgggttcaagggccacggcatgctggcgccttttacagctggctggcagagcaatgatttgcaccctctgatcattgagagatctgagggttcctatgtctatgacattaatgggaacaagtatctggactctcttgcaggattatggtgcacagctttaggtggtagcgagcctcgcttagtcaaagcagcaactgagcaattaaacaaactacccttctaccattccttctggaaccgtacaacaaaaccttcgttggatcttgcacaggagatccttagcatgttcactgcaagggaaatggggaaagttttcttcacaaacagtggttcagaagcaaatgactctcaggtcaaactagtatggtattataacaatgcattggggaggccaaacaagaagaaatttattgcgcgatcaaaagcataccatggatctacattgatttcagcgagcctaactggtcttcctgccctacaccagaagtttgatctaccagcaccttttgttctgcacactgactgccctcactactggcgatatcatcttcctggcgagacagaagaagattttgcgactagacttgccaccaatttagagaacctcattctcaaagaaggaccagaaacaattgctgctttcattgctgaacctgtgatgggtgctggtggtgtcatccctcctccaaagacctattttgacaaggttcaagcaatcgtgaagaagtatgacattcttttcatagcagatgaggttatcactgcatttggaaggctgggaactatgtttggatgcgattactataacatcaagccagatctagtttcactggccaaggctctttcaaacgcctacgtacccatcggggcaactcttgttagcccagagatatcagatgtgatccattcccagagcaataagcttggttcatttgctcatggattcacgtactccggccatccggttgcctgtgctgtggccattgaagctctgaaactttatcgcgaaagggacattcccggccatgtcaagcaaatcgccccaaagttccaggacgggattagggcgctggcagacagtccgattatcggggagatacgtggcttggggatgattatggggaccgaattcacaaacaacaagtcaccgactgatctgttccctgccgaatggggggtcggtgccatcttcggcgaagagtgccagaagcgcggcatgctggtgagggtcgctggcgacgccatcatgatgtcgccgacgctgatcatgacgcccggcgaagtcgacgagttggtgcgcatctacggggaagccctcaaggccacggaggagagggtggcagccctgcagtccaagaagaactagccaaaagggcggcgacgacgataacgataaacgccgggcgacgacggaccatatttgatgtacaggtgaataaacagccaagttcgtggctgcgagatggcaatagcgcgccggtctatgttcttgctctgtcgccaagcaaatggtggctcaactttttaaacatgtcatagatgtttttttcttcccttcctttcccttaaggaatggcaatacatctcaaatgtttgctgccctgtagttcctgaagataatgggtttcgtgtatatcgtgagtattagtagtgttcggatacatagctttgtaaaggcaaagcaataataaagtgaaggaactgcagtttcgagtca

SEQ ID NO: 11101 - DNA, 1263 bp, Zea Mays
gcccttctcttttgtgagagaacaaatttaggcttccaagtctgccattcccttggaggaggcactggatctggaatgggcacgcttctcatttcaaagatcagagaggagtaccctgatcggatgatgctgacattttctgtctttccctcgcccaaggtgtcagacactgttgttgagccatacaatgcaaccctgtctgtccatcagttggttgagaacgctgatgaatgcatggttcttgacaacgaagcactttatgacatttgcttccgaactctgaagctgacgacccctagctttggagacttgaaccacttgatcagtgcaacgatgagtggtgtcacttgctgcctccgcttcccaggacagcttaactctgacctgcgcaagcttgcagtcaacctgatcccgttccctcggctccacttcttcatggttggctttgcgccactcacctcgcgtggctcgcagcagtaccgtgcgctcactgtccctgagctaacccagcagatgtgggatgccaagaacatgatgtgtgctgctgacccacgccatggtcgttatctcacagcctctgccatgttccgtggcaagatgagcactaaggaggttgatgagcaaatgattaatgtccagaacaagaactcgtcctattttgtggagtggatccccaacaacgtcaagtccagtgtttgtgatatccctccgcgtggcctctccatggcctccaccttcattggcaactccacgtccatccaggagatgttccgccgtgtgagcgagcagttcactgctatgttcaggaggaaggctttcttgcattggtacactggtgagggcatggatgagatggagttcaccgaagctgagagcaacatgaacgatctggtgtccgagtaccagcagtaccaggatgccactgctgatgaggaggcggaatacgaggacgaggaggccatccaagacgagtaagggtggtttgggccctgccacatttgtacccttgtttcctttcattccggggcttgcctatggtttgcttgttgtattcgctcaagttatgcggtatgtagtagtactttcgtgcgtagcatgctgtatgctaccacaaagactttgttcacctgcactgcttgatatgccagccatggcatatgtgacgagtatttcattattttatctgcttgcttgctcctgtgatggttccttcctatgacattgaatgcgaatttgcccattgctcacgttggatctgcatgg

SEQ ID NO: 11102 - DNA, 63 bp, Zea Mays
gcagggggtagggttttgggttctaaatatcaaacaaggtccaaatcataccaaactttactc

SEQ ID NO: 11103 - DNA, 72 bp, Zea Mays
ctagtagtgtgcaaaagaaccatgcgtttatgtaccatgacaggagacaatctagaaatgcttataggaatt

SEQ ID NO: 11104 - DNA, 843 bp, Zea Mays
ctgcgggcccctacgtcattaacaaaggcccacgaggccacgacttatcccgtaggccacaacactcgcatccagctcctctgcttctggcgaccaaattctgccgtctccaccgccgccgcagccagcgtcaccggagggatctgccgtctcccttgctccacgcgatgaacaccgacatcaccgcctcgactaagccggagtacccggtggtggatcggaacccggccttcaccaaggtggtcggcaacttctctgcgctcgactacatgcgcctctccaccatctccgccgtctccgtcaccgttggctacctctccgggatcaagccggggatccggggcccgtcgatggtcacgggcggcctcatcggggtcatgggagggttcatgtacgcctaccagaactccgccgggcgcctaatgggattctttcccaacgacgccgaggttgcgcgctacaagcacaagcttcattgaggatccagctccattccgtctctcttttcgcaaccgtttcgcctgttcctttcctgattccgtgttaacttcagtactttatctgggcactctatggccttggttaaataaaagtggtatgttgttgcacggttatgaggattcgatgatacaattcacctcatctttatgttgtttggtgagaatttcgtcgccgtttgggtgaatttatgaatactgaagtgatttctgctctgaacttgttatttgttgtgtggtcgtgtttgtgtatcttagcttgtcaggattggggatagtgatcttattacctctcatggtaagcaatgggggttcatttggctcattggctgcctgtaggggaata

SEQ ID NO: 11105 - DNA, 999 bp, Zea Mays
ctcgtttccattcctctgaacaagcagtgcagaaatgcaccttcttgcttcttgttgcttcacgcggggcagccgggtgtcggcgaggaaccccctgatgagcaggaacctggagaggaatggcaggatcacctgcatgacgtttccccgggactggctgcggagggacctgagcgtcatcggcttcgggctcatcggctggatggggccgtccagcgtcccggccatcaacggcaacagcctcacggggctcttcttctccagcatcggccaggagctggcccacttccccacgcccccgcccgtcacctcccagttctggctgtggctagtgacgtggcacctgggcctgttcatcgtgctcaccttcggccagatcggattcaagggcaggaccgaggactacttcgagaagtgaagcggttaagatcctatccatcatccctggtgctgcgctgcgttgcgttgcgtgcgtgctcgccgctatcgaacctttgctgtatagggttccgatttcgtcgaatgtaatgtatgatgctacttttgagcttcaatgtaaaatctatgccgtccggccccaacgcgctcaggtttaatttgatgcatctagctactagtatccctctcagctacttattactctgataaaaaaagcattttttttctagactacatcaggtcaaacattaaaattactaccttcgtcgtaaaaaaaacatattgtgtttagggtttagggtatcaatctaggtagagcttgttggggcgaaggcaaaggcgccacccttcgctcgaagccttcgctgcagcagctgagctaacagaaacaaaacaggcagggacacccttcgcttgttccgcaccagacgaagaccggcgacgaagggcatcccacagtgcggccacgtccagctcagaggcccacgtgcgatccggcccatcgtagcgggccccgcgtggccgtcgtgcgttacgggcctaatttgtaaaggcatccct

SEQ ID NO: 11106 - DNA, 170 bp, Zea Mays
gatgcatggcagattgcaaacaaacaaaaacaacgtacacttcgaattcatgggaatatgggatcgtgttgtacgtaccagctaagaacaggcggcgggcttggacatggagcaaagggatcggaatggctggagctcggcaaagatgcacgaagccatcaaaggaccgg

SEQ ID NO: 11107 - DNA, 99 bp, Zea Mays
gcattatttgatggcattgaagaaggtgggggtgagaccttcagcttattcttatcgtgaaattcatgagcatgagaattatcaagctctgcacagttt

SEQ ID NO: 11108 - DNA, 260 bp, Zea Mays
ttggccacataacgtgcacatcccttataatggtaagaatttgaagaaaccaaagccttggaagcacacccaagcaataacgccggcacaactcagacagatgcgtgatgaattttgggacactgctcctcactatggtggacagaaagagatttgggacgcacttagagccgctgcagactctgacctagcgcttgcgcaaaccatagtggatagtgctggcatcatcgtatcgaatctgacagacgaatctctagaat

SEQ ID NO: 11109 - DNA, 1680 bp, Zea Mays
gtttccagcttttttttttgaacaatccccgattggttcccgtgccgtagatgtttggctcgaagtcagtcctgagcatgtcaaggctgaagtgcgcactgcggggatttgatctgagggttctcttgatcctactgattggtgtgccaattttgatctttgccatatatgtgcatggccagaaggtgacttacttcctccgaccaatctgggagaagcccccaaagcccttcacaatactccctcactattaccatgaaaatgtctcgatgggtaacctatgcaagttgcatggatggaaagtcagggagactccacgccgtgtctttgatgccgtgctcttcagcaatgagcttgacatccttgatatccgctggcacgagcttagcccgtatgtgtcagaatttgtgctgcttgagtccaattcaacttttaccggcataaagaaggaccttcacttcaaggaaaaccgccaacggtttggctttgcagagtcacggttgacctatggcatgataggtggaaggtttgtgaagggagagaacccatttgtcgaggagtcgtatcaaagggttgctctcgaccagctcattaagattgcgggcatcacggatgacgacctgctgatcatgtctgatgttgatgagatcccaagtggacacaccatcgacctcttgagatggtgcgatgacgttccggagatactccatctccagctcaggaactacctctactcgttccaattcctacttgacgacaagagctggagggcttcagtgcacagatacagagctgggaagacgaggtatgcacatttccggcagacggacgacctcctggctgattcagggtggcactgcagcttctgcttccgctacataaacgacttcatcttcaagatgaaagcctacagccacgtcgaccggatcagattcaagtacttcctgaacccgaagaggattcagcatgtgatttgcgaaggggctgaccttttcgacatgcttcccgaagagtacacgttccaagagatcatcgccaagctggggcctatcccgagtacattctccgccgttcatctccctgcctatctgctggagcaattcgatcggtacaggtaccttctcccaggcaactgcgttagagagagtggctaggcagctggctgcccgccgtctgcatcatgaccctgaggcgcacggacgtcgctctctcgcggatgtctgtcttatggcggcgggggttgtgtccgatacgattggctgacttagttgagtgatcgcttggctgctggttgagttcatatgggatttttgtgtaccgtgtaacagaaaccatggaaggcctgacggctgcgtagcgcagcgcgtgcttgatcgctgctgcgttcttgtttggcagaggagagctgagagctttttgttcgttgcttccatgattgatatatgatgaactcagaacctgttgtagatctcataccgccgagcgacattcagattctttctttctttgctcgtgatgtacattgccgttcacttacctagttacgttgagccatagatgtttccaatccagtttctgactgtttctcatacctgttgaccataaaataattttccgggatgccatctgtttgctctattactcgaagcgccgaggtggaaacgattcttactgacgtct

SEQ ID NO: 11110 - DNA, 64 bp, Zea Mays
ctcatcatgttcattgattagagtttgagcaatggcataaagttagacaataataatccaaccc

SEQ ID NO: 11111 - DNA, 75 bp, Zea Mays
atttctacaaaagtatctaagttgattcttgctaaagcctttttcttgattcctatttaaccagcatatccttga

SEQ ID NO: 11112 - DNA, 1888 bp, Zea Mays
aattgttactgatacagtgtgtttactttcgatggttacctggggtccaatcctccttgaggattatcatctaatcgaaaagcttgctcagttcgacagagaacgtatccctgaacgtgttgtgcatgcacggggagccagtgccaagggtttctttgaggtcactcatgatgtctctcaccttacatgtgctgattttctccgtgctcctggggtccagacacctgttattgtccgtttctctacagttgtgcatgagcgtggaagccctgagaccttgagggatccacgtggttttgctgtcaagttctacaccagagagggtaactttgacctcgtgggtaacaacatgcctgtgtttttcatacgagatgggatgaaattccctgacatggtccacgctttcaagccgaatccaaagaccaatttgcaggagaactggagaatagtagatttcttctctcaccacccagagagcctacacatgttcaccttcctctttgacgatgttggcatcccactcaactacaggcacatggagggctttggtgtcaatacctacaccttgatcaacagggatggaaagcctcaccttgtgaaattccattggaagcctacttgtggtgtgaaatgcttgctcgacaatgaagctgtgactgttggaggcacctgccacagccatgcgacgaaggatctatatgattccatcgcagctgggaattaccctgaatggaagctctacatccagactattgatcttgaccatgaggataagtttgactttgacccgctcgatgtcaccaagacctggcctgaggatatcatcccgctgcagcccgttggacggatggtcctgaacaagaacgtcgacaacttctttgcagagaatgaacagattgctttctgcccagcgattattgttcctggaattcactattctgatgataagctgctccagacgagaatcttctcctatgctgatacccagaggcaccgccttggtccaaactatctgatgcttcctgtgaatgcaccaaaatgtgcccaccacaataaccaccatgatgggttcatgaacttcatgcacagggacgaagaggtgaactacttcccttcgaggtttgatcccgcccgtcacgcggagaaggtccccattcctccccgtgttctaacaggctgtcgtgagaagtgcatcattcagaaggagaacaacttcaagcaggctggcgagagatatcgttccttcgaccctgcaaggcaagaccggttcatccagcgatgggttgacgcactgacagaccctcgcgtgacccatgaacaccgtaccatttggatctcctactggtcccagtgcgacgccgctcttggccagaagctggcttctaggctgaacctgaagccgagcatgtaagatcgacgaggaagaaagcaggcaccggtggccaaggatgcaacgcaacatggagcgtgtgatgtttacaccaatataattgaataaacaggggatgtgcgcgttgtcgtacttatgctgatgctgatggtcggtggtcgattatatatactggaacttctggtgtatgctcttctcttctggggagacgtaatgtaacgaagaagaatgtgtcattgtggcctgtggtacaaaccctgctgtgtatgggcctgtctataagaaacagcgatgagttgtgacgttatgtttctgacagtttatttactaatgagcacatctttgatttactagaacgaagagaagttgaggaactgtcggacagatgcagcaaggatcctcattaaataatagaatcactcttgtttgcattcatgaaaactgtactaagggagtgtttgtttgatgaatcactctaagataaggtggtgcatcatg

SEQ ID NO: 11113 - DNA, 2583 bp, Zea Mays
aacacgtagcaagttaggcagagcaccatttggagcaacatcgtttcttttcaccgagtaccaatatgttggtatcttcatggctatcttcgctgttgtgatcttcctcttccttggttcggttgagggattcagcacgaagagccagccctgcacatatagcaaggacaagtactgcaagcctgcgctgttcactgcactctttagcactgtgtccttcttgcttggagccatcacctctctggtctctggtttccttggcatgaagattgccacatatgcgaatgccagaactaccctggaagctaggaagggtgttggcaaggcttttatcactgctttccgctctggcgctgttatgggtttcctgcttgcatcaagtgggcttgtggttctgtacatcacaattaatgtatttaagttgtattacggtgatgactgggagggtctttttgagtccatcactggctatggtcttggtgggtcgtccatggctctcttcggaagagttggtggaggtatctacacaaaggctgctgatgttggtgccgatcttgttggaaaggtcgagaggaacattcctgaggatgatcctaggaacccagctgtgattgctgataatgtcggtgacaatgttggtgacattgctggaatgggatctgatctctttgggtcatacgcagagtcttcttgtgctgcccttgttgttgcgtctatttcatctttcggaatcgaccatgatttcactgggatgtgctacccactccttgttagctctgttggtatcattgtctgcttgatcaccaccctttttgctactgatttctttgaagtcaaggctgtgaaagaaattgagcctgcacttaagaagcagctcatcatctccaccgtcctgatgacttttggtattgctctaatcagctggttggcccttccagctaagttcaccatctacaacttcggtactcagaaggaggtttccaactggggtttgttcttctgtgtttcaattggtctgtgggctggtttgattattggttttgtcacagaatactacactagcaatgcatacagtcctgtgcaagatgttgcggattcgtgcagaactggtgctgccactaatgtcatttttggtcttgctcttggatacaagtctgttatcatcccgattttcgctattgctgttagcatctatgtcagtttctccattgctgcgatgtacggcattgcagttgccgctcttggtatgctgagcacaatcgcaactggtcttgctattgatgcttatggtcccatcagtgacaatgctggtggtattgctgagatggctggaatgagccacagaatccgtgagagaactgatgctcttgatgctgctggcaacacaactgctgctattggaaaggggtttgccattggttcagctgctcttgtgtccctggcgctttttggtgcctttgtcagcagagctggagtgaaggtcgtcgacgtcctctcccccaaggttttcattggtttgattgttggagccatgcttccgtactggttctctgccatgaccatgaagagtgttggaagcgctgccctgaagatggtggaggaggtccgcaggcagttcaacaccattcctgggttgatggagggaacagccaagcccgactacgcaacctgtgtgaagatctccactgatgcttccatcaaggagatgattcctccgggcgctctggtcatgctgactcccctcatcgttggaaccctctttggcgtcgagactctctccggcgttcttgctggtgccctggtttctggagtgcagatcgccatctctgcttccaacaccggcggtgcatgggacaatgccaagaagtacatcgaggctggtgccagcgagcacgcgaggaccctcggtcccaagggatccgactgccacaaggccgctgtgatcggtgacaccattggtgaccccctgaaggacacctccggcccgtccctcaacatcctcatcaagctcatggccgtggagtccctcgtgtttgcccccttctttgccacccagggtggcctgctcttcaagtacctgtaaaagggacaacaccaagcacacagcagaagtatacgatctcccgaccgaccgtggacaatatcgaataactcctgccaaatcgccagttccttttgtgtactgtgcgctagccgccgcctagctgcactgctgtatttttgtttcaggattgctgctgctgttcgcattcaatctttgggcctcccggagccgccggaggcgcgttttactgttagccttactactcttactccctgtagctccacgtagaagaaaccgatgtcctgcgtctggcaatttttcttagtcccttgatgatggcgatgatgctgaaacctttttttgaacaatgatacatgatgattgttgcgttgtactggtggtaaatcacggtccgtattggcctgttctgttggtgcccatttccaatcatccaatgtcgtgctctgcgttatacgattgctgtttgtactgtcatagctgctgccgacaaggtcataaagaaccttaaacttgaagcc

SEQ ID NO: 11114 - DNA, 57 bp, Zea Mays
gcttgtcgtctaatacacccttaaaagctaatgaaccatcacttctcctaaagacag

SEQ ID NO: 11115 - DNA, 920 bp, Zea Mays
tttgctgaaacaccgtgttctgcaagggaggagcaaggagataaagagaagcctaagcagctcacaatcttctatggcgggaaggtgctggtatttgacgatttccccgccgacaaggcaaaggatctgatgcagctggccagcaagggcagcccagtggtacagaacgttgctttgcctcaaccctctgcagcagctgctgtcactactgacaaggccgtgctggacccggtcatcagcttggccgctgctaagaagcctgctcgcacaaatgcttctgatatgcctattatgaggaaggcttctcttcaccgcttccttgagaagagaaaagatcgcctcaatgcaaagacaccatatcaaactgctccttcagatgccgcaccagtcaagaaggagcctgagagccagccatggctcggattaggaccgaatgccgtggattccagcctgaacctcagctagtacacaacaacacagccataataagacggcacagcaacggcacccaccatgacctggaatttgctttgccactagatcgagttcagaaaccataaatattcttagttatcgtgttttagtgttcgcttatgtcgtggttctacgccctcttgtcgcatagttctggatgtaaagaaaagtagccagtcatgaccatcaccgggagtcggggagaagtttttggagggtgttaacacacggcgactctgaattggccatgctaaggaaaaggatagtgcaatgtgaggtatatgtattttctgaaagccagatcgtttgggtctagccctgatgtatgcagaacaagtgattattgtaatggatcctgattatcctcatcatcctattgttgttttctgatcacatggcttcaccaacccaagtttgtttggattgtcgtcgttcgttcctgccgc

SEQ ID NO: 11116 - DNA, 111 bp, Zea Mays
ccaaatcccaaatccagttacccggtgcccccctcccgttccgtcgcgctcgggtccctctcctcctctcccctcctcctccttcgcttcgtagtaatcgtaaacccggac

SEQ ID NO: 11117 - DNA, 1133 bp, Zea Mays
cgtcacactgctgcgaaggacaccaggcccgccgaaaattgtgtgaacgcccctttcttctaccccaagacgaactcggtgaactctttccggttcgttcccctacgcccgtttctctctcgtcgcgcaacatcagagcacaagcgaggaacccagtccagtcccgggaatggagtgcgtattgggcgtggttggccgcgacttcgcgctggtggcggccgacacctccgccgtgcagagtattctcgtccacaagaccgacgaggacaaggtgatggtgctcgactcgcaaaagctgatgggcgcttcaggggagcctggtgatcgggtgcaatttacggagttcatacagaagaacctccacctgtaccagttccggaacaccatcccgctctcaaccgccgccgccgccaacttcacacgcggcgaactcgccacagcccttcgcaagaatccatatatggtcaatattattcttggtggttatgataaggatgttggtgcttccctctactacatcgactacattgcaaccttgcacaaaattgacaaaggtgcttttgggtacggatcatacttctgtttgtctcttatggacaagttgtaccacccggacatgactgttgaggaagcagtagatcttgttgacaagtgcatcaaggagattcggctgcgattggttgtcgcgcctcagaactttgttatcaagattgttgacaaggacggggcgagggagtacgccaggcgtgaactcgtcggtgacaatgcacctgctgaagctgcaaccgcagttgttgctgcctgaggcatgaactcgtttgaggttggaatgtgttagttgtttctcagcgatgctacttatgcgatcacaggatactggtggggggcccacaactgttttatcaattttagcccagtcgtgtaattctgtttctgcactattcatgtctgctgagtacaagtagtgtttcacgcttgaacaaatacaatactgttgctgtgcaccttttctgatcactgaaatggccggcgacccaggccgttacaagcaggccatggcccgttactaggtaaaaaaaaaagaaacgagcaagaaataccagtattttgcttgatggtatggcacccatctt

SEQ ID NO: 11118 - DNA, 1408 bp, Zea Mays
agtgtttggagacgggtgagactgttgccataaagaaggttcttcaggataagcgttacaagaaccgcgagttgcagaccatgcgccttcttgaccaccctaatgttgttgctttgaagcattgcttcttttcaactaccgagaaggatgagctttatctgaacttggtccttgagtatgtgccggagacagttcatcgagttgtgaagcatcacaacaagatgaaccaacgcatgccacttatttatgtgaagctgtatatgtaccagatatgtagggcattggcttacattcatggcactattggtgtctgccacagagatattaagccacaaaaccttctggtgaacccacacacccaccagcttaaactatgtgactttggcagtgcaaaagttctggtcaagggggaaccaaacatatcgtacatctgctcccgatactatagggctccagagctcatatttggtgccactgagtataccacagcgattgacatttggtctgctggatgtgttcttgctgagcttatgctagggcagcctttgtttccgggtgaaagtggtgtggaccaacttgttgaaatcatcaaggtcctcggtacgccaacaagggaagaaattaaatgcatgaacccaaattacacagagtttaagttcccacaaatcaaagcacacccatggcacaaggtattccacaaaaggatgccgccagaagctgttgatctggtctctcggctactccagtactccccaaatctgagatgcactgctatggaggcacttgttcacccattctttgatgagcttcgagatcctaatactcgccttccaaatggtcgctttttgccaccactattcaatttcaagcctcacgaacttaaaggagtcccatcagacattgtcgcgaaattgattccagaacatgcaaagaagcaatgctcctatgttggattgtgaaatgaccgcgccttgagactggaacctgtggttgcaattgtgaatttcccctgggatgtttgacgatctgaggcatgcgagcctgttgttgaagatgcaaggttacgtacttgtacgacaatgtgacctgtgtagctgagtagtctatgtcgcagtgacatgtaacggcaccccccttcctactaactgacgcttactcgagattgccatagttgatcttgtaatttgttatagagcagtatgaatgtatttatggtagcttgaatctatgtatggattcacttcgtttttccatgtttccttgtctccagacccagattgctaccgtattgtttcagaattcctagctacctgttgcctattgagtattgactaccagcttgcacttgtctgttattgcactggctgtggaatcagctgttgatttttgccacaatattttagttcag

SEQ ID NO: 11119 - DNA, 57 bp, Zea Mays
tgaagacttggtcactgccctacacatagcaatccagtgaactgaagggttgataaa

SEQ ID NO: 11120 - DNA, 1283 bp, Zea Mays
agtgcacaagaggcccctcaagctgccacatcagcaccctcatctgccaagtcagcacagcctgcccaatcgcctccaggcaacagatagccctgatgggcacccatccaatggcagctccgatggccaaatctctgctaggcccacagcatcctccgatcctcattttcatccatttaaactagctcgccttttcctccacaagcccccatcagccatcccctcccgcggcaagtctctctgaattgtgggtctccggcgatggcggctcttgctccatccaagattctgggcaccaagctcaacttcgccggctcctcccgctacgccaccgcagcgcccaccgcgggggctcagaagatcgtctccctcttcagcaagaagcctgcccagaagcccaagccctctgcggtgtcgtcctcttctccggacatcagcgacgagctcgccaagtggtacggtcctgacaggaggatctacctgccggatgggctcttggaccgctcggaggtaccggagtacctcaccggagaggtccctggagactatggctacgacccttttggcctgggcaagaagccagaggacttcgccaagtaccaggcctacgagctgatccatgccagatgggccatgctcggtgccgctggcgctgtcatcccagaggcgtgcaacaagttcggcgctaactgcggccccgaggccgtctggttcaagaccggagccctgctcctcgacggaaacaccctcagctatttcggcaacagcatccccatcaacctggtggacgcccagcctgtgaggacgcgccacaagccggcagcgatgccaagtcatgcgctgctgccgtccttgattttaccggggaaagagctgtgtgtgagggtctgaagtgaagaacgtgccatgcccatgcgtgtacattatcgagagggggaagaaaccttctcattctgatctctgatatgactgctgcttcagattgcgcctgagatatgctaagtttttgaaagctaattagttcgtgcacattaagggtgcgtttgagttggattatttgtgaatgctagcttattttaacttatttgtgattttaaagtgatattttacccctctagtataattcaacgtataggaggaaacaaacgtagcctaagttactttgtggtcaatctaatagagctcctgaattttacttcttaattctccaaaggagtgtttccagagacaagaattaatcgtgaaatgttttatactcagaaaatagtggcttgatttttttt

SEQ ID NO: 11121 - DNA, 285 bp, Zea Mays
  misc_feature (284)..(285): n is a, c, g, or t
ccggcaatcaatggcgtcctaggccaggaagaacacggcaacgctgccccagcaggctgccaccgacggaagctaaacgctactagatgactcaagctatggtcgatcaaaccagagcaaaagcacttcagcgcaatcgtcgacctggcctccaaaaccaaaacattatgttcgcaatcacatgataaatagtcggtccaaacccaagcaactgcaactgttcgtcggagagaccatagagaagttcttcggaagcaaagagtacacaagagtcacaactcacnn

SEQ ID NO: 11122 - DNA, 1406 bp, Zea Mays
cacaaatcgaaagagccctaagtgcatttgatcagtagcaaatccatgcattgggaggacaggatgactcgaggcttattccgctacgatgtcactgcctgtgagaccaagccgtttgaccctgccaaattcaatttcacaaaagttggccaggaagaggttctcttccaatttgagaatagtggtggtgatgacagctatttcctgaacaacgctccaatcattgctgttgatcgggctccaaatgttattgctatcaatgtaagcccaattgaatatggacatgtgcttctcattcctcgtgttctggaccgcctgcctcagaggattgatccagagagcttcttgcttgcactgcaaatggcagccgagggaggtagcccatacttcaggcttggttacaatagcttgggtgcgtttgccaccatcaatcacctccactttcaggcgtactacttgtcagtgcctttccctgttgagaaggcagctacccacaagatcccactctctgaggacacgaagaagaatggggtgaccgtgtccaagctgataaattatcctgtgagaggcctggtatttgagggagggaacaccctggacgacctggccactgtggtttctaatgcttgcatttggctgcaagacaacaatgtgccttacaatgtgctcatttctgactgtggcaagagggttttcctgttcccccagtgctacgcagagaagcaggctctgggtgaagtgagccaggagctgctggacactcaggtgaacccagctgtgtgggagatcagtggacacatggtgctgaaacggaggatggactatgaggaggcatctgaaacctccgcgtggaaactcctcgccgaggtctctctctccgaggagcgcttcgaggaagtgaaggcgtacatcttcagcgctgctggcctggttcagtatgatgaggaagaggaggaagccagcgacggtgagggccctacggcctatgttcctgtcaaggttacccctctgcccgtcgctgaagggtgcctcgtcctcccgtgagtccgtggtcggttaaataaagggccgtatatgattgcgagccctgtgctctgccgctattttcttctcgtttgtgtcttgctgctctcgtggtgaactcgctactccagtactctgcaatattaagcagaagctattgtattgtttgggtcgtttgtcagctaaattgaaatgcgatggacatttactagtatctgctctctgtttcttctatatatcatgtgtaggctcacgcgcctgtctcaatttgagcggcttcgttttacatctgcgtcactagagatccggatttgactcacttggtgatggttttagtgatgtggagtcatgtgagaggataaatgaaaggtgatggttttact

SEQ ID NO: 11123 - DNA, 171 bp, Zea Mays
tggggctattttgccgagttccttagagagagttgtctcgcgcccctaggtattctctacctacccacctgtgtccgtttcgggtacaggtacccttttgttgaaggtcgttcgagcttttcctgggagtatggcatgggttacatacttcagcgctgtagcgcttggtat

SEQ ID NO: 11124 - DNA, 1072 bp, Zea Mays
gggtgcgggccctcgctgcgcgggcagaatcgctgatatgcccttgggccacgccttccttcttatcccctgcgcctgccctcccctcctgcagcgcccgtcgcctccctttccccttccctccctccctctccccgcgggccgccagaggcaatttcgccctcgattcgaccccgattcgtccgcccgcgaccgggattccctccgccaagcgcggatctgaacgctgcgctccgtgtcgccgctcgaatccgccatgaagggggccaaatccaagggcgccgccaaggccgatgccaagctggcggtgaagagcaagggggcggagaagcccgccaagggcaggaaagggaaggccggcaaggaccccaacaagcctaagagggctcccagcgctttcttcgtgttcatggaggaatttcgcaaggagttcaaggagaagaaccctaagaacaagtctgtcgctgcggtggggaaagctgctggcgacaggtggaaatccctgagcgagtcggacaaggctccctatgtagccaaggctaacaagctcaagctcgagtacaacaaggccatcgctgcctacaacaagggcgagagcactgcagctaagaaggctcctgccaaggaggaagaggaggaagatgaagaggagtctgacaagtccaagtcggaggtcaatgacgaggatgatgaagagggtagtgaggaggatgaagatgatgacgagtgatggagctcctcgagacaatggaccgtgcttcatccaacaatggagcggctacacaaggccccgtggcgatcacaaaaaaggagcctatatccatggcaatgtgatcttgtgctcctactgatcaaggcagggccatgcgtgttctcctgcccacctaccagctgagcatgtgtgcagtcagcacccactgcaggcccaacgtttttacactcacccagatatgatcttggttttgatcagatctgccgacgaaaacaccaaattctgagtagagattagagaaggcagcagcatggcatggtagccttcgttttgtatttgtttcatgcttcgaacgccagc

SEQ ID NO: 11125 - DNA, 830 bp, Zea Mays
acgatgagcaacgtgtgatcctcgatgggggttgcattgcactgcagataagccgaccgctcaccgcccgccacgtagcacccccacccacccttccctccgccaataactctcccttgtcagctagctagcgagccgtgtggccgcccgtgtcgtgtagtgtgtagtcgcagcagctagcgcccggccggccagtcgagtgagtccatcctccatcgccatccaatggccgccaccgccctgagcatgagcatcctccgcgcgccgccgccctgcttctcgtccccactcaggctcagggtcgcggttgccaagccgctggcggcccccatgcggcgccagctgctgcgcgcgcaggccacctacaacgtgaagctgatcacgccggagggggaggtggagctgcaggtgcccgacgacgtctacatcctggactacgccgaggaggaaggcatcgacctgccctactcctgccgcgcggggtcctgctcctcctgcgccggcaaggtcgtctccggctccgtggaccagtccgaccagagctacctcgacgacggccagatcgccgccggctgggtgctcacctgcgtggcgtaccccacctccgacgtcgtcatcgagacgcacaaggaggatgaccttatctcctaagcaaattaataaagcaccgccaattatcacgtcgacttgcaagcacaggagagtagaagatgtctcaatactggctgtgcatgtaatttttttgtccgtttcaaactgtattgtaaactattacctctgttttcaaatattttttaaatatttatcgccggctaaaaaaaagaaataaa

SEQ ID NO: 11126 - DNA, 744 bp, Zea Mays
ctcagccgccaccagcatccgcctctcttctcagtgccagccgccgtgcgctcgctctctctgtccctcaaggccttcgccggcgaagagcgcctagtcacccaccaggatgaagtttgttgctgcttacctgcttgctgtccttgctgggaactccagcccctctgctgaggacttgacggccattctggagtcagttggctgtgaagttgacaatgaaaagatggagctcctgctgtcccaactgagcggtaaggacattaccgagctcattgctgcgggcagggagaagtttgcttcagtcccatgcggcggcggcggcggtatggctgtggcagcagctggccctgctgctggcggagctgctcctgcagctgaggcgaagaaagaagagaaggtggaggagaaggaagagagcgacgatgacatgggcttcagcctcttcgactgagctgtgtgggcagtcatcacatcagagtagtttgttttgttttgacttttgagtcgtggaaccagaggaaaatcgtagtcgttgcttggactttaacctcgttttatgttggaaactagtttgaaaggctcctactgtctttatatttggtaattcagccgtaggtcgacattgcctccagagatgttatgaattggtcaggtttcctggctgctcactgttatgttgttacatgtcgacatcgcctcgttcatccttgcgtacgtgcgtggtaccatcgaatctgttgatag

SEQ ID NO: 11127 - DNA, 72 bp, Zea Mays
aacagattttaaaaaaaaaaaaaaaaaaaaaaaaaaaagtgtatacatacagactcacccccaagataatcc

SEQ ID NO: 11128 - DNA, 513 bp, Zea Mays
aaccgtcacttcggacgagaagctctaagcgaccacgcgccgataaaaaccgctcccacccactcgctccgctgccctgcccctcctccgccgtttcgcctctctccactttccccgtccttcgccgtcgcggccgcgtcctagtctagtctgatggccagccgctgggtccgacccgaggtgtacccgctgttcgcggcgatgggagttgccgttggcatctgcgggtttcagctcttccggaacatcaccggcaacccggaagtcagggtaaacaaggcagggagggcagccggcgtgcttgagaaccatgaggaggggaggcgttacgccatgcatggcctcagaagctttgtgcacgacaagacccccgagatcatgccagctatcaacaagttctttactgaccccaagtgaagcaaagcagctttggttggccgctgatgacgatggttctgctactagttgcccttggggattgtgtaccctttttatggcaattcgatatggcgg

SEQ ID NO: 11129 - DNA, 993 bp, Zea Mays
aattctgttaacatgtggtatataaatggggccaatcacttgtgttctgactggtctgaccacattcgtgagaaggatggcatctgggctgtgcttgcatggctttcaattattgctttcaagaataaggacaaccttggaggagataagcttgtcactgttgaagatattgtccgtcagcactgggccacatatggtcgccattactacacacgctatgactatgagaatgttgatgcaggggctgctaaggagcttatggcaaacctagtaagcatgcagtcatcactttctgatgttaacaagttggtcaaggagatccggtctgatgtttctgaagtagttgcagctgacgagtttgagtacaaggatcctgttgatggctctgtgtccaagcaccagggcatccgatacctctttggagatggttcacgactggtgttccgcctctctggaaccggttctgttggtgccaccatccgtgtctacatcgagcagtacgagagggactcctctaagaccggcagggattcacaggacgcccttgctccgctggttgatgttgcgctcaagctctccaagatgcaagagtacactggacgctctgcccccaccgtcatcacataaattttgaagagtgttttagaatgagttgaggcgcttacacaaactttcattccggcctcttgttccatagtttttcttgcatgttacatctcaccgatgaataaaatgtatgtatcagacttgtctcgtttttttgcccatccaagcagcaaattagccgctggcacagcatgcggtaataatcttgtcacagtgctgtaattgggagcgtttttcttgttagaagtgtttctggtttgtttgagcatttgcggatcgatttttctttctgaagagtatataaacattttactcacctgtatacactgtcgcagtgtcactaatgttctgatggctgtttagactatgtccaataagcgtttttcg

SEQ ID NO: 11130 - DNA, 405 bp, Zea Mays
tgtgtcatggaagtccggtacatagatatggcctcatgctctccagtggatcatcgaaattaatgggcaaccaacaactgatctggaaacttttataaaggtggtgaagggtctcgaagatggtgaatttgttagggtgaggacggtccatttaaatggaaagcctcgggtacttactctgaaacaggaccttcactactggccgacctgggagctcagctttgaaccagaaactgctacatggcggaggaaaataataaaagcattgcaatcagccagggcgtgatattttcatgttttgctgcgaccttttcatgctttcagaggagcatagaggtatggaagttagaggagagggaaacagggaagagacttgggacagctaccaggcgtaatggattgtgg

SEQ ID NO: 11131 - DNA, 61 bp, Zea Mays
gaggagctcaacaacttcacgaggaatgaggtatggcatttagttccatgtcctaacaaaa

SEQ ID NO: 11132 - DNA, 77 bp, Zea Mays
tgggcctgtttgtttcggcttctggcagcttctgaccaccaaaagctgctgcagactgccaaacactcagcttttca

SEQ ID NO: 11133 - DNA, 1218 bp, Zea Mays
aaacacgcaaaacgtgcttctgtccctctcctgttataatttcgtcttcttccctctcccaccggtgtcctcgcctcgcctatccgatctgccacctcgccgtctcgcacgttcctttccccaactccccagcgcctctccgcgccgcgatccagatccaggttgttcagcatgggtctggtgaaggaaggcgtcgacatggaggagggaaccctagagatcggcatggagtacaggactgtatctggtgtggccgggcctctggttatcttggataaagtaaagggcccaaagtaccaagaaattgtaaacatccgacttggagatggcaccactcgccgtggtcaagtccttgaagttgatggagaaaaagctgttgtgcaggtttttgaaggaacttctggaatagacaacaaatacacaaccgtgcagtttacaggcgaggttttgaaaactcctgtctcactcgatatgcttgggcgcatttttaatggttctggaaaacctattgacaatggccccccgatattacctgaagcctacttggatatctctggaagttctattaatcccagtgagagaacctatccagaggagatgatccaaactgggatatccaccattgatgtgatgaactccattgctcgtgggcaaaaaatccccctattttctgctgctggactccctcacaatgaaattgctgctcagatctgtcgtcaggctggccttgtgaagacattggagaaaggaaagcatgcagagggtggtgaagatgacaactttgctattgtgtttgctgctatgggagtgaacatggaaacagctcaattcttcaaacgtgattttgaagagaacggttccatggaacgggtcaccctttttctgaatctggctaatgatcccaccattgaacgtattatcacccctcggattgctctaacaacagcagaatatttggcatatgaatgtgggaagcatgtacttgtcatcttgacagatatgagctcttatgcagacgcacttcgtgaggtttctgcagcccgagaagaggtgccaggtaggcgtggttatcctggatatatgtatactgatctggcaacaatatatgagcgtgctgggcgtattgaaggaagaacagggtccattacccaaattcctattctgacaatgcctaatgatgcaggggaaggcttgcccaccagttcagatggtcctttt

SEQ ID NO: 11134 - DNA, 465 bp, Zea Mays
gttcagtctaccgctcatgttcgacgctatcgaaaatcatgcattggatggatgcccgggcattgagaaggaaggacgctttcagaggcgaaaggccatggggagagagagcgtctgtgatccatggatctccgatcgggaaaccgtatccaagctccgtggctagtctgcgctctttggacttttcaaacttagcgaactgaaacatctgagtagctaaaggaaggaaaatcaaccgagaccccgttagtagcggcgagcgagagcggaacaagggttttcatcaaaagaaatccgaagcggtttcattcgatttgttgtggattggatgatggaaaaaccagcaagcagcaagcgtaggctgtgttgccgtagcgcgccctacggagttgtacaaagtcagcattggggcgcaagcataggcaacacaggacggggtggggcgcgcagtgaactggttttcta

SEQ ID NO: 11135 - DNA, 1379 bp, Zea Mays
cttatttgaatcttaactttgttgactgttctcttggcgacccgactatgtacgaggagttctggcgcggcacaggagatagcgcctcgatcttcatccctggttggcaaacaatgagctacttctccgacctcggcggcatctgttggttcctggagcctggattcgagcgcgaggtgcggcgtctccacaggctcgtggggaatgccgttgtagacgggtaccatgtgctcgtcgggacaggctccactcagctctttcaggccgtgctgtacgcgctctcacctgcaagtgacggcacacccatgaacgtcgtctcaccggcaccgtactactcgtcttacccatctgtgaccaactatctaaactctgcgctctaccgttgggctggtgatgccaatacatttgatggcgacacatgtattgagctcgtctgctccccaaacaaccctgatggtggcctccggaagcctgtcatcaaatccaagtctagcaagcctgtttatgacttcgcctactactggccgcagtacacacccatcaccgaggcagctgcccatgacatcatgctgttcaccgtctccaaatgcaccggccatgccggcaccaggctgggtgggcattggtgaaggatactaaggtggctcagaagatgatcaagtttatagagctcaacacaatcggtgtatccaaggactctcaacttcgtgccgctaagattatcggggcaatatgtaatggctatgagccggtaccatcctctggtaaaacaagccaactcttccatttcgccaaggaaaaaatggcggctcgctgggctagacttcgtgcagctgtggcagcctcagacatctttactctcccttatgagctatctggctattgtagcttttccaatgagactgtcaccgccaatcctccatttgcatggcttcgctacaacaaggatgatattgaagatctggaggccttcctactcgagaaaaagattatcactcgaggtggcacaaggtttggagtggatgcaagggctgtcagagttagtatggttgacacagaccaagccttcaatgtgttcatcaatcgtctggccacaatgaagtgaaatttcagtgcaaattaataaagcactttgtggctactacaaggatgaccgcgttctagatggaacaatcgatgctttggaaagcttaataatgttttatgttgttgaataattccgtgtgttttcgggtatgttgtgtaatactcaatgtcaaatcctatgcttaatcgatgttgtggtccatcctgttatcagcatggccaattatatatggatgaccgtcactgctcagtctttactcctaattacatggcaagtgtttaatggtgcttca

SEQ ID NO: 11136 - DNA, 83 bp, Zea Mays
acagcaccggatcaacaatcttcttctcatcagccattaggtcgatggttgttgaaatgccgaggcttgaaatccaattaaac

SEQ ID NO: 11137 - DNA, 352 bp, Zea Mays
ctttctggaaacacttgccactcattttacagaatgtttaggccagaagagctgaaccacatcgagtgatgcctattctactgagcacaccagcgtgacaacaaaacattgacgtctctcatgccgagttcttagtttttctttcctagttttctctaataagtgtggaattggttgaggaagccaactggacaatgcatttttcatctccgtcatgggttatgttcatccatggtcaatctggtgtaaacagcaaatcctatccgttttcgagatatgttttctcaaactactgatggagtttagagtgttcattccacctctgctacaaaactgtagctattgctgtatc

SEQ ID NO: 11138 - DNA, 1507 bp, Zea Mays
tttttaaccgcaagcatcatttccagttttaagattaaccaaaaatttcaacgtcagcaatattggacaacgggttcagctagaaagccctaaaacacaagtgttcaaagcaaagcaaagcatagctatagaagatgccaccggaatttggacattcagaccacagaaaaatactgaacttcagccgcagaagacaggtctcagagtggacaacgcctactcccagccttgggcagtcggtggcggggctgcttggtcccaaccagtaggagcaaccagaggaggtacagtgccgtccaccacaggtgcaggggccccagcttgatcccagccatcaccggtaggaaccggagctgcaaccaatattgggacagtaggagcaacaggcggcgcagtcacatcagaggtccactggtcaccaccccactgatcagctccttggtaatcagtgattgcggcaaactcaggggcaacagcagcttcctcctcctgctcctttgcttcctctgggtccctgtagaagaacaaatccacctgcaaacaacattatcatataagaatgccaaggttataagtctggactcatcacatctccaatgtcattttgaacgacatcataagctagcatcataccatgacctcccacttgtgcccagggaggatagtgcccctcatctgcagaaccatcctggccaaaagccagaacaggcatccaatgctgttcctccccttgttgttcgctgggatgccgatatcgacataccgcatgggagagtcagtatcacagaaggcaatggtggggatgttccccagagcagactccttaattggctgcaaacaatcaccaccataacaattagttcaccatcacactgcagggtccactcactaaatatttctgaactttgaaactgaaattctgttcacctgatggtcagtccttgggtcggtaaggatgagcagccgaggctcgctgaaggaggtctggagctggttagtgaaggtaccaggggtgtgcctcccagcgatggcatgagcgccagtgtactgagcgaacttgaggacagcacgctggccataggggcgggcggactggacgatgatgtcctgcgggttctcgatggcaacgataaccctcgctgcaagctgcagtttctcccatgtcttgccaaggttgatgatgcagataccgtcggtgcggcgcttaaaggcatagcgctccatctggaaatcgcagttcttggtgccaaggtggacgtcggcggcgagcatcatctgtatgtcctgctccttctgggacagcgcacgcaccgcgcctccgcctgctgccgctgccatgactgacggggatgcgggtggtcagggctggacgagcgaagcaaggggaggagggagggtcgccgcctcgctggatcgggatcgggctctgacgctctgtgtcttgggagtggcggctcggaggtgcgggagggatctcttatctgcgacgcctcgaaaaccctaggaa

SEQ ID NO: 11139 - DNA, 437 bp, Zea Mays
actcgagaaacggatccctaatcgctgaaccaaaactacaaaacgaagtgacgatactgccctcgacctctcgaggtatcgagtctcgaccaacccatacgcacctaccctccgccaccgttcccccctccccatctcgcccgccgttctcgtccttgtagatctcctcgcacctcgcccattcgcttcaccaagggtttaagaccggcggcgatggcggcgaagctggcgcagctgcgcacacaggtaacgcgtgcggcggagttcgcctcgaagcacggctgctcctactacaaggaggtaatggagaagaacaagcagtacgtcgttcagccccccaccgtcgagaagtgccaggagctctccaagcagctcttttacacccgcctcgcaagatgcatggagcacaatgcatggctattagggaaaaccatgaa

SEQ ID NO: 11140 - DNA, 76 bp, Zea Mays
tgatcgtgcaagtgatgtggtgacaaccacaagatgcagtcggtggacgacccaaggaaggatggacttgaccagt

SEQ ID NO: 11141 - DNA, 72 bp, Zea Mays
tctgaaggtccttgctcaatattctgtctagtttcaacaggccctgtttcgatgggcactgagggcccagct

SEQ ID NO: 11142 - DNA, 78 bp, Zea Mays
cccccccctcccctttttttttttttttttttttttttccctaaattttttttttttttttttttttttttttttttt

SEQ ID NO: 11143 - DNA, 713 bp, Zea Mays
cgcaagaccgcaacaccaccccattctccagcaacgagacaacaaatctcctcctcttcctctccgtatccgcatcagtccatcaccttcaatggcggcggcggcggctgctgccacctccttcaccaccctcgccgtcgcgcgttcggcggggcagcggtccctccttgcctccaaggccgcaccttcgccgctcctctccctccgtggcgcccgcatcccctcgcaggccgtctccttctccgggggccttgcggcgtcgccctctcacagccgcgcgcgcttcgctacatccgccagcgccgagcccaaggaagcagatcttcagtctaaaatcaccaataaggtgtattttgacataagcattgggaaccctgtggggaagaatgttgggaggattgtcatcggcttgtatggggatgatgttccacaaacagcagagaactttcgtgctctttgcactggagagaaagggtttggatacaagggatccagtttccaccgtgtcatcagcgactttatgatccagggcggagattttgacaagggcaatggtaccggtgggaaaagcatatatggacgcactttcaaagatgagaacttcaaattggttcacactggacctggagtggtcagcatggctaatgctggaccgaacaccaacggcagccagtttttcatttgcactgtcaagaactggtaatgactggtgc

SEQ ID NO: 11144 - DNA, 337 bp, Zea Mays
gtggccttttacataagcaacccccccgacctcttttccctaccctctctttcgttacctacaggctacagctcccgtctctccgccgcttgcttggaaaacgaagaaaccctcctccaccaacccaatccagctacatccgtctgggtgaactccagggccaggagcagttcgccgccttcgttcgcatcacctacgcggttcgatccaactggcaggaaggaacgtgatggccaagacgagctcgttcaagctggagcacccccttgagaagaggcagtctgaggctaatcggatcagagagaagtaccctgacagaattccattgtataatgca

SEQ ID NO: 11145 - DNA, 67 bp, Zea Mays
gtcgcaagcgaaacgcgacgccaccgatgcggaccttgtcaccgccgctgagtacaagaaccctcgg

SEQ ID NO: 11146 - DNA, 113 bp, Zea Mays
taacaatggccgatttcccaacgtttgggatcccgaccaggagggcagttcccgtgcaattgctgtcgccatgcttgatctccctcattcttgcttgcacgactttcagcacc

SEQ ID NO: 11147 - DNA, 51 bp, Zea Mays
tatagagcttagaaacatttgtattatctttgcaaaaaactgtaatcgaga

SEQ ID NO: 11148 - DNA, 66 bp, Zea Mays
tagcatatatttcaaaactataaataatttataacagttcaaagttattcctttgaatcacttttg

SEQ ID NO: 11149 - DNA, 168 bp, Zea Mays
cagtcctaattcatcgtcggggcagaagtttaatgaatcatggtggtgttacagcacttcacatggcagcattgaacggtcacttagattgcatgcagttgttgattgacttgggcgctaatgtctcagctgtctcattcccctatggcactactgcaaatttgatag

SEQ ID NO: 11150 - DNA, 62 bp, Zea Mays
ccgtggtcgccactgcaggcggaacaacaacaagttgcccttcgcccgatcctgcaacgtat

SEQ ID NO: 11151 - DNA, 64 bp, Zea Mays
cctccgtctcgtactgacccccgcaccgccaaaccctagtccacagcggcgaggcgaccttgcg

SEQ ID NO: 11152 - DNA, 76 bp, Zea Mays
tcccgcattacataattaaaacctaaggatttactagctttgtatttaccttatccttgtttaccttttgggttat

SEQ ID NO: 11153 - DNA, 71 bp, Zea Mays
taattacaaaggtgaaaccttcgtaatattctactcgtggtcttcgtccgaagttcattaaatccttgggg

SEQ ID NO: 11154 - DNA, 555 bp, Zea Mays
caaccttgtacttgtttctgtaggatggttaccagctggccgtagaactagagaatgcctggcaagagagtgtcaagactggaactcctatggacatagtttcctccttgagacgttatgagaaagagagaagggtgcgtgttgctgttatacatggactggcaagaatggcagcaatcatggctaccacctatagaccgtatttgggtgttggtctaggacctttatcgtttttgaccaagttgcggataccacaccctggaagggttggtggcagattcttcatcaagtatggaatgcctgctatgctgagctgggtgcttggtggcaatagctcaaagctagaaggaagacctttaagctgccgactttctgacaaggcacatgacgagctttatcggtggtttgacgatgacgatgcgctggaacaagctatgggtggagaatggtacctcttcgcaacaagtgaagcaaacaacaatagcttgcagcagcccattcgtttaattagggatgagcagaggtcactctctgttggtgaattttcttttgcag

SEQ ID NO: 11155 - DNA, 94 bp, Zea Mays
gaattgaacaaacggttaccatgatgagcttcctgggtgtacaaagctactaaaacggcacttggaatggacagagccttactagagtgggttg

SEQ ID NO: 11156 - DNA, 87 bp, Zea Mays
catgagattccaggtaccaacttgctcttcaggtgacttgtaacctcgcgctagtcgtagcaatacaaacaaacatggtataggcaa

SEQ ID NO: 11157 - DNA, 76 bp, Zea Mays
gtcgtttggatcaagcttttacagtatgatgataggtttcatctagcctgagataacttgtctccagcaacgtcct

SEQ ID NO: 11158 - DNA, 71 bp, Zea Mays
tccacatcaacagagaagcccttgaaagtgaatatgtgagctctaatctccataactggattgacctcata

SEQ ID NO: 11159 - DNA, 1140 bp, Zea Mays
gtgtgccacagcccacagccttgaacatgtggtgctcgcaggccggtcgcttcgcctcaaccaatcaccggcagcctcccgcgccacccggcgcaaagataaagttaggctcggcaccgggggctcatccgcaagcctgtggacgcgagtgagtgaacaccagccgtattgtcccgactcctgacccctaccgatcctcgcctgctgcagccatggcgacctccgcggcgctctccaccgccgccaatcccacccagctctaccggtcccgcgcttcgctgggcaagccggtgaaggggcttggcctgagcatgggccgcgagcgcgcccagcggagcattgtgtgccaggcggcgagcagcatctccgccgaccgcgtccccgacatggagaagcggaagctgatgaacctcctcctcctcggcgccatctcgttgcccaccgtcggcatggtcgtcccctacggcgccttcttcgtccctgccggctccgggaacgccggcggcgggacctacgcgaaggacaagctgggcaacgacatcacggtggaggcgtggctcaacacgcacggtcccaacgaccgcacgctcgcgcaggggctcaagggtgaccccacgtacctggtggtggagcaggacaagacgctggccacctacgggatcaacgccgtgtgcactcacctcggctgcgtcgtgccgtggaacggcgctgagaacaagttcatctgcccctgccacggatcccagtacaacaaccagggcaaggtggtccgtggaccggcgcctctgtcgctggccctggttcacgccgacgtcgacgacggcaaggtcctcttcgtcccgtgggtggagaccgacttcaggaccggcgaggacccatggtggaaggcatgaggatgatccggaaccagcggtgctcagtgctcacacatgagacctatgtatgcctccgttccttgtgatgaggaaataggcttgcgttcgttctccgtgggcgttgttcctacaaattcacttgctctttgtctctctctatatatacacactgtataaaacaagaacacctgtttatcatctcttcttatataaccttttgaacactgtgaaatctgcgagaatggaaagactttcaatactaaaa

SEQ ID NO: 11160 - DNA, 60 bp, Zea Mays
ccggctccggcgcgaggcgactccacgtccgcgtccgccgccgcagctgcctgcggctgg

SEQ ID NO: 11161 - DNA, 737 bp, Zea Mays
gccgtgcgtccgtggctttgcatctgcaaccccgcccgatcaatcttcctcgttccgccgctccctcgcctccggcagcgaggtgaggccaccgatcggaccttccctagcggcggcgcctaccaacctcaaggagcgatggctctgtctgcgacgctacggatttctcttagcgtcgcgttctttggggttctggcgttcgtgcttggtgtcatcgccgaaaacaaaaaggcttgtctcagccctggctcttgcaatgtcgctgtgggcaactgtcaccgagggtcttcaccgcagcaagaacatccaccacgacatggactaccagtgccctactgccaagaccggcctgttcggcggcgccgctttcctcgcccttgacgctgctctcttctggcttgtttgccagatgctggccctcaatgcaagggctgactaccttgacgaggatgacggcaagggagaatatggccagatttatgctgctcaagtcgatgatggctcgaaggtctgagcctatgtggtcatgctcggcagggttctatgattagtgtcatttggctacattatgccatcaacaaagtcgctttagctctcagtaaatttgtatataagttgcaaagtcttacataaggctggtggttattgcactttcgtgtttcagtgtgatcgataaacagtatctcagtacaatcggtttgctatgccccttggcgaacttgtccttgagttttctg

SEQ ID NO: 11162 - DNA, 2027 bp, Zea Mays
gcagcagtgtgagagctcgattcgttgccgtccacttgtctcacggcctgtcgccatctccttcctggttttttcatccgaccatccccggctcctccgcgccgtcggcgacgactccatcgagtcactcggccgcagcaaccggcgaccatgtaccgagtcgcctccgggctcggcgccctcaagaggcatggggcaaatgctcaaatgatgaatgctgcaattaggtgtgccagcacaagtgttgcacagaggtcttcgggtggcttctggacctggttgactggtgcgcgttcaaatgaaatacctcctccagatttcacacttccaggagtgactattcctcctccgctgcctgaccatgtggaggctggcaaaacaagagtcacaacacttcccaatggtgttaaaatagcctctgagacatctgcgggatcatcttgttctgttggagtttatgttgattgtggttctgtatatgaagcacctgaaacaacaggcgccagtcaactgttgaagacaatggccttcacaaccactgccaacaggagtgagttgcgggttgtgcgtgaaattgaggcaataggtggcagtgccaaagcatctgctagccgtgagatgatgagctacacttacggagccctgaagacttacatgcctgaaatggttgaggtgcttattgattgtgtacgcaaccctgcttttcttgattgggaggtcaaggaacagattttgaggctacaggcagagcttgcaaaatcatcaagttttcctgaaaattttcttttggaggctcttcattctactggctattctggtgctttagcaaatccactaattgtgccagaatattcagttagcagattgaatgcagatgtcctggaacaatttataactgagaactacactgcttcccgaattgttctagctgcatcaggcgttgatcatgatgaattggtatctattgccgaaccccttctgtctgacattcccagtgtatctggaacaacaaggccaaaatcaacctacattggtggagaatacagaagaagtgcagattcatcgagcacagacgttgcattggcattcgaggtcccaagtggttggctcaaagaaaaagattgcgtcactgtatcagttcttcaggcacttctgggtggtggtggcaagttttcttggggaaggcaaggaaaggggttacattcacgtctaaaccgcctcgtaaatgaatttgatcagatcaagtcaatctctgctttcaaggatgttcacagtaatactggcatctttggaatccatacatctactgatgcatcatttgttcctaaagctattgacctagcagccagagagctcacttcccttgcaactcctggacaagttgaccaaagccaactggaccgcgctaaagcctcagctaaatatgcgatactggcaaatttggaatcacaggcatcgctaacagaggacatggggcgccaagttttggcatttggtgaaaggaaacctgctgagcaccttctcaaggctgtagatggtgttactatgaaagatataacgtctgttgctgaaaagatcatttcatccccattgacaatggcatctcatggaaacgttctgaatatgcctacttatgagtcggtcagtggcaagttccgctcaaaatgaggagtacatgacccttcccttcattttatcaccttgtttgctggacaagttttaccagtaccttgtcattcacgtctaggccatggttcttggtcagtttcagaagaaataagcaacctcatgcagttttgttcgtgaaacctgtgatcacttcacaattattcccttttctcattcttttgcggaacattcgtgtggttaatgctggtgatagaccagtaacgtgcttgtaaatttaaccgaaccctggcccctcattcggtaccaaggccccaagagaatgtacaaaattgtcgtaaaactcttgacaaaaatgttgtcgcacatgaataatgattctacagaactgaaaaaaaaac

SEQ ID NO: 11163 - DNA, 723 bp, Zea Mays
gtatgaagaaggattaaagctgaggccgaatggttcgctaggtttactctcccctcctcttccacggccgcgcctgcgacacccatccgccgccacgccatggccaagtacaacgtggtgcagaagaacaagcgccagtgcaatcaggaccgcaagcgcgccgcgcatggggagcccgggaccggcaagctcaagcagcggaccgcgcccgtctccatgtccggcaagcggaagaagaagctcgagcgccgcctcaaccggaagcagaaagaggctgcgatgattaaggcgctggagaacaacatgggggatgtcgacatggtctcagttgaagagtcttcagaagctgcaaagggcaagtcccaagtgaagttcagtgtgaagaaaaactcaagaatacagataaagagattaaagggcaaaggcaggaagaaagccaaaaatgcaaaaccacctgccaaggagaaagttgatgccatggtagaatgacagttgatgccatggtagcatgacggacaagactacatacatccatccctttgtatgttttctcagagtttgcagcatggaccgacctcaccgaacactggcgcgtgtctcttgcatcttctgcctgaatgttaaatagaagctacttaggcctggtgttaatgtacttcaaacatgaatctacctttaatagtggactatgcgaatttgttcatgttcttattgcgtttaaca

SEQ ID NO: 11164 - DNA, 64 bp, Zea Mays
aatcaataccacactacaaatagataccgccttattcaaatttgttaccgccggtattcgaatg

SEQ ID NO: 11165 - DNA, 443 bp, Zea Mays
agctgtcattgggctcaggtcacttggtcagattacagtggcaatcgcgatgagtttaggaggtgttactggactacggttgaggcgagagatggcagcagcaggcagcgaccagagtcaggagcagaggtgaggaggaggaggaggagctctgagacgacaacacccgagacaatggcgagccagttttccgctttataaaatcctgcggtgagtgagtgagtgagtgagtgagagagagagagagagagagagtgccgccgccgccgcaacaagaaatacaacagctgcagcttcctgcagaggttggaatgtatctactaagatgtgggtacctttttgcagttcttttttctcgcttcttttcttctcttttagcccaagctcctctcttgtccatgcactgtgtgaattaagtttgtcaggcaaaaaagaaaaaagaa

SEQ ID NO: 11166 - DNA, 76 bp, Zea Mays
ggcaatgatccttccgcaggttcacctacggaaaccttgttacgacttctccttcctctaaatgataagattcaat

SEQ ID NO: 11167 - DNA, 1581 bp, Zea Mays
gcacgaactaattagctttcaaaaacttagcatatctcaggcgcaatctgaagcagcagtcatatcagagatcagaatgagaaggtttcttccccctctcgataatgtacacgcatgggcatggcacgttcttcacttcagaccctcacacacagctctttccccggtaaaatcaaggacggcagcagcgcatgacttggcatcgctgccggcttgtggcgcgtcctcacaggctgggcgtcctctcggcggcgccggagatgacggtgagcaggttgttgccgaaggggtcgctgaggtgcttggcgaggttctcgacggggccttcgccggtgacgtaggcctggatgaagaaggcgaacatggagaacatggcgagccggccgttcttgatctccttcaccttgaggatggcggcctggtcggggtcgctggccaagcccagggggtcgaaggggccaccggggtgcagcttgtcctcgaggtccagtccgttgatgatccggtagtactcggcgccgccgacgaggacgacctccgcgatcacggcgaccaccaggttgatggggatgctgttgccgaaatagctgagggtgtttccgtcgaggagcagggctccggtctgcaaccagacggcctcggggccgcagttagcgccgaacttgttgcacgcctctgggatgacagcgccagcggcaccgagcatggcccatctggcatggatcagctcgtaggcctggtacttggcgaagtcctctggcttcttgcccaggccaaaagggtcgtagccatagctgccagttgtaggagcaagatagttcagttcagataccttaacttcgattctctgcagtttttcatatatgaacaaaactagaggaaatgacggccgtagattgttgtttaaaactgacgaagattatttcaaatgctggttgagagacgtgtgtgctttcagaacgaattctacaagctgcaatgaagcaccactttggtgaaaaatcggattttgaccacaaactatttttttccaagaaaaaaaaactttttttttgttttggtcgatgaaattggtaccgttgtttaaactatcttgtagcgctaacctgatttcattaaactaccaactggaatctagaatttctgaaacaagcaaaaacctttatggaaggcaaagttggagtgatgtgacttactctccagggacctctccggtgaggtactccggtacctccgagcggtccaagagcccatccggcaggtagatcctccgtaccacttggcgagctcgtcgctgatgtccggagaagaggacgacaccgcagagggcttgggcttctgggcaggcttcttgctgaagagggagacgatcttctgagcccccgcggtgggcgctgcggtggcgtagcgggaggagccggcgaagttgagcttggtgcccagaatcttggatggagcaagagccgccatcgccggagacccacaattcagagagacttgccgcgggaggggatggctgatgggggcttgtggaggaaaaggcgagctagtttaaatggatgaaaatgaggatcggaggat

SEQ ID NO: 11168 - DNA, 83 bp, Zea Mays
tgttcggatcgcggcgacgggggcggttcgccgcccccgacgttgcgagaagtccattgaaccttatcatttagaggaaggag

SEQ ID NO: 11169 - DNA, 1701 bp, Zea Mays
aaacacacccacccggtcgctccgctccaccgttccgccctcgaccgcgcgcggagcctcctcaacccttcagacctccgcctcccaccgcttccgtagcctcgcctcgcctcgcctcgcctcgtccttctcctccgtcccaaccatgagggagatcctgcacatccagggcgggcagtgcgggaaccagatcggtgccaagttctgggaggtgatctgcgacgagcacggcatcgaccacacgggcaagtacgccggcgactccgacctccagctcgagcgcatcaacgtctactacaatgaggccggcgggggccggttcgtcccgcgcgccgtgctcatggacctcgagcccggcaccatggactccgtgcgctccggcccctacggccagatcttccgccccgacaacttcgtcttcggccagtccggcgccggcaacaactgggccaagggccactacaccgagggcgccgagctcatcgactccgtgcttgacgtcgtccgcaaggaggccgagaactgcgactgcctccaagatttcaggtttgccattcattgggtggaggtactggctcagggatgggcaccctgctcatctccaaaatcagggaagagtacccagataggatgatgctgacgttctcagtttttccatcacccaaggtgtctgatactgtggtagaaccttacaatgccacgctctcagttcatcaacttgttgagaatgctgatgagtgtatggtcctcgacaacgaagctctctacgacatctgcttccgcactctgaagcttgctacacccactttcggtgacctgaaccatctcatctctgcaaccatgagtggtgttacctgctgcctgcggttcccaggccagctgaactcggacctccggaagcttgcggtcaacctgatccccttcccccgcctccatttcttcatggtcggcttcgcgccgctgacgtcaagggggtcccagcagtaccgcgccctgaccgtcccggagctgacccagcagatgtgggacgcgaagaacatgatgtgcgcggctgacccgcggcacgggcgctacctgacggcgtcggccatgttccgcgggaagatgagcaccaaggaggtggacgagcagatgctgaacgtgcagaacaagaactcgtcctacttcgtggagtggatcccgaacaacgtgaagtcgagcgtgtgcgacatcccccccacgggcctggcgatggcgtccacgttcgtcggcaactccacctcgatccaggagatgttccggcgcgtcagcgagcagttcacggccatgttccggcgcaaggccttcctgcactggtacaccggggagggcatggacgagatggagttcaccgaggccgagagcaacatgaacgacctggtggccgagtaccagcagtaccaggacgcgacggcggaagaggaggaggagtacaaggagggagatgaggtggctgcctgatccaccggcacattgtggggttgtgcacattgtggggttgtgttattattgttgctcttcatctggtgtttaaaatgttactgtgatgctgctgcgaaactgacgtaagttttaactgtggaattgattacttctagatcgtggatttgtcgatctgatattagatgtattctatatcttggtatcttttttttagagttcaggggcacatgagtcatcgtc

SEQ ID NO: 11170 - DNA, 1432 bp, Zea Mays
gtctagtagtagtactaccccgatgaactgcgttggaggcctgctcagcaatggtgactttgagacagcaccaagtggtggttttgtaaaatctgcttctgttgctgagggtgcatcgtcaatccctggttggacgatcaacggcacggttgaactcatttcagcaggccaacaccagggtggcatgatcctgattgttccacagggggaccatgcagtaaggctagggaatgatgctagcgttgggcaggtggtggacgttgagaagggttcggagtatgctatcacattcagtgctgcccggacatgtgcacaactggaggcactgaatgtttccgtgctaggtggcgtgtctcagacagtagacttgcagacgttgtacaacatagaaggctgggatgcgtacgcgttggcttttcaggcgacggaagagcaggcacatcttcaattcatgaaccctggcatggaggatgatccaacttgtggtcctatcctagacaacgttgccgtcaagaagctcttcaccccagacaaaccaaaggataacgtggtgctgaatggagactttgaggagggtccatggatgttccccaacacgagcttcggcgtgctgctcccaactaaccttgacgagcaaacgtctgccatacctggttggatgatcgagtcaaaccgcgccgtccgctacatagactctgatgagtacaaggttccccagggaaagcgtgccattgagcttctgtcaggcaaggaaggtatcatctcccagatggttgagaccacccctcagaaggtttacagcctgacgttcacactgggcacggcgggggactcgtgccaaccaccaatggccgtcatggcattcgcgggggatcaggcccagaacttccactactccccaatgggcaacgccaccagccaggctgcgaatgtgacgttcactgcacgcgctgagagaacacgtgtggcgttctatagcgtgtattacaacacgaggagtgacgaccacagctcgctgtgtggcccggtgattgacgatgtccgggtatgggcattgaacgccgcggctgggttgaaggcaagtattgggctggttcttggcattgttggtgtcgttggcatggtgttgttctgaaatctgaatctctcggtgccagtggtcttgggaagtatggatgtataacttcttctgttagttggaggcttactagttttggtagtaagcttgaagtttgttgagtgatatgagcttaggttaaaaagctacgagaacctacatggtattgcttgtgttacttcattggtgacatgcagttgtatggtattgtgtggcttgtttgccctagcttgtaatatgagatgtcagaattattcgaagatcatctcttcaatatattagaaaagagtaaagtgcaacatcaattgtccaatg

SEQ ID NO: 11171 - DNA, 91 bp, Zea Mays
ggggtgggatgcacacttcatacaggaaacatacagtggatggttgaataccgtaagcaatggcgttttgcgccttatcttatcaggctga

SEQ ID NO: 11172 - DNA, 72 bp, Zea Mays
tgctagcttaagtgacaatcctcaataaagaagctatagatgggatgtacttatatgagaaggccgagccca

SEQ ID NO: 11173 - DNA, 74 bp, Zea Mays
aaacaaaaggtgatgcttcacactggatgggaatttttacaaagaaaagaattatgatggtgaatccatcatgg

SEQ ID NO: 11174 - DNA, 357 bp, Zea Mays
agtttaactgggcccccgtgtggcactggacttggtggggcccgtgtccatggtcgtctcccttgtccatcgtctatcttctcccccaaatcgcattctcatcgcaccgcacgagctacggatctgcggcccgacgactacgacgacggggaggtaggggacgaatcgttgcaagcaacgaggtcagaactaaggaggccgatccatcctccagcctccgatcccatccgacgacatggtctgcgtcgcgtgcctgctgccgctcttcctgatcccggtggtcaacgccctcccttacctcatcgacctcatcatcgtggcatggaagacatcgtttttttttgtgcggggaagtaa

SEQ ID NO: 11175 - DNA, 246 bp, Zea Mays
ggacgaatccgtgcgacgcggggctggatctcagtggatcgtggcagcaaggccactctgccacttacaatgccccgtcgcgttttaagtcatctgcaaaggattcagcacgccgcccgttgggaagggagcttcgaggcggccccccccggggggtcggccgggcgggctgagccaatggcacggggcccgccgaacgccctaacgtgggtcggggcgggcggcgagcagaggcggacgaatctc

SEQ ID NO: 11176 - DNA, 229 bp, Zea Mays
  misc_feature (1)..(1): n is a, c, g, or t
nacaaggggaaaaattcacgcagccggattatatccaagggcatctctgcagggaagtcaaggaattgctaccgtggcttggtcctgatgaactctagtgcagagaatgcttataattcttcacagtgtgactcattgttgatcggggataatgcggctgcgaacacctatcccaccattcagattctttcttttaggtagattgcaaactttgatatgactgaaaaat

SEQ ID NO: 11177 - DNA, 1632 bp, Zea Mays
acattgggctggtccggccactccgacacccttatataaagtcccgaaccctagaggcaagcaccttcctccccaactcgccgtctgccttctgcgcctccatttcggcctctgtcccttgcaagttcaatctcacctccaaccatgggtaaagagaagtcccacatcaacattgtggttattggccacgttgactctggcaagtcgaccaccacaggacacctgatctacaagcttggaggcattgacaagcgtgtgatcgagaggtttgagaaggaggctgctgaaatgaacaagcggtccttcaagtacgcgtgggtgctcgacaagctcaaggctgagcgtgagagaggctgactgtgctgtccttatcattgactccaccactggtggttttgaggctggtatctccaaggatggccagacccgtgaacatgctctccttgcgttcacccttggagtgaagcagatgatttgctgctgcaacaagatggatgcaaccactccgaaatactccaaggcacgttatgatgagattgtgaaggaagtctcatcctacctcaagaaagttgggtacaaccctgataagattgcctttgttcccatttctggttttgagggcgacaacatgattgagaggtccaccaaccttgactggtacaaaggcccaaccctgcttgaggctcttgaccagatcaccgagcccaagaggccttcggacaagcccctgcgtctgcccctccaggatgtgtacaagattggtggtattggaactgtaccggttggtcgtgtggagactggtgtcatcaagcctggtatggtagtcacctttggtccaactggcctgactactgaggtgaagtctgttgagatgcaccacgaggcgcttcaggaggctcttccgggcgacaatgttggcttcaacgtgaagaacgttgctgtcaaggatctcaagcgtgggttcgtggcctccaactccaaggatgaccctgccaaggaggctgccagcttcacctcccaggtcatcatcatgaaccaccctgggcagattggcaacggctatgccccagtgctggactgccacacctcccacatcgccgtcaagtttgctgagctcattaccaagatcgacaggcgatctggcaaggagctcgagaaggagcccaagttcctgaagaacggtgatgctggtatggtgaagatgattcccaccaagcctatggtggtggagacattctccgcgtatcctcccctgggtaggtttgccgtccgcgacatgaggcagacggttgctgttggagtcatcaagagtgtggagaagaaggacccaaccggcgccaaggtgaccaaggcggccgccaagaagaaatgatgcgatcccgtgtctgcttttgcagtgcctggataacttgccactaaagttgtgtatgcggttgttgctgttattgcgtggactgtttgctgcggtgtctcctgtgtctgttgtctgttgtctttactatcagtaatgctcctgagacttgtatttctccttttggcgccgctaaatggaattttcgaacaatgattttcgtgttattattttacaaccttttcgaacaatatttacacgtctgatgtgttttgctgaga

SEQ ID NO: 11178 - DNA, 714 bp, Zea Mays
catgcacaactatcggtgaaggtggggaagaagaaaaattctaatgtcccagccgggcttttctttcagcacgctggtcatagggataagattgtagacttccactggaattcgtcagatccttggacaattgtcagtgtctctgatgatggcgagagcactggtggaggtggaacactgcagatttggcgcatgagtgatttgatctaccgcccagaggatgaagttcttgcagagctggagaatttcaaggctcatttggccagctgtgcaccgaagaattgagtcatgtgggttacctgcggaatgcaatcctgtggaaactgagtaggtgatgtagtttcatggccataagtatgagccccagttgacattgaatctgtcctctgatgctcctagagctgtacccttgaggggcttgtgcttttgtgagcttgtgttaaacctgctgtacgagtaaactagtatgtccgcaaacgcgtcagagccggatgtctgtgggccagctattgggatactgccggatatcgtcaacaattgttccagattggtgtattggatctaatgagattgtcagcaattgcttgtttttatggcttcacgaatcgtatgtgggtttacgttcttggcataccgttcggtcgaagactcgaaggcctactattgtctgcgtgcatttgagcttctcggcatgtctcctctagggtgtttgct

SEQ ID NO: 11179 - DNA, 1240 bp, Zea Mays
aacgcctccgctttcattcttctcttcccctcggcttcgagggttatttttatttctttctttccttttttcgtttttattttctttttattttcttttttcttccttttctcgttcccccgttggggttttgagctccgacgaaccctaataatcgccggggaccggcggccgatcgcccgccggcatgcaccatcagcagcggatgaagcaggcggcggcggccgcggccgcggcgcagcagcagcagctgatgcagcaggcactgctcctgcagcagcagcagcagtcgcaggcgcagccgcccttgttccccgggcaccacccgcaccccggcctcctcgccgcaccacagatagagcccatagtcagtggaaacctgcctcctgggtttgattcaagtacatgccgcagcgtgtatgttggcaatatccatcttcaagtgacggacacagtactgcaggaagtcttccaaagcattggtccagtagaagggtgcaagctcatcagaaaagaaaagtcatcctttggtttcattgactactatgaccgcagatatgctgcactagcaattttatctctcaatggcagacaactgtatggtcagccgattaaagtcaattgggcatatacaagtactccgagggaggacacatcaggtcattttaatatttttgttggggatctttgcccggaagtcactgatgctactttgtttgcatttttctctggatactctacttgctcagatgctagggttatgtgggaccagaaaacaggacgatccagagggtttggttttgtttctttcaggaaccagcaggatgctcaaagtgcgataaatgacttgaatgggaagtggcttgggaaccgtcaaattcgttgcaattgggcaacgaaaggtgctaatgctggtgaagagaaacagattctggacactaaggttgacctgtcaaatggttcatcagaatctggaaaagagaatccaaatgaagatggtcctgaaaataaccctcagtttactactgtttatgttggcaatcttcctcacgaggctaccatgaatgatgtgcacctgtttttccattcactgggggctggttcaattgaggaagtccgtgtaactcgtgataaaggctttggctttgtgaggtacagcacccatgaggaggctgcattggcaattcagatgggtaatggccaacttattggcgggaggcagataaagtcttgtgcctca

SEQ ID NO: 11180 - DNA, 829 bp, Zea Mays
taattgatttgagacttgagtccttcgattggttacatttacctccagtgctttatgaggtatgagcttggccgtcagcctgctaacaccaaactgtctagcaataagacagtgaggagggtccgtgtccgtggaggcaacgtgaagtggagggctctccgattggatacagtggtacctcactcactatggagtggacatcggtaggaagaagaaggtgcctgttgctaagaaggatgcgactgagggacaagagggtgaggctatagctgaggaaacaaagaagagtaaccatgtgcagaggaagattgagaagcgacagcaggaccgtgcactcgacactcatattgaagagcaatttggcagtgggagattgttggcctgcatttctgcccgtcctgggcagtgtggccgagctgatggctacatccttgagggtaaagagctcgagttctacatgaagaagctccagaggaagaagggcaagggtgttgcatcttagagcattcttttagctagaactgcaaaatatcttctacttgggggttttgttgttagtctttatgcatatcatttgcggacctgatgaacacttcataagtgaatcaactctcgattccaagaattgataattttcacatgcggtggttgtaattgtgatatttaggtttgctatttattgaaacttcttgtctaaagcagttttagtttaccttgaagatgattgttagaaacgagatcctatccaatctatattgctgtttggttttcactttatagctgctaacatttgattgcatagtaagaactggtcacgcgtacgacaatc

SEQ ID NO: 11181 - DNA, 119 bp, Zea Mays
atcgaccatcaacaaaaaaagatttcatccgtgactacccacaaaaacgttgcactagcacgaccgattagtcccccgaggtcctgcatctatactttccacgacacgttcaatctcct

SEQ ID NO: 11182 - DNA, 3157 bp, Zea Mays
tgcagaggcatttctttgttccagtagctaatcatgttgccttactttgtgtgcagctactgtgcatgccttcaaggatattctgaccagcctccctaagcctggaggtggtgaatatggaaagttctacagccttcctgcactaaatgatccaaggattgataagctgccgtactccgtccgtattcttcttgagtcagctatccgtaactgtgataacttccaagttaccaagaatgatgttgagaaaataattgactgggaaaacacatctccaaagctggccgagataccattcaagccagctcgagttcttcttcaggacttcactggagttccagcagttgttgatcttgcagctatgcgtgatgcgatggccaagttgggcagtgatgcgaacaagattaacccattggtcccggtggatcttgttattgatcactcagtgcaggtggatgtagcaaggtcgcagaatgccgtacaagcaaacatggaactggaatttagtcgcaacaaggaaagatttggtttccttaaatggggctctagtgctttccaaaatatgctagttgttcctcctggttctggtattgtgcaccaggtcaatcttgagtatcttggcagagttgttttcaacacagatggcattctctatcctgacagcgtagttggtactgattcacacaccactatgattgatggtttgggtgttgctggctggggggttggtggtatagaagcggaggctacaatgcttggtcagccaatgagcatggttttgcctggtgttgttggcttcaagttaactgggaagttacggagtggtgtcacggccactgatcttgttcttacagtaacacaaatgctaaggaaacatggtgttgttggcaaatttgttgaattctatggtgaaggtatgggtaagctgtctttagctgacagggccacaattgcgaacatgtcaccagaatatggagctaccatgggcttctttcctgtggaccatgtgacattggattaccttaaactgacaggccgcagtgatgaaactgtgtcaatgattgaagcatacctgcgagccaataaaatgtttgtggactacaatgagcctccaacagagagaatatactcatcttatcttgagctgaaccttgatgaggtggagcctagcatgtctggcccaaagaggcctcatgatcgtgtccctttgaaggaaatgaaatcagattggcatgcttgcctggacaacaaagttgggttcaagggttttgcagtgccaaaggagcagcaggataaggttgtcaaatttgactttcatgggcagccagcagaaatgaagcatggtagtgttgttatagcagcaataactagctgcacaaacacctcaaatcctagtgttatgcttggtgctggtcttgtagctaagaaagcttgcgagttgggtcttgaggttaaaccatgggtgaagacaagccttgcccctggatcaggagttgtcacgaagtacttgcttcagagtggtcttcaagaatacctcaaccagcaaggattccatatcgttggctatggctgtaccacttgcattggaaactctggtgatctcgatgaatctgtatcaactgccattacagaaaatgatgttgttgctgctgctgttttgtcgggtaaccgtaacttcgagggtcgtgtgcaccctttaactcgggctaactatcttgcttcgccacctcttgttgttgcttatgcacttgccggaactgttgatattgattttgagaaagagcccattggatttggaaaggatggcaaggaagtctacttcagggatatatggccctcgacagaagaaattgcgcaggttgtccaatccagtgtgctgcctgacatgttcaagggcacctatgaggctatcacaaaaggcaacccaatgtggaaccagctaactgtcccagaagcatcactctactcatgggattccaaatccacttacattcatgagcccccttactttaaggacatgaccatgtccccacctggcccctctacagtgaaagatgcctactgcttgctgaacttcggggacagcattactacagatcacatttcacctgcaggaagcatacacaaagacagtcctgctgccaagtatttgatggagcgtggtgtggaccggaaggacttcaactcatatggtagccgtcgtggtaatgatgaagtaatggcaaggggaacgtttgcaaacattaggatcgtgaacaagtttttgaacggagaagttggacccaagaccattcatgttcctactggggagaagctttctgtttttgatgcggccatgagatacaaatctgagggccatgctactataatcctcgctggcgctgagtatggaagcggcagttctcgtgattgggctgctaagggtccgatgctcctggagttaaagctgtaattgccaagagctttgagcgtatccacagaagcaacttggtggggatgggaatcattcctctgtgcttcaaagctggtgaggatgctgattcacttggcctcactggacatgagcggtacagcatcgatctccctaccaacctcagtgagatccgtcccggccaggatgtgactgttactaccgacaatgggaaatctttcacttgcatcgttcgctttgacactgaggtggagctggcgtacttcaaccatggaggcatcctcccttatgtcatccgcaacttggcagctgcgcataactgaggcaagatcacacaccgtttgacccacaatggcagtggcaggctccatgttcccagggctagcgacctggttctcaatgtagtgacatttgtgatggatctaggggtctctttgtcgattcagcccataaataaagtgtgaaataaaagccgcaggtggaggcaggaacctgctgattgagggaacagttttgcctgtgtttggttacatgaaatatctgtttcacagatgtgtagagcatggtgtaaatgcttcctgtgctgttactttcgtttcgacaaattgattatgctgtagcccttcaggtttcatctagacatttcggtgtcttggagcacattcttttttctgataaaaaaagggaaacaaaggcaaaggagaaccgaaaaacgacgaaacgggg

SEQ ID NO: 11183 - DNA, 2228 bp, Zea Mays
aagcatagatccctttcaaattccatcgtcaccaaaccaaaccagttttgggtgagtggtcagggaacgagcgaagtttgatgtattgagttcaaatgcgggtgactgcgaggcgcaacgtttttcatgtgacttgtagttgtctattgggttttctcgggtattatttttttcctgttcttttggcatgattttgggtgttctaaaaacctccttagcgccagctctcattctacctcttaaaaaatcggcagtgatgagcccacccacggtgtacaagcgagttgatgcaccaactaacgagttgaactgaatactcctacttgcatagtagttctcaatcacaaagccatgggcgaaaattaattaaattaacaactcggtaaaactcaaattgtcttgccactgtaaatggttcggatatgaatcgcatgatgcgtgagcccgtacgtgctgatattatatatacagagaagtaggaaggatcccaagcatccctcccgatcagatccctcgacaatggcactccaggcagcctacgagtacctgcagcaggccgtcggccatggcgcgtggtcgtccacgcagacgctgacgctgctgctcatcgccgtacccaccgtactactgctgctagcgtccctcgccaagagcacgtcgtcgtccggtaggggcaagccgccgctccctccctcgccgccgggcaccctccccatcgtggggcacctacaccacatcgggccccagacccacatcttcgcgtcccggccgtggtccatggcctcccacatcctccgctacaacacctgcgacgtggccttctcgccgctcggcgaatactggcagcagaccaggaagctgatgaacacgcacctgctcagcaacaagaaggtctactccttccgccatggccgcgaggaagaggtgtgcctcgtcgtggacaacctccgcgaggcggccgccaagtcgccgtcgacggccgtggacatgagcgaggtgctggcggcgtacaccaacgacgtggtgagccggtcggtgctgggctcgacgcaccggaagaaaggccggaacacgctgttcagggagatgaccatgaccaacgtggacctcctggtggggttcaacctggagtactacatcccgcggtggccgctgacggacctgctcttcaggctcgtgtgctggaaggtcacgcgccacctcaagcgctgggacgccctgctggaggaggtgatccacgagcacgtggagatgaggaagctgtccggcgacaaggagaaggagtcggacgacttcatcgacatcttcctctccagatacgaggagtacggcttcaccatggataacgtcaagtccctcctcatgaacgtgttcgaggcagccatcgagacctcatatctggtgctggagtccgccatggccgagctcatgaaccacaggcgcgtcatgaagaagctgcaagcggaggtacgggcgtacggagcggagaagaagctggacatgatcagggaggacgacctgagcagcctgccgtacctaaaggcgtccatgaaggaagcgctgcggctgcacccaccggggcccctgctgctgccgcactactccaccgccgactgccagatcgacgggtaccacatccccgccaacacgcgcgtcctcgtgaacggctgggccatcggcagagacccggcggtctgggagaagcccgaggagttcatgccggagaggttcatgcgggacggctgggacaagtccaacagctacagcggccaggacttcaggtacctgccgttcgggtctgggcgccggatctgccccggggccaacttcgcgctcgcgaccatggagatcatgctcgccaacctcatgtaccatttcgactgggaggtccccaatgagaaggaagacggtggcgggaaggtgagcatggacgagacgttcgggctgatgcttcgcaggaacgagccgctctaccttgttcctagggccgtctagctagctagttactgtgccgccgccgcctcctatccaagaatgcatgagtcttagacgtgtggcagtaataattgcgtggggtgtagtaaaataataagcacgtttgttgagttgtaatggattcacattatgtgcattcgagacaggtccaaggaattgtatctctaaagtgaaaatttcctttttcaccacgatgaatgcatgtcatactctctcaccggtatacacagaag

SEQ ID NO: 11184 - DNA, 80 bp, Zea Mays
cgcctaggcagacgtgccctccgccagaaggcttcgggcgcaacttgcattcaaaaactcgatggttcgcgggattctgc

SEQ ID NO: 11185 - DNA, 76 bp, Zea Mays
tctattaccttagtagattcatcttatcttaaaaagattttatgtcatcctaatagatctaactaacctcaaaaga

SEQ ID NO: 11186 - DNA, 70 bp, Zea Mays
taagattttctaccattagtgctacctgtagtcaatcacatacatcatcattctagactcgaccgcttct

SEQ ID NO: 11187 - DNA, 395 bp, Zea Mays
ctttggcaataccctgatgcaatactgtgtagcccatatcgtaaggctgcattgatcactgtcgggggacttgcagctggtgcaactgtcggatctgcagtggaaaatttcctgcaggttgatatcgtgccctttctaggcatccactcccccgccgtcgttgtcagtgaatttattctgttctcccagttgttggtatcactgtttgttaggtaggatctgaaatcaagctgtcatcctgatcatggcatgtaagtaactgaaatggttcgtgttcaaacttcaaagggtcagggaaatgcttattttccgctcaaggtgcaagcagctgtgtatagcaaacaatacatggacatctctgtcccttataaagatcacttgtatctagttcagaa

SEQ ID NO: 11188 - DNA, 434 bp, Zea Mays
cgcatcgaaaattgaaaaccctataatcctccccaaaggcccaaacctatcgcccgtacgagactgcgccgccgttgccgtctcctcctccgtcccatcactctctgctcgcgcactctcacctgcccgcgccgtcttcgaccgccaccaagatgaacaaggagaggctcatgaagatggccggcgccgtccgcaccggcggcaagggcaccatgcgcaggaagaagaaggctgtacacaagacggtcaccacggacgacaagaggctgcagggcactctcaagagagtaggggtcaacaccatccctgcaatcgaggaggtgaacatattcaaggacgatctcgtcatccagttcttgaaccccaaagtgcaagcttccatcgcagcaaacacatgggtggtcagtggatctccacagacgaaaagattttgc

SEQ ID NO: 11189 - DNA, 726 bp, Zea Mays
gcgaaggccaataacatcttccaacaaggatctactcaacagtaccgcgagctgtttggcaaaaccacatttgtgaagaggcatcttactggcgagtttgagaagaaatatgagcccaccattggtgttgaagttcaccctctggattttagcactaactgtggcaaaattcgcttctattgctgggacactgctgggcaagaaaagttcggtggcctcagggatggctactacattcatggtcagtgtgccatcattatgtttgatgtcacttcgaggctgacatacaagaatgttccaacatggcacagggacctgtgcagggtgtgtgagaacatccccatcgttctctgcggaaacaaggttgatgtaaagaacaggcaggtcaaagccaagcaagttacattccacaggaagaagaacttgcagtactatgagatttctgccaagagcaattacaactttgagaagcccttcctttacctcgcaaggaagctggcaggggatcagaaccttcactttgtcgaagccgttgctctgaagccaccggaagtgcagattgatatggccatgcagcagcagcatgaagctgagcttgcagctgccgctgcgcaacccctccctgatgacgatgatgacctgatcgaatagatgttccatggcccttatctctttcttcattctccatttccctcccgtcggcttctgtccgttgctctgacggga

SEQ ID NO: 11190 - DNA, 1356 bp, Zea Mays
gggagtccaattttgcagaattttcttcttttgtccttggttgtttaggttcttacggtgccacggagttggcaactgcaaggagtgatattgtggtacaacactagttctaattgaagtaataaggcgggggtgaaactgtctgctaccattgcttccatggcaactaatgagaacctcccgccaaatgtcatcaagcaattggctaaagaactgaagaaccttgatgagtcacctccagaagggattaatgtgattgtcaatgatgatgacttcactactatttttgctgacattgaaggccctgctggaactccatatgagaacggagtattcaggatgaagctattattgtcacgcgatttccctcaatctcccccaaaagggttcttcttgactaaaattttccatcctaacatagctactagtggtgagatatgtgtaaacacactgaagaaggattggaatcctggccttggattaagacatgttcttctggttgtgagatgccttctgattgaaccatttcctgaatctgcacttaatgaacaagctgggaagatgttacttgaaaattatgaggaatatgcacgacatgcaaggttatacactggcatccatgcccttaaacctaagaatacgtccaagaccggagctatatctgagtcaaccacagctctgaatgtcgacaagtcaagtactgcctctagcaagaacacaccatcgatgccaccggcggtatctacctccagtgcatccagagcatttggtacgagtttgcaggatcagaaccccactgtttctgatcctgctgtaggagctgcggcggcacgaaagaaggatggcccaatggcttccaaagttcctgtggataagaaaaggctggatgcgcggaagaagagcttgaagagattataggcggaacgtcctgggaagaagagagagggtttagagttcagaatttttatcggaaactcagcagatgcttatttaagctgggagacaaacaattaggggaggagaggcatctgatgacctggctttcgggagaagggggtccggggcggggccaaaggtgaataatgtgaagcaactgagtccttcgggacaactgtatgtgcaatgcccaatcatttggaagaacacttgcctatttctttttgttgtctctccttgtctgcattcaatcagcatgcatgcctgccatttgcgagcaatccgctgccatcgttcttcatggagtacacaagctatgaattgaaaagatgtgaccttcaaaatttctttaacttgtggcgcagagatcaattaaactaacagggcatttggatctcttcattttagatgaattgaaat

SEQ ID NO: 11191 - DNA, 1439 bp, Zea Mays
ccgcccacgtctccagagccatctcggccgtccgatcctcccgcgccttcctcgtatgcgccgccctcctctatataaagtacgcgttggcacgaagcgagcagataagatcgagcagcgagagacgggcaggggagagggaaaaaaaaatctaaccctagcatccgcagcgctagggttcgggggttgcgatggcggcggcggcgagacagcgggggacggtgaagtggttcaacgacaccaagggcttcgggttcatctcccccgaggacggcagcgaagatctcttcgtgcaccagtcgtcgatcaagtcggagggcttccgctcgctcgcggagggcgaggaggtggagttttccgtctcggagggtgacgacggccgcactaaggccgtcgacgtgaccggccccgacggatccttcgtcaggggcggcggaggcggaggaggaggcggcggcggctacggcggcggcggctacggaggaggaggcggcggcggcggtggctgcttcaagtgtggcgagcctggccacatggccagggactgccccagcggtggcggcggtggcggagggaggttcggcggcggcggcgggggtggcggcgaccgctcctgctacaactgcggcgaggccggccacatcgcccgcgactgccccacgtgaggtgtgtccgcgtccgtccgtccagccagatcagatcggatcgctccaccacctgctggtctgatggcgccgcccccttctagatctcgcttaaaaaacacccccctctcgctgtgtgtcggagtaccgctttagttttgccgatccgggcacgagtgcccgctgcctctttcctctcatgcgtaagaggatcccgtccgccgttttcagatttcgttcggttcgtagaagaactctcaagttaagttaagttatcatggtgtgtgcttggtcgttgttcgtcgtcgtcgttaaggttttaagagatgatttggtcctgtgttgccgaggggaagtcgaatctgcttttttctttttttgtggtttgttccaccagactgaggaaggagatgagatgattattctcccagattataatcctgcctgcttgtgcttgatttggttaccacatatgccttcaccactaccgctcgatttgatttgattatgcgcaacgcacgggcggttcttgtgatattgcggtgggtggttggttagatcacacggcccgttgtttggtacggaatggaattgctggcacctaccagtagtacacaactacacgtctgcctgttgttttgttgtggatggatgtggtgatgatgataatgatgatggcatgatgctttccagcgagtgatttgtttctgtgcaacacagagaaaggaggaaagcttttctgctgctgcggggcgtgggaatgtgggtgacactggtgtcagtcccccctgctgc

SEQ ID NO: 11192 - DNA, 1206 bp, Zea Mays
tggatctttatgttgtgcagtcctgttgaaatggcgatggatggaagctgcaaatccttttgaatattgtgatgtggttaccacaaccacgcacaagtccctcagagggccaagggctggcatgatcttctacaggaaaggccctaagccccccaagaagggccagcctgagggtgctgtttatgattacgaagacaagatcaactttgcagtgttcccatctctccaaggtggccctcacaaccaccagattgctgcacttgctgttgctctacagcaaactatgtcgcctggcttcaaggcctatgcaaagcaagtgaaggccaatgctgttgcaattggaaactatctcatgagcaagggctacaagatggtgactgatggaactgagaaccaccttgttctctgggatctccgcccccttggcttgactggaaacaaggtcgaaaagctatgtgatctttgccacatcacattgaacaagaatgctgtcttcggtgacagcagtgcattgtctccgggtggtgtccgcattggcgcgccagcaatgacctcgaggggtctactggagaaggatttcgagcagattggggagttcctccaccaggcagtgaccatctgcctgaacatccagaaggagtacggcaagctcctcaaggacttcaacaagggcctggtgaacaacaaggacatcgagaacctcaaggtccaggtggagaagtttgccgactccttcgacatgcctgggttcacgcttgagagcatgaaatacaaggagtagatatgcctctttcatgcgcggcaaggtcctcctgtaccgatgtctttccttgtggtggcgcagggtgccatggcactgcattgccgccacacttacgatgatgatgatgggttatggattttgtctacaatgtcagcaggataggctcacaattgccccctgccctccggtttggtcgcctctcaggttttcatttggtagttgttcgcagggaaccatatgagaattgcaatgtcaatcaggtgtttgccaataataattgggtggtttctgctcttgctctgatcattaccatgcgttttttattctgttggtgggttggtcgattgattatctcctgcagtcctgctggcactgccggtggtcgtttgattatcatgtatgaatcttcctggagactgttgctggattaacatatcgcctgc

SEQ ID NO: 11193 - DNA, 780 bp, Zea Mays
ctgaatcgaagcacacgcactcagttggtgaaggtttcttgaggctgagaacatggtgctgaagacggaactttgccgcttcagcggccagaagatttatcctgggaaaggcattagatttatccgtgctgattctcaggtcttcctttttgccaactcgaaatgcaagcgctacttccacaaccgcctgaagcctgcaaagcttacctggacagcaatgtacaggaagcagcacaagaaggatatccatgctgaagcggtaaagaagaggcgccgcgccaccaagaagccatactccaggtcaattgtgggtgcttccttggaagtaatccagaagaagagagctgagaagccagaggtccgcgatgctgctagagaagctgctcttcgtgagatcaaggagcgcatcaagaagaccaaggatgagaagaaagcgaagaaggcggaggtgagcaagtcccagaagacgcagacaaagggtgcggtccagaagggttccaagggccccaagttgggcggcggtggtgggaagcgctgaaagaacttagtgtcgtttctcgacattgcagtcgttccttagccaaagccactttcgtagaacctgtgttgaatttgcaagacttattcaagcgttgcttgtgcgtgctaaataccatggcaagagaacggatttatatttatgcctgaaaaaaaatgaccgttcatattcttaactcatcttggataagggcttgttttgtttctccagatgtgcttgattgggccgatatgctccatcgt

SEQ ID NO: 11194 - DNA, 582 bp, Zea Mays
tgctggtaatgttactaaagggcgaacgctcagcagccaaagctgtttgtgggcatgatcctcatcctcatcttcgctgaagcgctcgccctatacggtctcatcgtcggcatcatcctctcatcccgcgccggccagtctcgtgcggactaggcacgttccacatgtctccgccacctggtcgtaaccgggtcgtgttttgtatcggtgatgagccgacaagctggagcacttaattttttttatgctgtctagttttttgaacttgcgttgagtcgagaaaacaaaatagaacttgggtagccgagggggtgaccttttttcccttgtgccattcttttccctgtcgtggtgggtggtgggctgtggctgatgcttctttctgcacacttttttttgcttgggctcggggcgttggtgtaatttggtgaataagcgagtgcgtccagtgcaatgggagctcaggactcttctgttcaaaatccgccttgtttcgtcgttgtcttgttctgtgttctatatgaatattgtcgtgtgggaaatacatgcgtggctcatgaactagtgcttgtttcttctagc

SEQ ID NO: 11195 - DNA, 1836 bp, Zea Mays
ctgtggaatttgatgtactaatggagtctaagggtggcaagaagtctagcagtagtcgttccatgatgtatgaagctccccttggctacagcattgaggacgttcgacctgccggaggcgcgaagaagttccagtctgctgcttactccaactgcgcaaagaagccatcctgatatcccttttggcttcctcgttctagtagtttaggatttcttttctgacacttcgattcttaccaatccccctggcctgctgctttcctgacaatcgaccagttccccagtcttgctccctgcagtcctccctcctccatctccagcgttgtgttctgactcacctgcaccaatggctgttctttctgctgctggtgctcccccggcctcagctatcgggtttgagggctatgagaagcgccttgagatcacattctctgaggcacctgtctttgtggacccccatggcagcggtttgcgtgccctctccaggtcccagattgactctgttctggatcttgcacggtgcacgatcgtgtccgagctctccaacaaggattttgactcctatgttctctccgagtcaagcttgttcatctatcctctgaagattgtcatcaagacctgtggcactaccaagctcctgctcacaattccaaggatcctagagcttgctgaagagctgtctatgcctcttgctgctgtgaagtactcccgcgggacgttcatctttcctggcgcacagccagccccccaccggagcttctccgaggaagttgctgtacttaaccgatactttgggggcctgaagtctggtggcaatgcttatgtgattggagatgcagcaagaccaggacagaagtggcacatctactacgccactgagtacccagagcaaccaatggtcaaccttgagatgtgcatgactggtctggacacgaagaaagcttcagtcttcttcaagactaatgctgatggcaacacaacatgtgccaaggaaatgacgaagctctctggtatctctgaaattatccctgagatggagatctgtgattttgacttcgaaccctgcggctactccatgaatgcaatccatggctctgcgttctccacgatccatgtgacgcctgaggatgggttcagctacgccagttatgaggttatgggcttggatgccactgccctgtcttacggtgaccttgtcaagagggtccttgggtgcttcggcccctcggaattttctgtcgccgtgaccatcttcggcgggcggggccaagctgggacatggggaaaggaacttggtgcggaggcttatgactgcaacaacatggtcgagcaggagctgcctggaggtgggatcctcatctaccagagcttctgtgctgctgaagacgccgttgctagctcgcccaaatccgttcttcgctgctttgatggcgagaatgcagcaccttttgcgaaggactgcaagctggctaatcttgtctgcttggaggaagttggatgctatcgaggagaaggatggagtgcttgatgagtaagacgggtttctggtgtcgatttgcttctgagtttttttctttttatatcgttgcgatctcgtggttgtcgtttggttagcagccaagccaggctattagtacgaagaatgtcgtctataaacatgtgttcctacgttgccacatgctgagtcaatctgtatacagctagctctaggtggtcagctgcgtctaccacaatgagcatacatgtatggataaatcttctgtgaaagcattcgatgaataagggttgttttcgtgattcgttttctgaagtctgaaatgttattatttattctctt

SEQ ID NO: 11196 - DNA, 698 bp, Zea Mays
ctttcctgcccgctgttcccagcaatggcagcaaggtgtagcctttcctcgtcatccctgtcggtccatggacccctccgccacaataaacccagcaagagactcgctccatgcctgccatcggcgccaagaccaggagccgctgctctgagagcgcgtgctgcgaaacttcctccaggggttgaagcgcccagggtgcagccgaagctgagcgagcccttcttggggttcacccagaccgcggagatttggaactccagggcctgcatgatcggcctcatcggcaccttcattgtggagctggtgctgaacaaggggattcttcagatgattggggtggaggtgggcaagggtctggaccttcctctttgaagggtgaccaaatagtaacattatcgtttgatggcgtattatgctggccgaaaaacatgagggtttcacttgcttttgacttggtggctacatatgcatgttcatcaagcatgtccttggatatccggatgttacaacatcaactatgttaatgacttggtggctggccgtttgacagggttaattggtgaacaaaaacgtgtgccttgtgaaacagaggaagataattgatgccaccgtgagattagtactggtttataaggtagtatacatcggtacgaatacgacgaatacacgtggccgacgattttgattctcgtttatga

SEQ ID NO: 11197 - DNA, 201 bp, Zea Mays
cgaggagacactctaaactcaaacaaatacatatattgtcggcattagctcttacccttttcacccatgatgacgaagtgccagaagcgcgcgagcatccaaggactttggctcctttccatggttcttctagcgtcgtcctctcttgtctgtgcaagcatggcggtagatgcgcgtgtaactcgattgaccatattgcta

SEQ ID NO: 11198 - DNA, 767 bp, Zea Mays
ctaatacctaacttttttactggtcgacatttgctttgtgaaaaaatgtctctcctggaatggtttgccaatgaatacaagaagtttggttgctcgctggagtttgtgaccaacaagtctcaggagggatcccagttctgtagaggatttggtggcattggtggcatgttgcgctaccagctggatatccgttcttttgatgagctttctgatgatgacgatgtgtatgaagactctgactagcaatcagccaatctcatgccagggctggcccatggaaggacgcaacagctcgacctcgccatacctacgcaggagcacacgaaaagcaactatccaaggattaatgggcatgggccagcgtcatcctcttcaagaggagcttaagactaagatgattttgagtcacaatcatgggagtaacgtgacaagaagataccctactatatcacaattattccagtaatgcgtcgagaagataccgttgtttaagtgcacaaaccaatacagtgacgtgccaagaagttaccgtattttaaggatgtttaattttcagtattcgtcggggtagtactgtgtcagaaacttatttgtacctaaaaaggccaaatattgccgttgccttggtgctttatgctatgttatcgtcttttgtgagtctgtgtgctaaggttgttgcttaatgctttgtgactcgcaagctgctactcttgcagtttttgcaacgacgaagctatgatatggagtacaattctgtgtcatcatat

SEQ ID NO: 11199 - DNA, 490 bp, Zea Mays
aaccctaccaccaccacggagtggtaaaatggtcatttaactcggagccccagaaagatcttaaaccctagaaagctcttaaaagcccccagggctagcagcggcgacgtatccctaatcccacctccagtctttgggcaccaaatttccggcggcgatggcggcggctgtggcgaggtcagggttccggcgcatgttctccgtctctgccttcgcgccgccgaaggcgcccgccgcgcgccccaaggccgacccatcccccaacctcttcgtctccggcttaagcaagcgtaccacaagtgaaggacttagagaagcctttgcggagtttggtgaagttttgcatgctcgagttgtgaccgatcgtgtcagtgggttttctaagggatttggctttgtaaggtatgctacgaccgaagaggcagccaagggaatagaaggaaaggatggaaagatgcctatagcccctcttgtggtgagactaccacac

SEQ ID NO: 11200 - DNA, 67 bp, Zea Mays
ggcccagtccatccggatgtggtgatcctcgcagaagtccaagaactttctgtcggtgaactgggtg

SEQ ID NO: 11201 - DNA, 1053 bp, Zea Mays
agggggaaaaaaggtgcagttggcgtgatggctgtcaggctgctgcgtctgctcgagcctcgagcggaggcaccactaccgcactagcactggagcaggtcctcgccgtccacaggcgccagttcgtctcccggataagacgataattcgagccgaaaaatatcaccacacagacacacagaggaggcgcctccgcgtcgcccgcgccgtcgaggtggacgcgccttccgccggcgcgccggagccggaggaggcggaggagccgtccgtcgacttcgcgttcgtcagcccgcggctgctgccggacgggacgccggacgtgcactaccggacggcgcgcggcgggcagaagctcagggacatcatgctcgacggctacatcgacctctacgggccctacgataaggttcttctcaactgctcagggggcggcgtgtgcgggacctgcatcgtcgaggtggttgaaggcaaggaaatgctgtccccgaaaactgatgtggaaaaggagttgctcaaaaggaaacccaaaacgtggagattggcgtgccaggcaacggtgggcaacgcagattcgactggacagatgatcattcaacagttgccggagtggaagatacacgagtgggacaagtaggggttactgctttactggtcttgaagagtgctctcgtggccatactatagattacatgcagtggaaatgggaaaaaaaggaataagaagcagctgatcagtggaagagctggtgcagattgattgatgaagcttttcatactccaaacaaacaaacaaaaacctgggcatgttttttcaccatttgtagcaaccgaaaggagcatggatcaattagccccgttctgtaaaccgttcccttatacacaaaaaaaaacaaaggcgacttgttcatgatcatcgaaagacgtgattttttttttgttcgaaaaaacaagactgttagcgttgctatggcctatgtgtggctattggcgcgggaagatgatgttgcagcttccgataggcctttctgggctcagcccaacaggtactactcag

SEQ ID NO: 11202 - DNA, 75 bp, Zea Mays
cttgccttcaacgagctcctgctcagcagtctgcacctgttgaacccctgggtcctctgtggcttgctcatctac

SEQ ID NO: 11203 - DNA, 124 bp, Zea Mays
ctaacaatcatgttgaacaatgtataggttgaaataggaaattacctatgctgaagtaattatagaagacaccatcaaagcaataaactgtttcaggcaactctcccttagcagtgccatcctg

SEQ ID NO: 11204 - DNA, 168 bp, Zea Mays
ttagaagacaatcatatcgagagcacactgccactgcaagtaggaaagctagcgcatcacaatggcggccagaaccagcgtggttgtgctttgcttcgttgtcgcctccgcccttctcgtggcctcgtcatttgctgcccgtactccaacctttgttctcgccatcaa

SEQ ID NO: 11205 - DNA, 640 bp, Zea Mays
tttccaatttgttgatgtttcaaggaatggagttatctgcgtggaggactgacgacgctcgaccgggactatggactgattaacaatatccaccatgacatcggaactcatgtcatccatcaccttttccctcaaatcccacattaccatctcattgaggcgaccgaggcagcaaaaccggttcttggcaagtactacaaagaaccaaagaagtcgggtcctctcccgtggcacctgtttggggtgctagcacaaagcttgaagcaagaccactatgttagcgacaccggagacgtagtgtactaccaaactgactcgaaaacgaacacctctgcacaaaaatctgattgacacagactatagaacgtagcgtattcttcatttttctcaggcgggctgtgcctgaagacctggccagcctcctgagacctctgattggtgtgtgtgtgaccgggttcgtcaattcaagaatgtaaggtggcgaagtattatcatgtatttgagtgagggtataattctttccaatggtcgaagtcggatgctgcttccgatgtaacgaactgtgattctttgggcaagaggtgtactattacagtaaagagtgaaaaaaaagagttagctacatgaaagactttctgag

SEQ ID NO: 11206 - DNA, 54 bp, Zea Mays
gcattttgctacgttcttcatcgatgcgagagccaagatatccgttgccgagag

SEQ ID NO: 11207 - DNA, 1980 bp, Zea Mays
acgagaaatgtgtaatttggtgcttagcgatgccaagcggttgatcggcaggaggttctctgacccgtcagtgcagagtgacatgaagctatggccgttcaaggtcatcccagggcctggtgacaaacccatgattgtagtcaactacaagggcgaggagaagcagtttgctgctgaggagatctcctccatggtcctcatcaagatgaaggagattgctgaagcctaccttggttccaccatcaagaacgcagtggtgacagtgccggcctatttcaacgactcgcagaggcaggccaccaaggacgccggtgtcattgcgggcctcaatgtgatgcgtatcatcaacgagcccactgctgctgctattgcctacggtcttgacaagaaggccaccagctccggcgagaagaacgtgctcatcttcgaccttggtggtggcacgtttgatgtgtcgctcctcaccatcgaggagggcatcttcgaggtgaaggccactgcgggcgacactcaccttggcggcgaggacttcgacaatcgcatggtgaaccacttcgtccaagagttcaagcgcaagaataagaaggacataagcggcaacccccgtgcactgcgccggctgcgcacggcgtgcgagcgcgccaagcgcacgctgtcatcgactgcccagacgaccattgagatcgactccctgttcgagggcatcgatttctactccacgatcaccagggctcgcttcgaggagctcaatatggacttgttccggaagtgcatggaacctgtggagaagtgcttgcgcgacgccaagatggacaagagcagcgtgcacgacgtcgtgctcgtcggtggctccacccgcatccccaaggtgcagcagctgctgcaggacttcttcaacggaaaggaattgtgcaagagcatcaaccccgacgaggctgtggcgtacggcgccgctgtccaggctgccatcctcagcggcgagggcaacgaaaaggtacaagatctgctcctgctcgacgtcacgccactgtctctcggcctggagactgcaggtggcgtcatgacggtgctgatcccgaggaacaccaccatcccgaccaagaaggagcaggtcttctccacgtactccgacaaccagccgggcgtcctgatccaggtgtacgagggtgagcgcgcgaggaccaaggacaacaacctcctcggcaagttcgaactctccggcatccctcctgctccccgcggcgtgccccagatcacggttaccttcgacatcgatgccaacggcatcctcaacgtctctgccgaggacaagaccaccggccagaagaacaagatcacgatcaccaacgacaagggccggcttagcaaggaggagatcgagaagatggtgcaggaggctgagaagtacaaggcagaggacgaggaggtcaagaagaaggtggacgccaagaacgcgctcgagaattatgcctacaacatgaggaacaccatcaaggacgacaagatcgcctccaagctccccgctgaggacaagaagaagatcgaagatgccgttgacggcgccatcagctggctggacagcaaccagctggctgaggtggaggagttcgaagacaagatgaaggagcttgaggggatctgcaaccccatcatcgcgaagatgtaccagggcgagggcgcgggcatgggcgctgctgctggcatggatgaggatgccccgtctggtgggagcggtgctggtcccaagatcgaggaggtggattaagttggttagtgttcgaggtttggtttggtgaggtgtgaagtgcctgaactctgatggttgtttgtgaggtgtggtcgcaatagctgcggcctgtggtgaacttctcagaaataaataagttttcgttcctaatttgttttttttcaattcatgtgttggtcgccttgtttcgtatcgttgcttttcatgttaaacaggtactcttgtcatgcaag

SEQ ID NO: 11208 - DNA, 68 bp, Zea Mays
tcggatcgccgtaccttcgcgattatgaagacttggtcactgacctacaacctaagtcaggatgtgaa

SEQ ID NO: 11209 - DNA, 432 bp, Zea Mays
ggaagaagaaggacaatgacttctggtacgatgtttgtggatgggtgatccttggcgccggcattgttgcttgggttggattggcaagagcaagcatgcctcccccgacgccaccagccaggtgagaactgatcgagtgccaagaacgctttgcaaatgatggcatgcctatattaaggtgtcccagaaccttctaggtgctagtgttgtatggagaggagagaggtgtttccatacggtttgctcaaattttcatgcttgttcttttcgagcctcatgtgctgctggatagttttgtactttgcttaccttgataccgttttgaggcaaaaaacatacagtgttgcgactttttgcgttctctatgaatactgaatgttctcaaatggtgccatacataaagtggacatgctgttcaacaccgcaaataaa

SEQ ID NO: 11210 - DNA, 1015 bp, Zea Mays
cacatcctgcttactgcccacaagaaagaagctagggaaacccgggggatcggaggactgaggagaggcagaaaacagaaggcccggctgcggctgcggctgcggctgcctttggtttcgtcgtcgtctccgcctgttttcccctctttccatggcaggctgatgctcttcaacacacacagtccactgtcgctcctcagttataagtagctagggcatctggctgctggaaaatcaagcacgcatccaccacacacacagctagctagcagatcgtttcgagtgaagatccaaagaggtagagagatggaaaggatgagttcgtcgctgcagtactgggtggaggagcacaagctctcaaccatcggagccgtgtgggcgacggcggtgggcgcgtcggtggcgtacagccggcggcgggcgccggcgcgggcgacgggcatgcgcctcatccacgccaggatgcacgcgcaggcgctcacgctcgccgtcctcgggggagccgcgctcgcgcaccactaccacggcaagagcaccaacgccgggaagaggcagcagcaggaggacctggactacggcttctactcgcagctgccgccggccaccgacgccgacggcaacgagaacgagcgctggagctggtagagcatgctgcatcgggacaagaacaagacagcagcgagaagaaagaaaaaacaataaattagtagcaataattggtgggtggtttggcatttggcaatgatgcgtgacgtggcgcctgcaggctttcttggtcctaatcctaatcctaatcctaatcccaatccatccagctaagacgtccacgcccgtggttttgtcctgttgatttgccaccggagacgacgatgcagcgcttgctctttgatttccatggcttattatcgatcagcctccgattcttctcctgcactactactacttgtaccatttcatctattgattgaatgaatggtcacgatgatgacgataattatgttttaaaaaaaaaaaa

SEQ ID NO: 11211 - DNA, 68 bp, Zea Mays
aagagaagataataggataaataaataaataaataaataaataaacttatatgctagagttttgggga

SEQ ID NO: 11212 - DNA, 2385 bp, Zea Mays
tggccgcatcctgttgcctcgggacgccatctctcaaaacggttccgtggaggcagagtttttcacagagtatggggatgcaagtcgatacaagattcaggaagtcattggtaaaggaagctacggggtggtctgctccgctgtagatgtccacactggagagaaagtagcgatcaagaagatacatgacatctttgagcacatatctgatgctgcccggattctccgtgagatcaagcttctgagactcctaagacatccagatattgttgagatcaaacatattatgttgcctccatcaagacgggaattcaaagatatttatgttgtttttgaacttatggagtctgatcttcaccaagttatcaaggctaatgatgacctgacaaaggaacattatcagttctttctctaccaactgatccgtgctctgaaatacatccacacagctaacgtttatcaccgggacctgaagccaaagaatatattagcaaattctaactgcaaactgaaaatttgtgattttggactagcacgagttgcattcaatgataccccaacaacgatcttctggacagattatgttgcaacaagatggtacagagctccagagctctgtggatccttcttttcaaagtatacaccggccattgacatttggagcattggatgcatctttgctgaggtgttaacagggaaacctttgtttcctggtaaaaatgttgtccatcagttagacttaatgactgaccttctaggcacgccatcgatggatacgatttctcgggtccggaatgagaaagcaaggaggtatctaagtagcatgagaaagaaagagacaatttcgttctcacaaaagtttccgaatgcagatcctttagccttggatcttttgcaaaggcttttagcatttgatccgaaagaccgtccaactgcagaacaggcattggctcatccatactttaaagggctagccaaggttgagagagagccatcttgtcaaccaatcacaaagatggagtttgagtttgaaaggagaagagtgacaaaagaagacattagggagctgatattccgtgagatattggaatatcatccacaactgctcaaagactatatcaatggcacggagaggacaacctttctgtacccaagtgctgtcgaccaatttaggaagcaatttgctcatcttgaagaaaatagtggaaacggacctgtgattccaatggaaagaaaacatacttctcttcctaggtctactattgttcactcatctccaattcctgtcaaggaacaaccccgtatcggcccatgtagggaaaggccttcatctgatgagtcctacaggaatcctcgggagacagaacaatattccggcaatctccccagaacgtcacaggctccacaaagagtgccaacagcgagaccaggaagggttgttggtccagtaatgccttaccaaaatggagacaccaaagacccctacgacacacgaaggttggcaatgagctcaggatatcctccccaacaaatcccacaaacgtttggttattatcagacacatggtaaaccagcttgctgcgagccatcacaggctgaaaggtacacgctgcatcagcaggctgcctatgcctgcgcaaaccgtacagccgcgtctgatgttgctctggacatgagagcacccccttttcagcatctatcggcagggcagagaagtgactcttgtgataggctgacagcagagacaaacttgtacacgagatcaaccaacggcatcgctgccactgcagcaggagtggcagcaactactcacagaaaggtcggcgttgttccgtttggcatgtcaaacatgtattagtgactggatcatggccgaatcatggtgaatcctctgtgcggttgatgggtctatgctgccttcaggtggctaaacaccgacaacttgaagcggccaatcaaacctttggctggatgctgcaagtttagagtgcagtagacagtgttttttctgtgtggtcaggaaaagaggaacaccgccggcggcatgaagcctgccaaaaagtttgtatctgcctgtgcctgagaagtgtgcccttggttgcacactgagaaggggtatagtcggcagtccggcggcatgtaatctgggcaatttaggcgccaatttcttttctagagcgaggaggcagaagggaaaggaaggaacattaacgttttaaatgttgtatagagacgtttctcatgcatcaatgtgctacatcagaattacttcagaaagatatgagatacagcaaaaaaaactgtatggcatatgcatgtttttagatctatcgtgaactagctccaaaaacatgctgcccattaatcttgaactatattacgtgc

SEQ ID NO: 11213 - DNA, 377 bp, Zea Mays
agaaggcggccaaagtcggtagtgcctcacaggagtctgtaatcatgcttttcacttccactgcatcagcaggtggcttaagactcgtcaagtgtgcccattagataacagtgagtgggagttccagaaatatggccactagttcctgggcaccctcatgtgatgttggggcttacttctagtgactgctaccactcgagtgtatttttttctgccaaacagctccatcttttactgctttggatgcttgcatgtatcacaggtcaattatcactagtagtacgtccacctgggactgtatttggattgttcgttgagaggatagtagttccattttataaatgttatgtggattttcataaacataaaaaatagga

SEQ ID NO: 11214 - DNA, 85 bp, Zea Mays
cgagcccggcacggtagaataagcgggcgggcttgaacaggaaactaggcacggcgggctagcccggcacggcccgtttacctct

SEQ ID NO: 11215 - DNA, 970 bp, Zea Mays
gtgggatagcagtgagatggtccccgaggcattcagtgcccagatgagcagaagcttttggaagccgccatggcgtatgtctcgggcaaccccatcatgacggatgatgaattcgatcaactaaagctgagactaaagaaagaaggaagcgacattgtacaggaaggtccaagatgcagcctacggagtcgaaaggtctacagtgacttgactgttgactacttgaagatgttgctcctaaatgttcccgcagctgttgtagctctggcactattcttctttttggatgatttcacgggatttgaaatcacatatcttcttgagttgccggagcctttcagtttcatcttcacatggttcgccgcactgcctttaatattttgggtagcgcaggcgatcactaatgtcatagtgaaggacttcctgatcttgaagggtccgtgtccaaactgcgggaatgaaaacctctccttcttcggtaccatactgtcagtgcctagcggtggctcaaaaaacagcgtgaaatgtgcaagttgtggcactgagttggagtacgactcttcaacccgattgatcacactcccagaaccggctgaggctaaataagtgatggcgtggtttcggaaagacggcccggccggcccgcagattcttgatcgacgacagtacgaagcaagactgttcttggatcgggtggcaatcgtggagtgatgtatgtttgctgtgctagtctgtgtgtatatatatttgaacaagtttagacacctgtattatatagatctaatgaaatgggtatatgtatgtgcatagagtgtacaaagaaaaatttaataagccgagttattgtatgttttttctcctcctatatattgctgttacctagtcggctactacaaacaatgagggataaacaagcaaataaacaacgatttctcgatggaaacccacattttttgtgtgtgtgcaaata

SEQ ID NO: 11216 - DNA, 809 bp, Zea Mays
ttttttttttcgatcctaaggtccccggcggcccggccggaacaaaacccgttcgatgcgtctccgccgtttcaggacacaatcaagggctagaagccactacaggcccaaattcagcccatacccactctcccatccacgagaccacaagccacaccaaacccgcgttcatcgacggacgagctcgccggcgagagagcgactgagatggaggcggcggcagcggcggccggcgtggagctgggctcctcgaagccccagatcgcgacgcaggcggagatggcggaggcccgggtgccgctcgcctaccgcgatcagtgcgcgcacctcctcatcccgctcaacaagtgccgcgtcgccgagttctacctcccctggaagtgcgagcccgagcgccacgcctacgagaagtgccagtacgagctcgtcatggagcggatgctccagatgcagaagatccgcgaggcgcaggagaccaaggtcaagggcggcgcctccattggcctcatcccggccaccgccaagctcgcctgatacgggtcccagaccgatccgcttgatttaggtctgcctgttggctatagcagcgtccagaggcgttgcgccgtgcaaggatcctcaatgtttgttgtgtgaacagagatacgcgtttgaatttggcataaagttaactgttgtcttctttttcccttcccctctctctctatctccctgcctgatggctatcttcaggtttcaatttgatgatggaataaggaaaggtacttgtcctattaccgatgactggatgacttttttgaaaaaaaaaa

SEQ ID NO: 11217 - DNA, 64 bp, Zea Mays
gtaacatgcaatgcacaatctcgttcccttccaattctggttccacctccctctccgaatcagg

SEQ ID NO: 11218 - DNA, 797 bp, Zea Mays
ggcccgtcagcccacggcacccccgatcccaataagcaccgaaccctatagcccaaaacttcctccacttcacgcccctccgccgccgccgcgtctcctctgcaggtaagaaggtaaggaagagggcgaaatggtgaagcacaacaacgttatccccaacgggcacttcaagaagcactggcagaactatgtcaagacatggttcaaccagcccgcccgcaagcagaggcgccgcatcgctcgtcaaaagaaggctgtgaagatattcccacgcccaactgctggccctcttcgccccattgtgcaatgccagactctcaagtacaacatgaagtcgagggctgggagaggatttacccttgaggagctgaaggctgccggcattccaaagaagcttgccccaaccattggcatttctgtggatcaccgccgcaagaacaaatctctcgagggactgcaggccaatgtccagaggcttaagacgtacaaggccaagctggttatcttcccaaggcgtgctcgcaaggccaatgccggcgactctactccggaggagcttgccacggccacccaggtccagggtgactacatgcctattactcgtggtgagaagcgctcagtcgaggttgtgaaggttactgatgagatgaagtcgtttgcggcctacggcaagctccgtcttgagcggatgaacaagaaacaccttggtgcccgccagaagaaggcggctgaggcagagaaggatgaaaagaagtgaagcaggaagctacaaactcactgcttgcagagaagataaa

SEQ ID NO: 11219 - DNA, 639 bp, Zea Mays
gaaaatcttgattctttaatgctgcttacatgtgaggttatgaaaaacatgggcgagatattgaaagctagtggtgctaactattcttcagttgtgaagacaacgatcatgttggctgatctgcaggatttcaataaagtaaacgagatctatggcaaatatttcccggtgccagcacctgcacgatcaacctaccaagtggcggcgctgccactgaatgcccggattgagattgagtgcatcgctgctctctaatcagatcatccaaccactcattaaatcatcaataagcacccaggaatttgtggtagaggtacctgtaccagttcagtgtctgaaaactgcgggtaacaaacctttgtgtcccggataagtgatgtgtgtgtgtgtgtgagtgaacagtgcatctagtaggagaattgttgcgtggtttgttacttggattcttcgctctttagacaagaagtaccatggcatcaacatcaatagcctactgttttcttcccaataagaatgaattggcttccccaacagatcatggatatagtcgtgcgtaatattgttttataatgtagactatattatttatagagtgaatttaaaataggagatgagatgtgacctaggatggataagctg

SEQ ID NO: 11220 - DNA, 977 bp, Zea Mays
gtgcttgtctcgcacgttctctctcgccttccacaggcccccctcccctcgctctcccatctcatcatctcggcggctgcaataaaataaatctcgtgcaggggggagggcgtacgacgacgtggacgcaccgtcaaaggcaccaggctgagcaacccctctctctctccctcttatccccaaggcgaggagcggagcggagaggagggcccttctgcttgtttctccgctttgcaagatgtcgtccccgagcaagcgccgcgagatggaccttatgaagctgatgatgagcgactacaaggtggagatggtgaacgacgggatgcaggaattcttcgtcgaattcaagggcccggccgaaagtatctaccaaggtggtgtctggaaggttcgggtagaactgcctgatgcatacccttacaaatccccgtccatcggcttcatcaacaagatttatcacccgaatgtcgatgagatgtctggctctgtctgtttggatgtcataaaccagacatggagcccaatgtttgatctagtaaatgtttttgaagtattccttccacagctgttgctgtacccaaatccttctgatccattaaatggggaggctgcagcactgatgatgcgtgatcggcctgtttatgaacagaaagtgaaagaatattgtgaaaagtatgctaaaccagaggacgctggcatcaccccggaagacaagtccagtgacgaagagcttagcgatgacgacgacgacgacaacgactccggggacgaagctatacttggcaatcctgatccttagtctgagtaggaaacagcgcagtcagctcatcaatacattgtccaattgcagaaactgcaagtaaacaaaaactgaaaaactaaaaaaaaaacctctggatgtcatgtaaataagtgtactttgtatgttctccaatgttgtttccttcatttgtctgattgaatttctaaaaaacaaa

SEQ ID NO: 11221 - DNA, 1266 bp, Zea Mays
ttccatggcaacttccatgggttgtctcgtcttgctctgccttgtttcttctctccttcccagtgccgtccttggccacccatggggtggcttgttcccacagttctatgaccattcgtgccccaaggcgaaggagattgtgcagtccattgtggcacaggctgtggccaaggagaccaggatggcggcatctttggtcagactgcatttccatgactgctttgtcaagggctgcgatgcttcggtgctgttggacaacagcagcagcatagttagtgagaaagggtccaacccgaacaggaactccctcagggggtttgaggtgatcgaccagattaaggctgctcttgaggctgcctgcccaggcacagtctcctgtgccgacattgttgcccttgcggctcgtgattccaccgccctggttggtggaccatactgggacgtgccacttggccggagagactcgctcggtgcaagcatccagggctccaacaatgacatcccagcccccaacaacacactccccactatcatcaccaagttcaagcgccagggcctcaatgttgttgatgttgtcgccctctcaggtggtcacaccattggtatgtctcggtgcactagtttccggcagaggctatacaaccagacaggcaatggcatggctgacagcacactggatgtatcctacgccgcaaagctgaggcagggatgcccccgctctggtggtgacaacaacctcttccccttggacttcatcacccctgccaagtttgacaatttttactacaagaacctcctggccggcaagggccttctaagctctgatgagattctgttaaccaagagcgctgagacagcggccctcgtgaaggcatatgctgctgatgtcaatctcttcttccagcactttgcacagtctatggtgaatatgggcaacatctcgccactgacagggtcacaaggtgagatcaggaagaactgcaggaggctcaacaatgaccactgagggcactgaagtcgcttgatgtgctgaattgttcgtgatgttggtggcgtattttgtttaaataagtaagcatggctgtgattttatcatattatcgatctttggggttttatttaacacattgtaaaatgtgtatctattaataactcaatgtataagatgtgttcattcttcggttgccatagatctgcttatttgacctgtgatgttttgactcccaaaaccaaaatcacaactcaataaactcatggaatatgtcc

SEQ ID NO: 11222 - DNA, 1496 bp, Zea Mays
cctcgatttgctcaattgaggacggattttgcacggggcacgacctactacgccaaggtgcttgacaaggacgtgccccgtgcgatggaggtcctcgcggacatcctgcagaactccaatctcgaccaggcccgcattgaacgtgagcgcgaagtgatcctacgagagatggaggaggttgagggacagtctgaagaagttatatttgatcatctccatgcaactgcattccaatatacatcccttggcagaccaatcttgggttctgcagataacgtcaagtcaatcaccaaagaggacctcgagaactacattgcaactcattatacagcttctagaatggttatcacagctgcaggcaatgttaaacatgaagacattgttgagcaggcaaagaagttgttcagcaagctatcaactgaccctacaacaacaaacatgttggtctctaagcagccagcctctttcactggttctgaggttcgaatcattgatgatgacatgcccctcgctcaatttgctgttgctttcaatggagcatcatgggtggatcctgattctgttgcactgatggttatgcaaacaatgcttggttcatggaacaagagtgctggtggaggaaagcacatgggttcagagcttgtgcagagggcagcaatcaatgacatcgctgagagtgtaatgggattcaatacgaattacaaggacactggtctttttggtgtctatgctgttgctaaggctgattgcttggatgatttggcttttgcaattatgcatgagatgagcaaattgtcataccgggttacggaagaagatgttatccgtgcacgtaatcagctgaagtcctctatccaactccaccttgatggttcaactgctgttgttgaggacattggccgtcagctgctgacctatggacgaagaattcctacccccgagctttttgcaagaatagatgctgttgatgcaagcactgtgaagcgtgttgcaaaccgcttcatctttgatcaggatgttgctattgctgcgatggggccgatccaaggacttccagactacaactggttcagacgccggacctacatgctccgttactagattaatcagccggtgtacccatgtttaccgtctgcaaaagacaagataaaatttgcctcttttagcgtcagtatattaaggcctcagcactgcacattacgtgctgcgatggaggaattttttgagaatttgttttatttcttgtcgtgtccaaaatccacaaatctgtcaataatgataggcaggttcgactgacgtggctgacttggttggccaccggatgttttcttacaacgagtcatgaaccataccgtcccatcttttgttggaagattttactttggcaaataattttgtggcacgttatatgtaaagatggtacagttttagcttcattgtccacaaatcttgttttgaacgattattgtcgtgtatttagtcaatttcctggcgtt

SEQ ID NO: 11223 - DNA, 765 bp, Zea Mays
aatcttgaactcacgcttcaagattggtgcgagcaccccactacgacaaaaccggatagaccaacccttatcctcgagcccaaactgcggtagcgaaaacgcgagcgctgcggaacaacgatggcgacgatgtctcttgccgcggcgtcacccctcgcctccattccccgcggcatcgccgctcaggctccttgcgcggcattcctgtccatccgcttaggtggcgcgacggcgacgcggttcgctggactggcggtggcctcgcagccagcggagcgtcgcgccgcggcgatggtcgcgatggcgaagagggagcaggagctggaggagatccgggccatgacgacggaacagatggaagaggaggtggtagacctcaagggggagcttttcctgctccgccttaagcgctcggcgcgccaggagttcaagaacagcgagttcagccgcatgcgcaagaggattgctcgtatgctaaccgtgaaaagagagcgggaaattgaacaaggaatcaataaaagattgtctaggaagcttgataggaaatggaagcagagcattgtggtcagaccaccaccatctctaagggggaacaaagaggagtagaaagccgcaaaaagagggcaatgtgcaaaagtcgtttcatgcgagtgttgcaggaaggtcccttcatgatttcaacccttattgcgttgttatgtattccatgtttacattttgctaagcattgctatctgaatctgaatttcagttgttaaaaaacaa

SEQ ID NO: 11224 - DNA, 894 bp, Zea Mays
caacggcccaataggccagaacgcatcactacgtctctgcagaagcttcctagggttttttaggcgtcgcagataagagatcccctcactgcattccctctgagcgccgccactccctgacatcgagaccggctgcccgcccctacggccagcgtgctgtcctcaagttcgcgcagtacactggcgcccatgccatcgctgggaggcacacccctggtaccttcaccaatcagctccagacctctttcagcgagcctcgcctgctcatccttactgacccaaggactgaccatcagccaatcaaggagtctgctctggggaacatcccgaccattgccttctgcgacactgactctcccatgcggtatgtcgatatcggcatcccagccaacaacaaggggaggaacagcattggatgcctgttctggcttttggccaggatggttctgcagatgaggggcactatcctccctgggcacaagtgggaagtcatggttgatctgttcttctacagagacccagaggaagcaaaggagcaggaggaggaagctgctgcggcccctgagtttgctgcagtcactgattaccaaggagctgatcagtggggcggtgaccagtggacctctgatgtggctgcaccacctgttgctcctactggtgctgattggggtgctgcaccagctccggttcctaccggtgatggctgggatcaaactgtggcccctgttcctgtggatggcactgttcctccagtggtcgctcctactggttgggaatcagcagcccagcccactgcccaaggctgggaataggcgttgaggcatcactttgagacgtcttgtgcgggattattccaaagttggatccaatgggagcggtattgcccacctttcc

SEQ ID NO: 11225 - DNA, 58 bp, Zea Mays
ccgatttgggctgcattcccaaacaacccgactctttgacggcgcctcgtggtgcgac

SEQ ID NO: 11226 - DNA, 3511 bp, Zea Mays
cacgggtggaggggccaacggccgaaagcgccgcgcacttccggcgggcaccctcgcggagtcgcgggtgacagcgaaatttcaaatccataccctcccgctgcagacgggtcccacgccgtcaaaatttggacgctcccgctccctcgatcttttgggtttcgttttcccagttcccaccctctcttccaccctgccctgtttccagatttgaccgatccccttcgattcgatttctacacctccagagcactcactctcctggcaaaccccttcgtctcccaaccctagagagcagcagcagctaccgcagcccctgccatggcgccgagctccccgtcacccgccgcgcccacacgcgtctctgggcggaagcgcgccgccaaggccgaggagatccaccagaacaaggaggaggaggaggaggaggaggaggtcgtggcggcgtcctccgccaagcgcagccgcaaggcggcatcttctgggaagaagcccaagtcgccccccaagcaggccaagccggggaggaagaagaagggggatgccgagatgaaggagcccgtggaggacgacgtgtgcgccgaggagcccgacgaggaggagttggccatgggcgaggaggaggccgaggagcaggccatgcgggaggaggtggttgcggtcgcggcggggtcacccgggaagaagagggtggggagaaggaacgccgccgccgccgccggcgaccacgagccggagttcatcggcagccctgttgccgcggacgaggcgcgcagcaactggcccaagcgctacggccgcagcactgccgcaaagaaaccggatgaggaggaagagctcaaggccagatgtcactaccggagcgctaaggtggacaacgtcgtctactgccttggggatgacgtctatgtcaaggctggagaaaacgaggcagattacattggccgcattactgaattttttgaggggactgaccagtgtcactattttacttgccgttggttcttccgagcagaggacacggttatcaattctttggtgtccataagtgtggatggccacaagcatgaccctagacgtgtttttctttctgaggaaaagaacgacaatgtgcttgattgcattatctccaaggtcaagatagtccatgttgatccaaatatggatccaaaagccaaggctcagctgatagagagttgcgacctatactatgacatgtcttactctgttgcatattctacatttgctaatatctcgtctgaaaatgggcagtcagacagtgataccgcttcgggtatttcttctgatgatgtggatctggagacgtcatctagtatgccaacgaggacagcaacccttcttgatctgtattctggctgtgggggcatgtctactggtctttgcttgggtgcagctctttctggcttgaaacttgaaactcgatgggctgttgatttcaacagttttgcgtgccaaagtttaaaatataatcatccacagactgaggtgcgaaatgagaaagccgatgagtttcttgccctccttaaggaatgggcagttctatgcaaaaaatatgtccaagatgtggattcaaatttagcaagctcagaggatcaagcggatgaagacagccctcttgacaaggacgaatttgttgtagagaagcttgtcgggatatgttatggtggcagtgacagggaaaatggcatctattttaaggtccagtgggaaggatacggccctgaggaggatacatgggaaccgattgataacttgagtgactgcccgcagaaaattagagattttgtacaagaagggcacaaaagaaagattctcccactgcctggtgatgttgatgtcatttgtggaggcccaccatgccaaggtatcagtgggtttaatcggtacagaaaccgtgatgagccactcaaagatgagaaaaacaaacaaatggtgactttcatggatattgtggcgtacttgaagcccaagtatgttctcatggaaaatgtggtggacatactcaaatttgcggatggttacctaggaaaatatgctttgagctgccttgttgctatgaagtaccaagcgcggcttggaatgatggtggctggttgctatggtctgccacagttcaggatgcgtgtgttcctctggggtgctctttcttccatggtgctccctaagtatcctctgcccacctatgatgttgtagtacgtggaggagcccctaatgccttttcgcaatgtatggttgcatatgacgagacacaaaaaccatccctgaaaaaagccttgcttcttggcgatgcaatttcagatttaccaaaggttcaaaatcaccagcctaacgatgtgatggagtatggtggttcccccaagaccgaattccagcgctacattcgactcagtcgtaaagacatgttggattggtccttcggtgagggggctggtccagatgaaggcaagctcttggatcaccagcctttacggcttaacaacgatgattatgagcgggttcaacagattcctgtcaagaagggagccaacttccgcgacctaaagggcgtgagggttggagcaaacaatattgttgagtgggatccagaaatcgagcgtgtgaaactttcatctgggaaaccactggttcctgactatgcaatgtcattcatcaagggcaaatcactcaagccgtttgggcgcctgtggtgggacgagacagttcctacagttgtaaccagagcagagcctcacaaccaggttataattcatccgactcaagcaagggtcctcactatccgggagaacgcaaggttacagggcttccccgattactaccgattgtttggcccgatcaaggagaagtacattcaagtcgggaacgcagtggctgtccctgttgcccgggcactgggctactgtctggggcaagcctacctgggtgaatctgaggggagtgaccctctgtaccagctgcctccaagtttcacctctgttggaggacgcactgcggggcaggcgagggcctctcctgttggcacccctgcaggggaggtagttgagcagtaaaaggatgacagatctgagctgagctgggcaacatccagcggcaggagcatttctggttcggttcgattcgggctcacgagcgcattgtgctgattcgcagggtgcactcgagctcgagtgcggagttgttgtaatgtaggttgaggtttcaaaacatccatccatccatcggccccgcctatttgtggatggtgtttctcgtgccattttagttcagctgtattgatgcttcgtcatgtatgtgtattgtaccattcgttcttgttacctactagtaaggcaacatttgatccatgttcaacgcgagcaaaattccatccactttaggtactgagatgctcaagtagttcagtcatcaggtaacatttacaacctattattttgcctggtattatctgaaaacgatttgctgaggatgttttttttttgaaacgcaaactgt

SEQ ID NO: 11227 - DNA, 753 bp, Zea Mays
aaggccaaactactccgcctcttgtttcgccgaaccccaaaccctagcttcgctcgttgcggcggcgagccggcgatggcgaagtctctgcgatccaaacgcgagaagcggcttcggacgttgcgccgggagatagcggagccgttctacgacaagaaggaggccgccaagctcgccgcgcaggccgccgccctagctgctgccccgctcccggtccgcgggcccccgccatcccaggatgccggcagctcccgcgcagctagctcggcctcggctatggatgtggagatgtctgatgcagggaacaacaggtctaagaccttcttgaggccacttggcagcattagcaagaagaaggtgcagcttcatttgaagatcaagaaagacaagagaaaagctaggaagaagggaaagttttcttttaagaagtagaggagtgtatgataaatcatgcagttttgttcccagtttgtaaaacaaacgcactgcactggtggagccatcatcagccacctctctagtcctcctccttcctgctcctcctcctcttgtgttgttcttcttgatgccgctgaagagttagctaataatcagctgcctgctgctcaacgtccagccaagaacatgtcggcgtttggggtgctcgtcaccgcactggtcctgtcgtgcgtcgccggcgccagcatcgccggatacgtgttcagtgttctacaagttcaggctcagggtagggaccgggcaatcccttcctaa

SEQ ID NO: 11228 - DNA, 88 bp, Zea Mays
atgggtaagctttacctcggtcggaccaataccagaaaggctaccacacaattggagtggagagatggcgagagtagcgtgtaccctc

SEQ ID NO: 11229 - DNA, 79 bp, Zea Mays
gtcaagaacatgtaccacaggatgaggcacttggaggatgctgcgatgtgttcgtgagaggtctaggtcgtcatctccc

SEQ ID NO: 11230 - DNA, 298 bp, Zea Mays
actaagccacggcgcgggcaatggactcaatgagcttcggcaatggcctgtgcagatacaggagaatggggagtacagtcccgcgtacagccccccgagagaggacatggcggcaggggaaggagcccacctcccaggagaggatatggcggtggccgtggtgaccatggctctgtcagcctcctggtccgcaacattccattgagatgcaggcctgaggaactacgtgtccctttcgaacggttcggccctgttcgggatgtttacctgccaagagattatcacactgggactgcct

SEQ ID NO: 11231 - DNA, 1693 bp, Zea Mays
actagatagatgctgtcatgctgaggacgaaggcaagcatgttgggcacagcgccatagtatcaaactatcattttgagccgtttcgcgtaccctaaaatcagtggcaacagcgccatagcatcgtcaactccatcaagccgttaccatcaacaacgattgcttgctgccgactgccaagcggggccggtcaatccagaagttggcagcctccaatcgcagcatccctccgagatcgctgccccgtccccctcccccggcttatcccctatcccctcctcccccgctccttccacacaaacctccatgccccttcttcctctcctccccgtcatggcttccaccttctcccccacttccgccgcgagggccctcctcccgggctccacctcccgcccactcttcctcgccgcttcagcttcctcagggcgcattcaaccatccaggaagggactggacttccgccgcggccgattcaccgtctgcaatgtcgccgctcccaccgccgccgaacaggaggcgacggcgtcggccgcgaaggagacccagcgccccgtgtacccgttcgcggccatcgtggggcaggacgagatgaagctctgcctgctgctcaacgtcatcgaccccaagatcggcggcgtcatgatcatgggcgacaggggcacggggaagtccaccaccgtccgctccctcgtcgacctgctcccggacatccgcgtcgtcgtcggcgaccccttcaactccgacccggacgaccccgaggtcatgggccccgaggtccgccagcgggtcctgcagggggacaccggcctccccgtcaccaccgccaagatcaccatggtcgacctgcccctcggcgccaccgaggaccgcgtctgcggcaccattgacatcgagaaggcgctcaccgagggcgtcaaggcgttcgagcccggcctgctcgccaaggccaacaggggcatactgtacgtcgacgaggtcaacctgctggacgaccacctcgtcgacgtgctgctggattccgctgcgtcggggtggaacacggtggagagggagggtatctccatatcccaccctgctcgcttcatcctcatcggctctggtaacccggaggaaggggagctcaggccccagctgctggaccggttcgggatgcacgcgcaggttggtaccgtcagggacgccgagctcagggtgaagatcgtggaggagagggctcgtttcgacagggatccgaagacgttccgtgagtcgtatcatgacgagcaggagaagctccagcagcagatatcatctgcacggagtaaccttggcgctgtgcagattgaccatgacctccgtgtcaagatatccaaggtgtgctctgagttgaacgttgatggactcagaggtgacattgtgactaacagggctgccaaggcgctggctgcgttgaaaggaagggacagcgtcaccgtggaggacattgctactgtcattccaaactgcttgaggcatcggctccgcaaggatccgcttgaatccattgactcgggtttacttgtcattgagaagttttatgaagtctttagctagattgttcttgaggtaaatgttccttagtcacaatttttggcgggaaccctcttgttctgttactttcataatgttctgctgtttaataatatctggagcttgaattggtatctaaaaaa

SEQ ID NO: 11232 - DNA, 822 bp, Zea Mays
tcaatgagggcctatcatcttttcactgtcaaatccaacctctcattctgaatgtactgctgaagaagcatataactggactcagggtcgtgtaatatttgccagtggcagtccatttgaccctgtggagtacgatgggaaggtttttgtacctggacagtcgaacaacgcctacattttccctggatttggcctcggtcttgttatctctggagccatccgtgtccacgaggacatgcttcttgccgcctcggaagcactagctgctcaggccacacaggagaacttcgacaagggatcaatcttcccgcccttcaccaacattagaaagatctctgcgcgcattgccgcagccgtggctgcaaaagcttatgaactcggtttggcgacccgtctgcctcccccaagggacctggtgaaatatgcacagagctgcatgtacactcctgtctaccgtaactaccggtagtgctgctgggatcaattctgcagtaataaaatatgtcgacgcagatgatcctgcaatgttgtagtttattttttcatttgttggccctgctgctgaccacctttgtggctgctagacactgtacctgtctatgcatatatgatactggaacatttggcgcgctgtgggcgtccctgtcatgagatcaattgcagaaataaaatgcaatttagatttgagcaccaaaataaaaatagtaataatacacaagtgaggcaagcatatgttgaatctgatttgcttcaccttcgattagagatgacaatgagtaaatattcaccttcgattagagatgacaatgagtaaatacccgt

SEQ ID NO: 11233 - DNA, 79 bp, Zea Mays
gtctagctcaacttacctgacttaatgcctccttcagccagcgggacacagcgcccgcctcgtccttgacggcagtgag

SEQ ID NO: 11234 - DNA, 78 bp, Zea Mays
cctcgcttctttttttttttttttttttttttttttttttttttttttattttttttttttttttttgttttttgttt

SEQ ID NO: 11235 - DNA, 61 bp, Zea Mays
aaaagatgtacctctgccaggtaccaaactttgggatttgaaatgattaagctgagaccag

SEQ ID NO: 11236 - DNA, 88 bp, Zea Mays
agggatcactgacacaatagaacacaagttccaagcattgataaacacaccaaagctcatcgagctgactatatcaggagccaaatcc

SEQ ID NO: 11237 - DNA, 650 bp, Zea Mays
ggctttatcctagaaatccaatgtccggccacaacacgctgcgagtgtctcggtagcttcttccccattcacattcggccattctccaccgtccaaccaaccaccggcggcggcacaagggaagcgaagaggaatcaacgcgatgtctgcgaccacggcggcggtgcccttctggcgggcggccgggatgacctacatcggctactccaacatctgcgctgcgctggtacggaactgcctcaaggagcccttcaagtccgaggccgcgtcccgcgagaaggtccatttctccatctccaagtggacggatggcaaacaggagaagcccactgtccgcacagaatccgatgaataaagctctggtgccatagtggcatagtccttgctacagatgatttgaagtgttgttgcaagtttccggaacatgctatttagctggcttgattttatagtcaatgctgaataataaatactttttacgacaattgtctttttcgttgctaattgcactcgccctacctgaatcagtcatgtgaacatcatggaatgcttcagttttgtacaaactaaatttgttgtgctgtccgacagattctatgtctggtccttaaaaataaaggaataatgaatgtagtgtttttgaaggccca

SEQ ID NO: 11238 - DNA, 1158 bp, Zea Mays
cgctgtctgactctgagaccgagagcctccagaaacccacgcgacgcgaccgaccaccatggccgcctccgcgctcctcctctcgccgcggctcgtgtctttcccgcctcacccgagcctcgccccactcttcaccaagagaccaccgccctaccccctcggcggcgccggcgcgaggctccgggccgtcggggacgggcccggcgcggggctgccacccgagcaggccacggtctacgacggcgcctacggtccctggaccctggaggactccgacgtgcgcgaggtcctgctgtaccggtcggggctggtgacggctgcggcgtccttcgtggcggcgtcctccgcggcgttcctgccggaagggaaccccgccgcctccgccgtcaccggcgccgccgacctcctgtacgccgccggcgccgcggggctggggctgtcgctggtcctcatccacatctacgtcaccccgataaagcgcttcctccaggcgctgtgggcggccggggcgctcggctccgtcgggacctacctcgtcgccgcccgcccgctggatgagggcctcgtgcagtacgtgctggaccaccccgccgcgctgtggttcgtcggccccacgttcgccgcgctcactggcctcgtcttcaaggaaggtctctgctatgggaaactggaagctggcatcttgacgtttcttatccctgggcttcttcttgggcatttgtctggtttaatggataacagcacaaaggcaggtcttttaggactgtggatgcttcttttcacaatcttcgccgctagaaaattccagcagcccatcaaggatgacgtcggagacaaatctgttttcatgttcaacgctctccctgaagaggaaaagaaggcttggatccagaaactcgagaggcaaaaggggcaagagttgtttgagtagaaaagagtagcttgtcttggtgcagccaatagttcgtccgtgaatgtttgtagctcatgtatatgattatggctccagaaatttgacaaatacacccaaagacatgaagacgagaacacgttccaatagagatgtaattacaaatctgttagatcacaggtaagatgtaactaaataaagcagttttgttgttatagtcgttgacaatattttagtttgttaaacaa

SEQ ID NO: 11239 - DNA, 84 bp, Zea Mays
ttaccgaccaagggtgacctaggaacattcatcaatttgacatgaacacactgagaatggtctgcccacgtgcacggcagaaac

SEQ ID NO: 11240 - DNA, 953 bp, Zea Mays
aacatgccagggcaaaacgcggacccgtgctgtgcgttccacccaatgtcgcgtgcggccactagatttttcctgacgcggtgtctgctcccacttcccctcctctcccccaggtggcggcagcggcggcggggtagcatttgtgctacgagggcttttgcaatggcggcttcggggttcggcggcggcgaggcgttccggctctcggccgcgccgggggccggcttactgaagctgcacaagggcgacatcaccctctggtccgtcgactgcgccaccgacgccatcgttaatgctgctaatgagcgaatgttaggtggcggaggtgttgatggagctgctggaccagagctagtgcaagcatgccggaaagttccagaggtcaaaccaggagtccgttgtcctactggagaagctaggattactcctgcttttgagcttcctgcctctcgggtgattcacactgttggccctatatatgatttggacaagcatcctgaggtgtcattaaagaaggcctatgaaaatagcttgaagcttgctaaggataatggcattcagtacatcgcattccctgctatatcttgtggtgtttatcgttatcctcccaaggaagcatcaaaaatagctgtttctaccgcacaaaaattttcagaggatatcaaagaggtgcattttgttctgttctcggacgacctttacaatatatggcgcgagactgcccagcagttgctatcacagtttgagaaatgaatggtccataggcagtttgctagcactagcagttgcccagcagtcgttgtctagtgttgagatgtgagcgccataggcagtttgcctggtgtaataaaaatgggtgtatcagacaacgtttaaatcttgatgaaaccgtgtattgcacctgtggtataatgctgaatgagtaaagtttggcgataccgagcaaaaaaaaa

SEQ ID NO: 11241 - DNA, 1360 bp, Zea Mays
cagtgttctttcgtagaggagtgaagaggcctatctataactcgacgcgctagggttttccatcaccgccgccgccgacgcatccaaacccaaatcaagccaccaccctctcctcctcctcagcggcgagcaccaccagcaacagcgagacacgatgaggccgatcttgatgaagggccacgagcgcccgctcacgttcctgcgctacaaccgcgacggggacctcctcttctcctgcgccaaggaccacacccccacggtctggtacgccgacaacggcgaccgcctcggcacctaccgcggccacaacggcgctgtctggacctgcgacgtctcccgcgactcggcgcgcctcatcaccggatccgccgaccagaccgccaagctctgggatgtcagcacggggaaggagctcttcagcttccgcttcgacgcgcccgccaggtccgtcgagttcgccatcggggacgcgctcgccgtcgtcaccaccgacaacttcatggaccacgtccccaccgtccaggtcaagcgcatcgccgaggacatcgacgaccagacggaggagtctgcactcgtcatcaccggcatcaagggaaggatcaacagggccgtttgggggccgctcaacaggaccatcatcactgccggagaggatgccaccgttcgcatttgggattcagagactggacaacttctgaaagagtctgacaaggaatccggacatcagaagaccatttcatcattgtcaaaatccctagattggtcacattttattactggctccttggataaatctgccaagctatgggatacaagaacgctgaccctgatcaagacatatgtcacagagagacctgttaatgctgttgacatctctcccactcatgatactgtggttctaggaggtggtcaggatgcaatgaatgtgactatgactgaccgccgtgctggtaaatttgaggctaaattctaccacaagattttgcaagaggaaattggtggtgttaaagggcattttgggccaattaatgctttggcatttaatcctgatgggcggagcttttcaagtggtggtgaagatggatatgtaaggttgcatcattttgattctgactactttagcatcaaaatgtagataaagaacagacgaatcagaggctgtttgatgaccaaccggttcagtttcttggttcagatgttagatgttgctggttggccatggcgcatgtagagcaggctcagatcctaggtttttggtctgcttgtttgatgatgttgctctggataagcagctttttggtctgcttgaggaatttgtacacacttggcaatgaaaagatccttggactgaaaaaagaaa

SEQ ID NO: 11242 - DNA, 50 bp, Zea Mays
cttgacttcttctgcttcattttcaccagaggggctgctctcgattgtct

SEQ ID NO: 11243 - DNA, 492 bp, Zea Mays
gaatttacgatccagaagcacgcacgtgacgtggctgtcagcaagtagcagcttctgtcgcgtctccccctccctgaccgagcgatccagcgagagggagcgagtagcagccgcagccggaggagctcgccgaggccgccgaagacgaccatggggttctgggcgacgacgctcatcttcgtcctcgccggcgtcgccgcatccctcttcacgctcctctgctgcaaccgcgggccctccacaaacctgttccatttgaccttggtgactacagctgtaatttgttgctggatgatgtatgcaatcgtctaccttgctcagatgaagccattgatcaaccccattctgagcggagagtgagcgctgcatctgtattgaacagaacgaaagcgagacctgctgtaccattgttcagtccgtgaactttatattcattttggccccacctgatgaaataaataaataaactgccatgatttttttgaaaaagaa

SEQ ID NO: 11244 - DNA, 765 bp, Zea Mays
gcacacccaactacaatctctgacagaacagtccaaacccccgaactgctacgtctcgctgaaaatatctgcgtacctagaggtgtcggataggattctccgcctataataagtcggctgccaagcgggaaaaaaatctctgtttgtggcgtgcggaaggagtcggagggaaccgaaaactcagggtctcgaatttcctaggagcggaggcgatggctgggaagggaggaaaaggattgctcgccgcgaagacgacggcggccaagtcggcggagaaggacaaggggaagaaggcccccatctcacggtcctcccgcgcgggcctccagtttcctgttggacgaatccaccgtcagctgaagcaaaggactcaggcaaatggccgcgttggtgccactgcagccgtctactccgccgccatcctggagtacttaactgccgaggttctggagctggctgggaacgctagcaaggatctgaaggtgaagcgtatcacccctcgccacctacagttggccattcgcggagacgaggagctggataccctcatcaagggcaccatcgcaggtggaggcgtcatcccgcacatccacaagtccctgatcaacaagtcctccaaggagtgaagactagggaatgcacattgttagtttaaactggacatttctgtgtgctcctctggagtccttgtcgtcgtgtaggttttagttgagctgtcaggttggagtgacccttctcctgtgtaacgcttgcctgacagcttca

SEQ ID NO: 11245 - DNA, 96 bp, Zea Mays
acaacaaagctaggattcctcgattcatacagagcacacaattaatttatttcatccagtattacatctgacaagagctgcttcgagtgagattga

SEQ ID NO: 11246 - DNA, 89 bp, Zea Mays
gatccggaagtccaccaccttgggttcttcccttcctccttccttcttcctccctccaaactccaattgagatcgcagccacacgacgg

SEQ ID NO: 11247 - DNA, 1598 bp, Zea Mays
tgatatttaagttggacgatcaaacgactgtgtcaagtgtgattaacaaaagcatcgaaaataaaatttaacgccataaaaaacagtggataatagtaggacttcataatagaaaaaattatcaaacggaatggaggggcccaacgcagtatatagcagccgggtggtgccggacatccgacgctcgtgccagcaggccattcttctcgccttactccctcacagaacccagtaaaatattgccagtcccgccgtcgagatggccccacgccgcctgctcgtcctcgccgtcgtcgccctcgcggccaccgccgccgcggccaactccggcttcgcggactcgaacccgatccgccccgtcaccgaccgcgcggcctccgcgctcgagtccacggtcttcgccgcgctcggccgcacccgcgacgcgctccgcttcgcacgcttcgctgtgaggtacggcaagagctacgagagcgcggcggaggtccacaagcggttcaggatcttctccgagagtctccagctcgtccgctccaccaatcggaaaggcctctcctaccgcctcggcatcaaccgcttcgcggacatgagctgggaggagttccgtgcgacccggctcggcgcagcccagaactgctccgccacgcttaccggcaaccaccggatgcgcgccgccgccgttgcgctgccggagacgaaagactggagggaggatgggattgtgagcccagtgaaaaaccagggccactgtggatcatgctggaccttcagcactactggtgcacttgaggctgcatatacccaggcaactggcaagcccatctctctctctgagcaacagcttattgactgtggttttgcattcaacaatttcggatgcaacggaggccttccatcccaggcctttgaatacatcaaatacaatggtggccttgacactgaggaatcttacccttaccaaggtgtcaatggaatctgcaagtttaagaatgagaatgttggagtcaaggttttggactcggttaacatcaccctgggtgctgaggatgaactgaaggatgctgttggtctggttcgcccagttagtgttgccttcgaggtgatcactggtttcaggctgtacaagagcggagtttacactagcgaccattgtggaactacaccgatggatgtgaaccacgctgttctggctgttggctacggtgtcgaagatggtgtaccctactggctcatcaagaactcatggggcgctgactggggtgatgagggttacttcaagatggaaatgggcaagaacatgtgcggtgttgctacgtgtgcatcctaccctattgtcgcatgaggcccttacgaagtgttacatggtctgtttggcatcaataatgcatgtttaacctgagcttggcgatgggttatacagaacggaaactctgtttgtgaatagaaaatcatgaagggaaggagttgaccggacccctgcttgtacgtctccccgactgtgtaggtagattgtcagttggggttccgaagtactctactcatacgtgtgtatgacagtttatttatgaaacaaaatacgcattgatcgttatggtgcg

SEQ ID NO: 11248 - DNA, 68 bp, Zea Mays
atgtctggtgcgccaccggacatccaggcgggcccagaagacagagctctaacggtcagaacccaaca

SEQ ID NO: 11249 - DNA, 1102 bp, Zea Mays
gcggtactacacagtttcatcacatagttgctggcggctggccggcctctttctctttctcgtttctgccccctctgcttgcccccctttcatctcaggcgtcgaagagagagagagagagagagaggagttgcaagttggtgagatggatctgttggagcggaatattaagacggagacggaggagacgcgcaaggaacaggagcgtaaggaggaggaggcggaggcggaggcggaggcgggggagaggaagacccaggagccgccgcagcaaggccagggcctcagcctctcactcgccaacggcagtggcaggtctggaatgttgccgatgtcgaacgtgtccgctaatccttcacagcttacaattttctatggcggatcagtatgtgtgtatgactcagtgccaccggaaaaggctcaagcaatcatgcttatagctgcagctgcagcggcagcggcagctaccaaaagcagtgctgcccctactgttaagcctccaatggtgcctgcagccactgttgccccagcagctgtcgtttctcctgtgcttacacggtctccatcactgcagagcacttctgtagcaactgggcaacctcaggttgttgctgaacctagctcgatatgcaaacttcaggctgatctccccattgccaggaggcactctcttcagcgtttccttgagaaacgccgtgacagggtcgtgagcaaagctccatacagcaccgccaagtcgtccgatggcatggagtcaccgaggattgaggtgacagcggagggcaaggcccagtaacttgaaaggtccccgcggagtcccatcggtgaaggctgacgttgtgggaaggggcagggacgcgctgttgttgccttatgttatgtggcggcggcagcgtggaaccgcactaataatgtggaccggaacctctgttaccgtcgtttgtgctgtcgcgtgctaggtttatgctgaagtggattcctttactccgcacaccgaactgtgtctgttgtacatcacgccgtgacgccggtggtctcgtctgtctgacttcgttacatggatcgtctagtagtaacggaatgcagtaccacgaaaaaaaaa

SEQ ID NO: 11250 - DNA, 67 bp, Zea Mays
cttggtaaaaattcccatccagtgtgaagcatcaccttttgttttaaaataaaacattttgtttttt

SEQ ID NO: 11251 - DNA, 386 bp, Zea Mays
cttgaaggaatgtatgatccttcaaccggtatctacggaatggatttctacgtcgtccttgagcgcgctgggtaccgtgtcgcccgacgccgaaggtgcaagtcccgtgttgggatccagcacagggtgaccaaggaggatgctatgaaatggttccaggtcaagtacgagggtgtcatcctcaacaaggctcagggcaacacttcttagggacgcacatgttacagcccagccgttagacatgtttaccagtagcaacagagttttcacctctactgaagttttgtcgatctcggatgatattatttgccaagactgtttggacagaggagcttatgatctctatactttgaaagctgaatgcgccgattcatttggttctgcaa

SEQ ID NO: 11252 - DNA, 164 bp, Zea Mays
tcagttatttagcactactgggctggggtgatggtactgaaaatgagttcttcactatcgatgacctagtccataaattcactataaatcgtgtcaataaaagtggagcagtctttgatgcaacaaaattgaattttggatcaaaggctctattgctgctatag

SEQ ID NO: 11253 - DNA, 1040 bp, Zea Mays
ctgctgcggttgctgcatctgagatctacatacttgcaatctccagatggaatacgtggacctgtacatggtgcactggcccgtgaccatgaaggccgggaggttcacggcccccttcacgcccgaggacttcgagccgttcgacatgcgggccgtgtgggaggccatggaggagtgccaccgcctgggcctggccaaggccatcggcgtgtgcaacttctcctgcaagaagctcgagaccctgctctccttcgccaccatccctcccgtggtcaatcaggttgagatcaacccggtgtggcagcagcggaagctgagggagttctgcagggcgaagggcatccagctatgcgcctactcgcccctgggcgccaagggcacgcactggggcagcgactcggtgatggactccggcgtcctgcacgagatcgccaagtccaagggcaagaccgtggcacaggtgtgcctgaggtgggtgtacgagcagggcgactgcctgatcgtgaagagcttcgacgaggggcggatgaaggagaacctggacatcgtggactgggagctgagcgaggaggagaggcagcgcatcagcaagatcccccagcggaagatcaaccagggccgtcgctacgtctccgagcacgggccctacaagtccttcgaggagctatgggacggcgagatatgatatgagtaaacgttacgtcggcgccccgctaggcggctgccttgcgtgacggagcaacgagctccccgtcgtgacagtgagcggctgctttgtgtggttttatgtcgtgccatctgtgcaacaaaaagtgatgcttagtgtcacagtatgtgtgaaataaattaaaaaggattttctggttacgccggtcaatgcgtgccactgccctgccaccagcccaccaccgcagggttggcagcgggaccatgacgccaccgggagatccgctcgccgcacgcacatcggcctgcgcttggcggtggccggagcccatccgcctcgcatctacacctatatacccagaaaaaaaataaaa

SEQ ID NO: 11254 - DNA, 73 bp, Zea Mays
aacatctgaaaagatgtacctctgctaggtaccaaactttgggttttaaatgataaagatgagaccgggcggg

SEQ ID NO: 11255 - DNA, 442 bp, Zea Mays
gtggacccgacctgccattttatagcaacttcagtgagtaagctttcgctaaaaccctagctccaaaaaacgaactagaaacgaccgcgaagccacaggtcgaaggcggcggcggcgatggggagcgacacggagacggagaagaaggcctcggtggcgctgatgtccatcgcgaaacccctcgctggaaagaagctctgcaagcggaccctcaagctcgtgcgacgagcctccgaggcgaagtgcctcaagcgcggagtcaaagaggtagtcaagagcattcgccgcgggaacaaaggattgtgtgtgatcgctggaaatatttctcctattgatgtgattacacatgttccgatactatgtgaggaagctaatgttccttacgtatatgttccatcaaaagagttatttattcataccggatgcttatgatagaagacaa

SEQ ID NO: 11256 - DNA, 79 bp, Zea Mays
gacttggtttgaaatatacttgaaaacacatcagtcatagcatatataaaagagacatgatcaaaggtatattaatgag

SEQ ID NO: 11257 - DNA, 76 bp, Zea Mays
accacaagggtgaaatgggatgcccttggctgactaattaggaaagctagtggaagactatcttacccgaaagggg

SEQ ID NO: 11258 - DNA, 59 bp, Zea Mays
caccaatgtagaggaagaaggttgatcttgctcttgttgttcctatggtcgcacattac

SEQ ID NO: 11259 - DNA, 65 bp, Zea Mays
gagacgacggcctagatctctcacgaacacatggccacatccttcatgcgcctcatcctgcggta

SEQ ID NO: 11260 - DNA, 1950 bp, Zea Mays
ccaaagcagcaaaggacgtcaatcaatgagcaaatacatcgaattgcgcgaaggcaaagcgtccaagcaaccacttctgctctgcatcccgtctgggcctctgcatttgcttggctgctgctcccttctcccaccgaccaactcgatcccgcgccatggatcgcgccgaccccgcgcggggccgccttgccgtgctctcctcccacctccgtggtgcaggggccgaggaggcggcggggctggagaggtcgccggtatccgcgccggcgcccgggccccgcgccggcgcgcttgccgtggtggacgggaggaccgggaagcggcacgaggtcaaggtctccgaagacggcaccgtgcgcgccaccgacttcaagaagattaccactggaaaggacgacaagggtcttaagatttatgatcctggttaccttaacactgcccctgttcgctcgtccatctgctacatcgatggagatgagggaatccttcgctataggggttatccaatcgaagaattggctgaaagcagctcgtttgttgaggtggcctaccttttaatgtatgggaacttgcctactcagagtcaattggcaggctgggaatttgctatttctcagcattctgctgttccccaaggactgttggatatcatacaatcaatgccccatgatgctcaccccatgggtgttcttgccagtgctatgagcaccctttctgtctttcatccagatgcaaaccctgctctacaaggtcaagatctttataaatcgaagcaggtgagggataaacaaattgtgcgagtacttgggaaggcaccaacaatagcagctgctgcctacttgagattagcaggaagacctcccgtccttcctttaaatactctatcttattcagagaacttcttgtacatgctggactctttgggtgacagaacatataaaccaaatcctcgacttgctcgagctctagatattctttttattctgcatgctgaacatgaaatgaactgctccactgctgctgttaggcaccttgcttcaagtggtgtggatgtatttactgctctttctggtggtgttggagctctatatggtcctctgcatggcggcgcaaacgaggcagtacttaaaatgttaaatgagattggaagcatggaaaatattccagatttcattgtaggagtgaagaacaggaagaggaagatgtccggttttgggcaccgtgtgtataaaaactatgaccctcgtgctaaagtcataaggaaattggcagatgaggtgttctcaattgttggacgggatccacttattgaggtggccattgccctagaaaaggcagcgctgtcagacgaatattttatcaagaggaagctgtatccaaatgtggatttctactctgggctaatttatagggcaatgggattccctacagaattttttcctgtgctgtttgctattcctcgcatgggtggctggctagcgcattggaaagagtcactcgatgatcctgacactaagattataaggccccaacaggtatacaccggcttctggcttaggcactatacccccgtcagagaacgagtgctatcaagccagagtgaggaacttggtcaggttgccacctcaaacgcaactaggcgccgccgtgctggttctgccctgtagaagctgcagcgtataaacgcaccggcatactcaataaacatcgaccacttttgtgcttgaaaaggccacaaatgctttttagcttggttggagttgtaggccttttgttgtcgagtatataggcaataatgcagtgagaacaccacaccgttacaatgtaaaactgtcacgaggcatcacttgctggtgtacaccccttgcgttctctatgacttaatcacttaacttcccaaaagatgaattaagaggtacgatcgagtacccgtgttcttgcgtaaaaaga

SEQ ID NO: 11261 - DNA, 532 bp, Zea Mays
aaacagggccaaaatataaaaacaaaaagataccaactaacctaaataatctgtcgaaaagcaagcaaatactgtttgcgggccagcgttgggcatggcccacctgccattgttagaggcgttagcccacaggcggacccgaatccagaattcctgtcactgctcgaaatcgatccgatctccgctcgcgctgaagcctgatctccaccgggttcgcagcaggggcgcaggacctcgatcacgaggaggcaggggagcagcatccacaaccacaagccatggcggggagggccaacatccccactaacaactccgccctcatcgcaatcatcgccgacgaggacaccgtcactggcttcttgatggccggcgttggcaatgttgatctgcgcaagaaaaccaactacctcctcgtcgacaacaagacgacagttaaacaaatcgaggatgcgttcaaagaatttactacgagggaggatattgctattgtgctcatcagtcagtatattaatttactgaacctttcttccag

SEQ ID NO: 11262 - DNA, 62 bp, Zea Mays
gttgtcttcatatgatgtaattatttagcaattttgtacagaactcctattatctagtaaag

SEQ ID NO: 11263 - DNA, 1141 bp, Zea Mays
gtacaataacagatgtcccacccactgtcgcagaaacaaaactgaacttccttaagtcatacaaacgcccaatcccaagcatttacagtgcagtcttacaagaacttttggtgcagcaacacctgatgagatacaaaaaaacctatcagtatgatgctgtgtttgctcttggcttcgtcactgtctatgatcagctcatggaagggtaccccagcaatgaggacagggattccatcttcaaggcatatataacagcattaaatgaagatcctgatcaatacagagctgatgcactaaagatggaagagtgggcacgttcccagaacggtagttccttagttgatttttcttccagagatggagaaatcgaggctattctgaaagatatatcagaaagggccaagggtaagggaaacttcagctacagccgattctttgcagttggcttgttccgtttgcttgagctctcaaatgcaacggagccaacaatactagacaagctttgcgctgcactaaacgtcagtaaaagaagtgtggatagggaccttgatgtttaccgcaacatactctcaaagttggttcaagccaaggaacttctcaaggaatacgtggatagggaaaagaagaagagagaagaaagatcggaagccccgaagccgaacgaagctgtcacaaaatttgatggaaacctttattccacaaggcattagaatcagccctttgcagaggagagtttcccaggataacagaattaacagtaacatctggaccgtgttgagaaaccaccaaatgttcccctttcatcacagacgtctttggctgctcgtcttgtgatgtagcattctgccgtacaaaaggatccagattattcttactactggacagatatttgtattttctcatatgtcttgaaatcaaatgtatacattttctgtgtgtaggggtcaatgttactcaagcagagaaatatagttttctcttttgtatttaaattcaggtaatttgggaggccgtgttcacttatatataatatagtgtggcaaccatgaaaacaattggtgaagttctttatgtgagtttgtatgtaccgggctcagcactgaaaaatatctgaggttgaaaagtcttaacagccggcttt

SEQ ID NO: 11264 - DNA, 3579 bp, Zea Mays
gcagttttctattccacgaccttatccacaccagcagattcgaaattcacggacaggcccatggacccggcgaaagccagcggtggttcagcccctgacgtgcgggtcccactctccagccgcaccgcctagagaggcagaggcatcccttcgcgtggaagcaaacgaggcgtgataaagtggggctcctcggtcccggcgttggccgcatcgacactcgccgcgcaccaccaccaccgctgcggctcacggctacgcagcccgctctcccgacccccccgtgccctcctctttttgctactagcacatagagtttcgcccgaatcgatcgccgactgactccgctagggttcggcccgatcgccgcttcgtcctcccggctcccgcggggaccccgccgagatgtctgactggagctcgccggctgcgccgacgttcttcccttttggcccgcaggccgaggggtgggacgtcaccttcaaggtcaaatatggtgatacacttaaaaggttttatggttgtgccaatgggagtcattttgacatgaatttatctgctctacgggcgaggattgatactgcctttaagtttggtcctgacgttgactttgttctgacttacaccgatgaggatggtgatattgtcatgctagatgatgatgatgacttgcgtgatgcagctctccgtcagagattaaaccctctcaggattactgttcaactgaagaaaaatcaaccaactgaaaaaaaagatacttctgcaccagtgaaatccgctgctcaggatccactatcccagttaatgtcagctattgaaggtttgaagcctgttcaggaagatagtctggcccatataaaatcagctattggtgaagcaatcaagtctatcccagagccaatacctgatgcccttgcaaaactttctcatgaaatacttgatgcagcaccaccaccattagctgagctgatgaaaccttttgcacaattgatggcaccaaacaataatggcaatgggccatctgatgtgcatgctgaggggtcatctagctcttccagtgcacaggtgccagctgaagctaaaaatgagcccaaagttaggccaagtttgggtcttaagaccgtgttgaaagaggctgctggacctgttcctaatgctggagcttctcaggttcaacagccattaatgtatccatctgttgaggagatgctgttcccctgtaattcagtcgacaaatctgtttgcaaagggaagattgatgctcaaagtaagggaaaatctgttacgtcctcaggcatccaacctgctcctcattctcttcgtactcatgccccacctccaccacatccgtgcatttcagaatggtcccgagcacaaagaagccaacaccgtcaattgaaatttgaagacaatgcaaaagccactaatgattctagatggcgcattccgatgtataaaatgccctatgcaccaccacctccagcagtgccacccccaggctatgtaccttctccacattttccttatccaggccgcctcttatcttctgggcatccatacggagatctcgctggtaacatggaaaactcagcaccacatagtctgcatagatggattcagtgtgatggctgtggagcgcaaccaattgttggtccacgttataaatctaatgtgaaggaagactatgatttatgtgattcctgtttccagcgcatgggaaatgaaatggagtacaccaaaatagacaagcctattttaccccacaggtttctaagagatccccatgtgtaccggaaggtgcaccatccacgggttctaatgaagtcaagacgggagaaacttgaaagtcgcttcattttggatgtgactgttcttgatggaacactgatgacaccttctaccccgttcactaagatttggcgcatgcataacaatgggtctgttgtgtggccacggggcacacagcttgtctgggttggtggagatcagtttgcattgcagacatctgttccattagagattcctgtggatggttttcctgtggacaaagagattgatgttcctgttgattttgtggcacctacaaggccagggaggtacatatcttactggaggttggcttccccttctggtcagaaatttggtcagcgagtttgggttcatatccaggtggaagacccttcttttgttaatgacaataacaggaatgctgctattaacctgaatctgcctccagagagctatagttcaaacacaaccaacttaattgatgtgaacattgagcctgctgactcagcccttagtgcacatgctaagcgcacaaaggagttccatttctgttcaactgattttcctgaacccagtaagtctgtgccttttacgttggccactacctctttgtctgcagcagctcctacaaaccaaactggtgatgttcccatgtccagtacacctgctgctgcttgtttgccctctgttaatgtgcctatgcatgaagtcgttactactcatacaccgtcacctattacgcctgtcttgcctacaactatacacttttcagccccagtatctgctcctgcaattgcccctgagcttgcatcaggggctgttggtgtgcctccacctgttagtgctgtggtacctgagctgtcagaactggatgttcacaatgaggagaagttgctgagggagctggaggaaatgggttttaggcaggtcgatctcaacaaggaaatcctcaggcagaacaattacaatctggagcagtctgtcgatgacctatgtggcgtcaatgaatgggatcctctccttgcagagctggaagagatgggatttgatgacacagagatgaacaaggagctgcttgcgaagaatgagggaagcatcaagcgagctgtgatggagctcattgccagggagaagaaggacaagtgaagatcgtgtgctatctaagtatatattcgtaaataatgagacggctgtgccactgcggtgcagccctggtgcgtctcagagcttgcttatggtgaactcttcgtgttaggtttcttccttatatctgtcgtgtctgcggtgtcgatgaactatctagtatgtggagcgtgtgcgtctcagcagttaccctgccatgccacgtggactggctgtcgtgcctactgtctgttaccatgtatatatataaaaaatgatgcgtggaccaatgtttgatgctggcgctcttgccctcgtgataatgtattagcggttggcttgttgcttgcttgtcagccccagcgatttggtgatatgcactgccagtggagtttgcttcacaaagaatggaatggaacctggcgaccctacgtggagtttgcgcaccgatgtaaggagctggaggccggctccgaggactattgcttccacttcctatatgtggcacgctgaagggcaatgccgtgttttagttgaaattttggccagtccacgagcaatgtggtgtttctactctctgtatctctactaatattaccaaaatcaaatcctctgattatctctacctgtctttatcagccattggtattttgggtgtgtgtgtgtttcatc

SEQ ID NO: 11265 - DNA, 1723 bp, Zea Mays
ttttgtctgacggaattgttcttggtcctgcgcaagctcagaacttgagagactcacttgttgaggcaaagtcagatattgttgttaagattggtctccggaaaggttctaaatcttttgaagaagcccgagcagcaggattcaccgaagagagtgggacgctgggtgatatatgggagactgtatcaaacagtgatcttgttttgctactgatatctgattctgctcaggctgataactacgagaaaattttctcgcacatgaaaccaaacagtattcttggtttgtcacatggatttctccttggacatttgcaatctctgggttttgatttccctaaaagcatcagtgtgattgctgtatgccccaagggaatgggcccatcagtcagaagactttatgttcagggcaaagagatcaatggtgctggtatcaatgctagctttgctgttcaccaggatgttgatggaagggcaacagatgtagctctagggtggtcagtagctttaggttctcctttcacatttgctactactctagagcaggagtaccggagtgacatttttggcgagcgaggtattttgcttggtgctgtccatggcatggtggaggctcttttcaggagatacacagaacaaggaatggacgaggactcagcatataagaatactgtagagagcatcactggaattatatcgaaaactatttcaaagaagggtatgcttgaagtgtataactccttgactgaagaaggaaagaagcagtttattgaggcctatagtgcagcatattacccatgcatggacatattgtatgagtgctatgaagacgtctcttctggaagtgagattagaagtgtggtgttggctgggaggagattttatgagaaggaagggctccctgctttccctatgggaaaaattgatcaaacacgtatgtggaaggtgggtgaaagggtccgttcaaccaggccacaaggtgatcttggcccactgcatcccttcactgctggagtgtatgttgcactaatgatggctcaggttcgatcccatatccagaagggtaatagcgtctcattacacgccggttagtgaaatgtttaacagtcttttgtttgaatcattgtagattgaggtccttaggaagaagggccactcttactcagagataattaatgagagcctgatcgagtccgtggactcgttgaacccgttcatgcatgctcgcggtgtggccttcatggtcgataactgctccacaactgctcgtttgggatctaggaagtgggcaccacgcttcgattacatcttgacccaacaggcgtttgtgactgttgacaagaaagcaccgatcaaccaagacctcatcagcaacttcatgtctgaccctgtccacggtgccatcgaagtctgcgctcagctgaggcccactgttgacatctcagtgaccgctgatgctgatttcgtgcgtccagagcttcgacagtcttcataagcttgtatggatccgcagtgtgactgcaatggctagtttgtaagaacttaatatgcctgggcttttgaactcttagattgtgcctgtattgctcgtgcttgaggaccagaaaagtaaactcttggcggtgtggtactgttgtgatttgcaagaataaaaataaatttctgttgatcattccctggtgtccaattgtacacctgaagctaattttgttcaccatttcgac

SEQ ID NO: 11266 - DNA, 1546 bp, Zea Mays
gaattagctcattgaagagagagagagagagagagagagaggggagacccattaccaatgccaagaacaagaaaccagagaggacagccgcgaatacaatccgaatcccctccaaaaacccaccataccgtctcccccatctgcaagaacaagatcaggagagcatcctagggggaagaaacaggagggggaaaaagaagcccagaaagaccaactgaccaaacaaaaaggtggcatctttgtgtcaccgaggcaccgccgatcacagaccaaagcccgctcctctggtccatcccaagcgtacagcagccgagatttcttcgatctgcgcttgcgtttttttttcttgtaaagattttagttttccccccttcaactgttgctagccttgagtcgctgagaagtttcgagaagggtggtgtgagtgtcggatagctcaagatggatccggcgttgctggacgacgtcatacgccggcttctggaggtgaagaatctcaagcctgggaagaacgcgcagctgtcagagtcggagattaagcagctctgcgctgccgccaaggagatcttcctgcagcagcccaacctgctggagctcgaggcccccatcaaaatctgcggtgatgtccatggccagtactctgatctcctgaggctatttgattatggtggctatccgcctcaggccaactaccttttcttgggtgattatgtggatcgtggaaagcaaagcctagaaacaatatgtcttcttttggcttacaagtgtcagcattgatagatgaaaagattctctgtatgcatggtggtctatctccggagttgaacaagcttgagcaaatactcaacctgaatcgccccacagacgtgcctgatactggattgctctgtgatcttctttggtctgatccttccaatgaagcaacaggctgggccatcaatgatcgtggtgtttcattcacatttggtcctgataaagtttctgaatttcttgagaagcatgatttggaccttatctgccgagcacatcaggttgtcgaagatggatacgagtttttcgctagccgtcaactcgtaacaatattttcagcccctaactactgtggagaattcgacaacgctggtgccatgatgagtgtagatgatacattgatgtgctcgttccaaatattgaagcctgcaaggaagatgatgggtggttcaactaataacaaatctggcttcaagtcattcaggggatggtgacaacggcctgatggtgggcacgctgcgttcgacagggggtacatcttacagcggctgcaactaacaggcatatgcattttcgcggaaacctgcttgggccttggaagggcaaagcagatgtagaactgtgcatcttccatgttggattaacacttgatgtaatgtattgttatcggtttttactgtgcggatctccttatgatatgggaggatgtgaatgagtactgccctcccctttgcgtcctaagattcggaaagaatccattcgccaataaaaatagccagactattctccttttcca

SEQ ID NO: 11267 - DNA, 352 bp, Zea Mays
ggaaaatacttctcacgcttcttttccctctcagtcttcaaggagagctggtacttggtgaggcgcctgcgaatggcgcgggtcttcttggggcggagatcgagcgggagaagcttcttcttcttgtacgcctcacgcagcgccgacttctgcttctgcgagatgacggtgagcacgcgagcgatggaggtgcgcacgatcttgcttggcgacgcgtaggagggagagctccgatttaagctccttgagctgcgcttgcagatccgtcttgctctttccgcgcagctcgtgcaccttgatccgggccatcgcgagtgacgagcagggggtgccgcggcgccgaatgagatga

SEQ ID NO: 11268 - DNA, 85 bp, Zea Mays
aaagagaatacaaaaaaaaaaaaaaaaaaaaaaaaaaaaaaaaaaaagaaaaaaaagaagaaaaaaaaaaaaaaaaaaacttcac

SEQ ID NO: 11269 - DNA, 660 bp, Zea Mays
ccctctccgcagcgaacgcaggagagcaccaggcctcgcgctcgccgcggccccgggtgtcggcggtagggatggcggtggcaggtggagagcaggcatctcgtccttccccttcctgccgccgttcttcacagggaacaagggggagaaggacgctgagaaggcgatgaggctcaaggaggagctcctcgacgccattgcaccgctggaccgtggcgccgaggccacgcccgaggacaaggagcgcgtcgagcagattgttcagcaactggaggcggtgaaccaggtgaaggagccgctcaagtccgatctcctaaacggcaaatgggagcttctctataccacctccacaagtatactgcagccacagaggccaaagtatctgaggccgtttgggaagatttaccaatcaatcaacgccgacaatttgagagcccaaaacatggaaacttggccctactttaatcaggttactgccaacttggtacctctgaattctagaagagtggcagttaaatttgactacttcaagatatttggtttgataccgatcaaagcacccggaagtggtaaaggtgaacttgagattacttatcttgatgaagagctcagcaatgcatgggccttgttgatagggttcgctaagttgtaagaaaccac

SEQ ID NO: 11270 - DNA, 770 bp, Zea Mays
cggcaattatacattcttccaggaacaaagttctcagagatctgcaggaagagatctttcatttctgccagcagtcctgaggatgccgaatccggcactcccccgccgcttgaaggctacaaataccatgctgagctcttgctcagatcgccatgcttcagacgcagaaggtgcgcatcacagagttcttggacgagcgctctgcttacctgaccaagttcgccaaggacgccgactcggagttcgacctgattgggcagaacgctatgaaagaacttgatgccgttggtgaccagatactggagaggctcgacagcaagatgcaagccttcgaggagacggctgaggtgcaacggcaagagatagaaatgaacgataaggtgttagaggacttcgaagactggatcgaaaaggagaaaaacgaagggatgttcttcaaaagccttggcaaggtcaaacctcggaacaagatggaaataaaggtgaaagccaaggtggaagcacagaaggtcaaagagattgcagaggagagtgcaggatcaaaaactcgtatgaacatttacctggggctgatggggatactcgggattacaattgcgaatgccatctttgcaacaccagaggtggagtggaggaaggttgctgctctgggtctgattttcattggtctggttgctcaggtcatctacgagcaggatatctcaccgccggaagctgagaagacagagaaaatagaagaataaaaaaggagttgcagacatatcggtaat

SEQ ID NO: 11271 - DNA, 740 bp, Zea Mays
ctggggtcgcgccaaaaaaaaaaagaataaatcggaaaagcaagagacgccgaaaattcgaagggggaagaggagaagaggggaaagaagcaaatgacggaggccccgagcaagatcgaatccatgaggaagtgggtcgtcgagcacaagctccgagccgtaggttgcctctggctaggtgggatcagcagttcgatcgcctacaactggtcgcggcccaatatgaagactagcgtcaagatcatccacgcaaggttgcatgcgcaggctctaaccctagctgcattagttggttctgcatgcgtggagtactacgaccagaagtatggttcttctgggccaaaggtggacaagtacacaagccaatatctggcccattcgcataaagattaaggtccccatgttggttcatctcttgactcttggtgctcatgacccgcccgtggatgctggatgtttattctttttgtcttcttactttaaaaatggtgtacttgccagagaaatgataatgggggatataatgcagataattatcatcataatttagcgttatgttgcattgtctaaccgctctgttgactctcagcatcttcgaatattctttttatattttttgagaaaaggaaagaagatcctgatttgttgttagattattgtgtgtattagtgatgtaacgggccttggtctagcccaggtactcttatagatgaatgcactaacaaattgctgtgctacag

SEQ ID NO: 11272 - DNA, 629 bp, Zea Mays
cccgccgcctccgctaaattatccttgcgattgagcagtagaggcgtgcccccgaggacaccgtcactggcttcttgatggccggcgttggcaatgttgatctgcgcaagaaaaccaactacctcctcgtcgacaacaagacgacagttaaacaaatcgaggatgcgttcaaagaatttactacgagggaggatattgctattgtgctcatcagtcagtatattgccaacatgataaggtttctggtggatagctacaacaagcccgtccctgctattctggagatcccatccaaggaccatccatatgatccagcgcacgactctgtgctctctcgagtgaaatatctgttctctgcagaatcggtggcgtctgataggcgatgaaggcatccttgcgtagcagtacccttcgatgcatctattttgttatggtattgaaaagaagatggcacgtaccattgggtgcgagcgagccagcatgaataataatgagcttgcaaacaatgattggttgaactaaaccaacacaattttttttcataaatggttcgaatgatattttggtgcttgtgtttgattggttattagggaataaaatgcgattgttatgacgaattgattgcccag

SEQ ID NO: 11273 - DNA, 76 bp, Zea Mays
gtgagactattgagagcaaggaggagaaggaagacccgactctccccaaggacgttcatttgattcccgccctttg

SEQ ID NO: 11274 - DNA, 427 bp, Zea Mays
gacgcctgctcctggtcgttacagatagagacggataagcatgacagcgcaggccgcgcggcgtggactccatgcctgcaaggggacaatagagatgccgtctgcgtccgcggcggcatcggcgccggcgtcaccccccgctataaatccgtcgcacccgcccacccacctgccgtgccagtgctctcatctgcgtacacggtctccctcttcctgtcagtagtagagtgagagtgaggcagcgagtaggagacaaggggaaatggggaagggagcgcaagggagcgatgcggcggcggcgggcggcgaggtggaggagaacatggcggcgtggctggttgccaagaacaccctcaagatcatgcccttcaagctcccgcccgtcggaaacatcagtgcatcttttccaagatcctaactactccag

SEQ ID NO: 11275 - DNA, 716 bp, Zea Mays
agtatccggtagggttttcctctcgcgccgccgcggaacacaacaccgcaccacactacccagcggaatccgcccacccgcacccggagcagaggagatatgtcgcaggggaagggaggagcgtcgaggaaggaggaggtggtcaccagggagtacaccatcaacctccacaagcgcctccacggctgcacattcaagaagaaggcacccaacgccatcaaggagatcaggaagtttgcgcagaaggccatgggcaccacggacattaggattgatgtgaagctcaacaagcacatctggagcagcgggatcaggagcgtgccgcggagggttcgtgtgaggatcgcccgcaagaggaacgacgaggaggatgccaaggaggagctctactcccttgtcaccgtcgcggagatccccgccgagggcttgaaagggctggggaccaaggtcgttgacgataccgattaagctgtcgcgttatctacatctttagagagttcctagtttgtatttgcaacagcaaaaccttttgtattcacaaagttgtctatttccgcaacagaattgcatggctagttttcttttcattgctgctgcatccttttcttcattatcgccccctgggaagtcgctgctcatgggacaagtttggaaatctccatgtgtggtgtttacgttatcaagttgtgttccttggataacttgtcaaaaaaaca

SEQ ID NO: 11276 - DNA, 2150 bp, Zea Mays
tggttgcgtacagtaccctctagaagcctccgggtcgctcggtgtgggttgctaactactcgcagcagccagaggccagatccagccgccaaccccccaaacaaaaccctaggccaccattctgaccaccaggcacaagcagagcagaagcagacatggccaccattccgaccaccgattctggcctcgtcctcagttcctccgctctcctccggaggactaggagggccgcctcatccgtcaccgccaggctgccagccgtcgcccgccgtcgcccgcagctcctcgtgcgtgcctccgccaaggagatcgcctttgaccagggctccagagccgcccttcaggccggcgtcgagaagctcgccgccgcggtcggcgtcaccctcggacccagaggaaggaatgttgtcttggatgagtttggaacccccaaagtggtcaatgatggagttaccattgcccgcgctattgagcttgctgatcccatggagaatgctggtgcttccttgattcgtgaagttgctagcaagacgaatgactcggctggtgatggaaccacaactgcctctgttctcgctagggagatcatcaaattgggcatgttgagcattacttcaggggcaaatccagtgtccgttaagaagggcattgataagactgttcagaaattggtggaggaacttgagaagaaatcaaggccggtcaagggtagtggggatattaaagctgttgctgccatatcagctggaaatgatgaatttgttgggactatgatcgccgaagctattgacaaggttggccctgatggtgtcctctcaattgagtcgtcatcgtcgtttgagaccacagttgaagttgaagaagggatggagcttgacagaggatatatctcccctcagtttgtcactaaccttgaaaaatctattgttgagttcgaaaatgctcggattcttgtcactgatcagaagatatcatcgataaaagaaattattcctctgttggagcagacaacacagttaagagcaccacttcttataattgcagaggatgtaagtggcgaggcgctggcaacattagtcataaacaagcttagaggaattttaaatgtggctgcaatcaaagctcctggttttggtgagaggcgtaaagctcttcttcaggacattgccattgttacaggtgctgaatatcaatccaaagatcttggtctactagttgaggatacaacagtggagcagcttggcatagctcggaaagttacaatctcaagttcctcgacgaccattatagcagatgctgctagcaaagacgatatccaggccagaatcgcgcagctgaagagagagctttctcagacggactcgacgtatgactctgagaagttggcagagagaattgcaaagctttctggtggagttgctgtggttaaggttggagcatcgaccgaggcagagctagaggaccgcaagctccgcatagaggacgcgaagaatgcgacttttgcagcaatagaggaaggtattgttccaggaggcggtgcagcatatgttcatctatcgacattcgtaccggctatcaaggagacgttggatgatcctgaggagcgcctaggtgctgatatcattcagaaggctttggtggcacctgcagcgctgatagcccataatgctggggtggaaggtgaggtgattgtggataaaatccgggaaagcgagtgggagttcggttacaacgccatggcggacaagcacgagaacctggtggaggctggtgtgatcgaccctgccaaagtgactaggtgcgccctgcagaacgctgcctccgtggctggaatggtgctgactacccaagcaatcgttgtggagaagcccaagaaggctccagcagcagctgctgcagcggcaccatagggttctttcaccatgtactatttgctctttcatccgctacgatctggcagcggtttccaatggtacatgacaacaccggcagagcatcgacggatcgcttgtggttgaagggcgaaaaggctttgcttgagttgctgctaggaccttggcaagagtagacaggcaagctgacagaggaggtgaagttggcagcagaagaaccagacacccagttggagttggatcagatgtagcacagca

SEQ ID NO: 11277 - DNA, 68 bp, Zea Mays
catcaaacctgtatgttgcaatttgcaccagatgctaaaagcaagccaacacacgagtttgcacctct

SEQ ID NO: 11278 - DNA, 1515 bp, Zea Mays
gctgcccatgcccagctagcatgctgaaaaatctcttgcgtctctatatatataggtggttcgaggtgatcggcagaaccacacaggcaaagatggcgagcgtgcacaaggccaccacccttgttctcatgttctgcctgctagcgctggggagagcggagtacctcaagtacaaggacccaaagcagcccgtcgctgttcgcatcaaggacctgctgggtcggatgactctcgccgaaaagatcggccagatgacgcagatcgagagggaaaacgccacggccgacgcgctggccaaatacttcataggtagcgtgctgagcggcggaggcagcgtgcctgctcctcaggcgtctgctcaggcttgggccgccatggtgaccgagatgcagaagggcgctctttctacgcgtctgggtataccgatcatctacggtatcgatgcagtgcatgggcacaacaacgtctacaaagctactattttccctcacaacgtcgggcttggagctaccagggaccctgacctcgttaagagaattggagaagcaactgctcttgaagttagagctactggaattccttacgcctttgctccctgtatagcggtctgtagagatccaagatggggacgttgctatgagagctacagtgaggatccaaaggttgtccagtcactgacttcactcatctctggcctgcaaggtgacgctcctgcggattccgcgggaaggccgtatgttgggggaagtaagaaggttgctgcatgcgcgaagcactatgtcggtgatggtggaacgcataacggaatcaacgagaacaacacgatcatcgacacacacgggctgctgagcatccatatgcctccttactacaactctatcatccgaggtgtctccacggtcatggtctcctactccagctggaacggagtgaagatgcacgcgaaccatttcctggtcacggattttctcaagaacaagctcaagtttaggggttttgtgatttccgactgggagggcattgatcggatcactactcctcctcacgccaactactcttactcaattgaggctggtgttggtgctggaattgacatgatcatggttccattcagatacacagaattcatcgacgatctgacgacacaagttcagaacaaggtcatccccatgagcagaatcgacgacgccgtctacaggatccttcgtgtcaagttcaccatgggtctgttcgagaacccttaccccgactctagcctcgccggcgagctcgggaagcaagaacaccgggaactggcgcgcgaagccgtcaggaaatcccttgttctcctgaagaacggcaagtcctcctacgctccgttgctgcccctcccgaagaaggccggcaagatcctggtcgccggcagccacgccaacgacctgggcaaccagtgcggggggtggacgatcacgtggcaaggaagcagcggcaacaccactgccggattcgtgagcaacgaccgacctggaatggaac

SEQ ID NO: 11279 - DNA, 1516 bp, Zea Mays
tacggtcaatcaattccttctttctttgctctggcggagcacctgtcgagcgaccttccatacaagctgtcgagcgacgacatcttcgtcaccgccggaggcacgcaagccatcgaggtggtggtctcagtcctcgcgcagccgggcaccaacatactgctcccgaggccgggctatccgaactacgaggcgcgcgcagggctgcacaacctggaagttcgccggttcaatctgatccccgagagagggtgggagattgacatcgacggtctggagtcgatcgccgacaagaacaccaccgccatggtcatcataaaccccaacaacccttgcgggagtgtctacacccgagagcatttggccaaggtcgcggaggtggcaaggaagcttggaatactggtcatcgctgatgaggtgtacggaaatctggtgtttggggacacccctttcgtccccatgggtgtctttggccacattgcccctgtgttgaccataggatcactgtccaagagatggatagtgcctgggtggcgacttggttgggtggccgtatgtgatcccaacaaggttctgcaagaaaccaagatcattgcatcgatcacaaacttccttaacgtttcaacagatccggcaacttttgttcagggagcgcttccccatattcttaagaacacaaaggaagattttttcaagaggatcattggtctgctagcggaaacatcagagatatgtttcagcggaataaaggacatcaagtgcatcacatgccctcacaagccagaaggttccatgtttgtcatggtgaaactaaatttgtatcttttggagagcatccatgatgatattgatttttgttgcaagctggcaaaagaagagtccgtgattttgtgtccagggagtgttttgggaatggaaaactggatccgtatcactttcgccattgattcatcttctcttcttgatggtcttgagaggctgaaatctttctgccaaaggcataagaagaagaatttgcttaatggccattaactatattcgacttcaaagttgttacccacttccatcgttttccactgtatcatcaacaaaagtgtaacattgaaatccctcagaagtaataaagttaatgtttacatatgaggatatgcatgtcagtgtacatttttagtcaccttaatcctctgttttgaaatctttcgattttgcatttgtttcagttttccattacaatgttcttttcttttaatttgacatcacttataagtgtggtgatggtgacacctgttccaatgtactaaaggttacaattggggacaaattattatgtagtatgtcggttgtgaagtttgaagacagccgaaagttctatttttgtgttgagagaaaatttacatctccaatatttgatgacataattaaggatgaattcttatttggcaaatttaaattgcttagagagatcaaatgtattgataaatggactggactcataagtcgttataagaaaataccaaaa

SEQ ID NO: 11280 - DNA, 1152 bp, Zea Mays
atttatatttgctataaaaaacgaatacatatagaaatcattcgaactgtcaacgaattgaattggccgcgagtttcctacctataaaacgacccggatcccccacccccacatttcctcatcgtcacaacgcgtcctcgaataaaaatccagacgaaacccaaaatccccaccgaacgcaacctaaaatctccccatccctcctcgatccagccccgcggagaagagccatggccgattccgcaaccaacgacgcccccctggtcgccagcaaccagcccacggaggaggaggtgacggtggagagggccgcggcgacggaggagcaggaggaggagaggctgcggtacctcgagttcgtgcagccgtcgtcggccccgtctacgaccgtttccacgccgtcccgctcgacctcctcaagttcatcgaccgcaaggttggtgagtccgttgaggagatagaccgccgcgtccctccagtggtgaaggaagccccaaccttggcccgctcggctgcgaaggaggttcgccaggccggcctggtgggcacggccactggccttgccaagtcagccatcgcccgcgccgagccaaaggcccgggagctctacacccgctacgagcctgtggcagagcggcgtgccgccgaggcctgggtggccctgaaccgtctccctctggtgccctcggtcaccagggccgtcctccccactgccgcacagctctctgccaggtacaattcggcggtgcgtgatggtgccaagcgcgggaacgccgtggccacctatctcccgctggtgcccactgagcggctcgcccgcgtgttcaggtaccccgtggctgacgttgctgcagcaccagagatgcagcccattccttcccagtagaagatgaaatggaatgtgaactgcataaaccaatatcaagaagtattactgtgttttgtctttgcgtaccttatggtgaactcatgcgtggttcagtatcgtttcattcctttttgttgcagtgagcctacacaagttcgtctttgttttatggataatatgtataacattatctattggaatagcaatgttgatgcttgtgctttgtcatcattttgagtacccaacgcgtatgtgcctattggcatttcggctaaaaaaattaa

SEQ ID NO: 11281 - DNA, 2229 bp, Zea Mays
ggagtcaggcgtgccatgaggcagcaagcaaatgttccgtcttcagtaatatcaagccacagcatgcatcttggtgttcttgctacagcatggcatgctgttaacactgggaccatgtttactgtctactacaagcctaggacaagtccagctgagtttgttgttccctgtgatcgctatatggaatcactgaaacgaaattaccctatagggatgagatttaaaatgaggtttgaaggtgaagaggctccagaacaaaggttcactgggaccattgttggaaatgtggatcctgatcaagctggatgggctgaatctaaatggcgttacctcaaggtgaggtgggatgaagcttcctccattccacgtcctgaaagggtttctccctggcaaatagaacctgcagtcagccctccccctatcaacccacttccagtgcacagacccaagagacctcgctctaatgctgtagcttctctgcccgagtcttcagctccaacaaaagaagctgctccaaaggtcacattagagactcaacaacatgccctgcaaaggcccttgcagacccaggataatgtggccccgaaaagtgtttttggtgataacagtgaattggactctgctcataagtcctccctgcgaccgtcaggttttgatctggacaagagcaccattggcatgcagaggaagctgggttcagatatttggatgcgaatgaacagacctgatggttacagtgaaatgttatcgggatatcaaccacctaatgaaggtgcacggaattcgcagggtttctgttctttacctgatcagattgccgctggacgtcctaatttctggcacactgtaaacgctcattaccaagaccagcaaggcaatcacaatctgttccctggttcatggtccatgatgccttcaagtactggctttgggatgaacagacagagctatccaatgatccaggaagtcggtgggatgtctcagagttgtacaaacaccaagtttgggaatggagtttatgctgcactacctggccgaggcattgatcgatacccatctggatggtttgggcacacgacacccggtggtcgcgtggacgatgcccagccacgcgtgattaagcctcaacctttggtccttgctcacggcgaagctctgaaaatgaagggcaactcgtgcaagctttttggaatccatctcgacagcccagccaaatctgaacctttgaagtctccgccaagcgttgccacaccggcagctgagaagtggatggcagacggaatcgacgcagacaaaagccctgagccgcacaagacgccaaagcaactcggtgctacacaggtggatcctgtcccagagagatgcccacaagcttcaaggggcacacagtgcaaatcacaaggcgggtcgactaggagctgcaagaaggtccacaagcaaggaatggcgctgggcaggtccgtggaccttaccaagttcaacggctacacggagctggtggcggagctggacgagatgttcgacttcaacggcgagctgaaaggctgtagcaaggagtggatggtcgtgtacaccgactacgaaggcgacatgatgctggtcggggacgacccctggaatgagttctgcagcatggtgcacaagatcttcgtgtacacgagggaggaggtccagcgcatgaacccgggcgccctgaactcgaggccggaggacagcggcctcgccaattcgacggagaggggctccgcatctactgctgctgctagagaggcacccggctaccagtccgcctcgtcgcttaactccgacaactgctgatgccttggcagctagctggtcgtcccaagtagtagagaacaaggcaaatgtatccatagatctccttgtagcggagcttaatgcctttttttcccctttctaatatgcattggatgagcccgtagcgcaccgtagtagtatctaaagctggtgttctgagttggttggaccttcctgcagttttggtttctccttctgatgtggcaagttttagctggtcgcacctacctaatgtatgcttagcaaacgaagtcccactaagcgctgtacataactgcccctccctgcatcaactctaatatatcatctgcttaatcgtcacccctgggcccccgtgctggttgctcaagatcccagctgcttgttgtggcgcttggtttggttcgttgtcggccgtggctcatgtttgtt

SEQ ID NO: 11282 - DNA, 252 bp, Zea Mays
ctgaggttcggaattggcaacgtgaagaagattttgaggctgctctcaaggatgcaggtttactttaaagtaaccaccgaaacctgtggtgagcagcgctctccggctcaggacaattgaccggtgattttttttgtcgagcctgctgcacaacgttagtgtgctctttctgctcatcctgttcgcagcaccgattttcagggtgatttttattgttttttgatgagcgtgctgcacagcgttgctgtgcta

SEQ ID NO: 11283 - DNA, 59 bp, Zea Mays
cctggtttttttttggattccgagtgtggtccgatttaattttgcattaaaacttttgt

SEQ ID NO: 11284 - DNA, 87 bp, Zea Mays
ttatcttcgtaacgacaccgaatactggcaggacatgcttaagtgcctcatcaccaatgactccataagaacctagaaaaccaaccc

SEQ ID NO: 11285 - DNA, 409 bp, Zea Mays
agttggttctcatcaaagctcgcaactacttcctcccctccccttccttcccttccggccgcctcttgtcctcctcacctcccaaattgaaatcctcctccctccccgcctagggttccgcttcctcccccgtccgagcaccactcaagcggcggcagcagcggtggcagcctggaagcagtcccatctcgtcgccctagacttccctgccgccgcacgtctcagtttcttgttcgcccgctctcctgccggtccgcccatcgcctgaggttcttacggtgccacggagttggcaactgcaaggagtgatattgtggtacaacactagttctaattgaagtaataaggcgggggtgaaactgtctgctaccattgcttccatgtgtatgacatgaattgtctgtgacac

SEQ ID NO: 11286 - DNA, 71 bp, Zea Mays
tgcggagtagcccgcgcttggggtcgacttggctcatcttccgcgtcacacgattaattaacgtacctcat

SEQ ID NO: 11287 - DNA, 85 bp, Zea Mays
ttgcgtaggggcaccaacgaggattagtcgggaccttacacggttccggatacctcggtaaaaataccggcgtcatccacgagag

SEQ ID NO: 11288 - DNA, 720 bp, Zea Mays
cgacagcccgccaactgcagccgtcggatactcccacaggagcgttccgaagccctaatgctcgcccttcccataagtactctcctctgaccacgccgccgccatttccttcctcctcccacctcggcggccggcctcctcttctcttcacccacacgctggtcatagagatgtcggctgcagaggcgaaggcggcggcggtcccggagtctgtgctgcggaagcgcaagcgggaggagcaatgggcagcggacaagaaggagaaggcgctcgcggacaggaagaaggcgctcgagagccgcaagatcatcttcgcccgcgccaagcagtacgccgaggagtaccacgcccaggagaaggagcttgtgcagctcaagcgtgaggcccggttgaagggtgggttctatgtgagcccagaggccaagcttctgtttgtggttcgcatccgtggtatcaatgccatgcaccccaagacccgcaagatcttgcagctcctgcgattgaggcagatcttcaacggtgtcttcctcaaggttaacaaggcaaccattaacatgctgcgcagggtggagccatatgttgcgtacggataccccaacctgaagagcgttagggagttaatctacaagagaggttacgggaagctgaacaagcagaggattccacttagcaacaacagtgtcatagaggagtctttgttttactttctgtgcgtgttag

SEQ ID NO: 11289 - DNA, 72 bp, Zea Mays
tgactccgatcttagtagttcttgatcccgcgatctcgtagcaacgcgtagattattattatacagtttgtt

SEQ ID NO: 11290 - DNA, 100 bp, Zea Mays
cttccattcctgctgtgcctcgcttccattgtgttcgattaaatgtcggaccaagaatccacaatgtcgctcatcctcgctgtgaaaccctcacgctcac

SEQ ID NO: 11291 - DNA, 1572 bp, Zea Mays
cagcagtgttggtttcgtggagaccctagagaatgatcttttggagcttcgaggcaagggtattgatgcacagattgcttctggtggtggaaggatgtatgttaccatggaccgttatgagaatgactgggatgtggttaaacgtggctgggatgctcaggtgctcggagaagcaccctacaaattcaaaagtgcacttgaggctgtgaaaacactgagagcacagcccaatgctaatgaccaatacttgcccccatttgtgatagttgatgacagcggcaaagctgttgggcctgtattagatggtgatgcagttgtcactatcaacttccgggctgatcgcatggttatgcttgctaaagcactagagtatgcagattttaacaattttgaccgtgtacgtgtccccaaaattcgatatgctgggatgcttcagtatgatggtgagttgaagcttccaagtcgctaccttgtttccccaccagagatagatagaacatctggggagtacttggtgaagaatggcatccgcacctttgcttgcagtgagacagtgaaatttggccatgtcacatttttctggaatggtaaccgctcgggatactttgatgaaactaaggaagagtatgtagaagttcctagtgacagtggtattacattcaatgttgcacccaagatgaaggcgcttcaaattgctgagaaagctagggacgctctcctaagtggaaagtttgaccaggtacgtgtcaacctgccaaatggtgacatggttggtcacactggggatattgaggctaccgttgttgcttgcaaggcagctgatgaagctgttaagatcattctgaatgctgtcgagcaagttggtggtatttaccttgttactgccgatcatggcaatgctgaggatatggtgaaaaggaacaaatctggcaagccgttgctcgacaagaatggtggtatccagattctaacctcgcatacccttcagccggtgccggttgccattggaggccctggtcttcaccccggagtgaaattccggaacgacattcaaatccctgggctcgccaatgtagccgcaactgtgatgaacctccatggatttgaggcccctgctgactacgagcaaaccctaattgaagtggctgacaactaaatactggccagctatgtccaattttggttctatagttttgagaagggatatggccatgccattcaataatttctgtttgcaagcacgttgctcaaactcaccaaaacattgagaaacgccttttgacttgcatttagatgctctatttataccgttgacaatcgtctcttctggcttttagcagtttgatggctatctttacttagctatataatgtatctgagactgcaaactttgtgtcagtcaaactgctcgaggttatatgctgtttgtgtgggtcatcacgtgtgattaccttcgcacgcattgacgcatgaattgtgttcaccattctaattgcaaggcattttgatgggctacaatgtttgggagcaagataatttcagccccttcattcgcctagctctcccaaataa

SEQ ID NO: 11292 - DNA, 62 bp, Zea Mays
ccttttccttgattcctatttaaccaacatatccttgagagtcatttttccttagtcgggta

SEQ ID NO: 11293 - DNA, 2230 bp, Zea Mays
cacgcttggcggtccccgtagaccaagtccactcgccgatccctctccgagatctccacccacttatttcccctcccaccgcggccaggcctcagtcctctctgtcgcggagccgccgcaacccagcgtcccccgaagtctaaccctagatccggaccggccatggcgtcccgccgggtcgtctcctcgctcctccgctccgcgtcccgcctgcgggccgcctcgcccgctgctccacgaccgcgcgcgccaccgcaccgcccgtccccggccgggtacctcttcaaccgcgctgccgcctacgcctcttccgccgcggcccaggcggcacctgccaccccgccgccggccaccgggaagaccgggggcggcaagatcaccgacgagttcaccggcgctggcgccatcggccaggtgtgccaggtgatcggcgccgtcgttgacgtgcgcttcgatgagggcctcccgcccatcctcacggcgctcgaggtgctcgacaacaacatccgcctcgtgctcgaggtggcgcagcaccttggcgagaacatggtgcgcaccatcgctatggacggcacggaggggctcgtccgcggccagcgcgtcctcaacactggctcccccatcaccgtgcctgttggcagggctacccttggacgcatcataaatgttattggtgaaccgattgatgagaagggtgacataaagacaaaccacttcctccctattcatcgtgaagcccctgcttttgttgagcaggccactgagcagcaaattcttgttactggaatcaaggtcgtggatcttcttgcaccctaccaaaggggtggaaagattggtctcttcggtggtgcaggagtgggtaaaactgtgctcattatggagttgatcaacaatgttgctaaggcccatggtggtttctctgtgtttgctggtgttggagaacgtacccgtgaaggtaatgatctgtacagggaaatgattgaaagtggtgtcattaagctagatgacaagcagagcgaaagcaagtgtgctcttgtttacgggcagatgaatgagcccccgggtgctcgtgctcgtgttgggttgactggtttgactgttgctgaacatttccgtgatgctgaaggacaagatgtgcttctgtttattgacaacattttccgttttactcaggcaaactctgaggtgtctgctcttcttggacgtatcccatctgctgtgggataccagccaacccttgccactgatcttggaggactgcaagagcgtattacgacaacaaagaagggttctattacatctgtgcaggccatctacgtgcctgccgatgacttgacggatcctgctcctgctactacctttgcccatcttgatgctacaactgtgttgtcacgacagatctctgagcttggtatttatcctgctgttgatccactggattccacatcaagaatgctttctccccacgtgctgggtgaggatcactacaacactgctcgtggtgtgcagaaggttcttcagaactacaaaaatcttcaggatattattgctatcttgggtatggatgagctcagtgaggatgacaagctgacagtcgcccgtgcaagaaagattcagcgtttcctgagccagcctttccatgtcgctgaagttttcacgggtgctccaggaaagtatgtggagctgaaggaaagcgtgaagagtttccagggtgttttggatgggaagtatgatgacctccctgagcagtcattctacatggttggtggcattgaggaagtcattgctaaggctgagaaaattgccaaggagtctgcttcataaggaggcttcttgcttgttcaaccctgtacaagttccatttttggattttaagcgtttatttatgcttttcccagttaggcatgacgagctggagagtccatctcctgctgagagatgtttgttttacccttctttgcttcctccaccttacacccaaataagcaactgcagtgacgttggttttggctgcacccaaactacatgactgaagaaacttgtggcctgtgtaacgcgaatccatcagaacgccaaagttatggcttctggttgtggcaaattatggttcctccctgttcggttgagtggttgcattctggaggtatcttgttctggactcaggctaatgattgtgcgtgcaactgtttcggagtcatttcaaagtgccaatgattaagcaattgcaggc

SEQ ID NO: 11294 - DNA, 760 bp, Zea Mays
cccgatacaaaggttgggttggctgccagcgccagtagattgtgtgtgatcgctggaaatatttctcctattgatgtgattacacatgttccgatactatgtgaggaagctaatgttccttacgtatatgttccatcaaaagaggatcttgcgaccgcaggaaccactaagaggccgacttgttgcgtcttggttctgaccaaaccaaacaagggggagctcagtggagaggtgaaggataaactgaagtcggactatgaccaagttgtaacggaagtcgctgaggctacatctgcaatgttctgaggaccacattatctgagaatccggcaattccctgtgcacgtctttcttggtgtagtatcctgcccagcttctgtgaaccgaaccaatatgttttgcacggtggctggagcgagatatgactatgagtttacctatatgctatggaccatccttgttggcggcatatgattctaccagtgattagatctagccaattacaatcagttctgtgagcagactgtttccttgtgttgtcagatctcggtagctagtgtgtgcgttccaggtctttttgatcttatcacaagatgtgctcgtgatacttgtgttgaaggaactgtggtatcttagcgccttatatcaagattagtttttggcttctgctcgtattgggtaaaacttggaatgtagagcatcccgtcaatgccctaaacaatgataagcaaaagatccagcggcaaaatggccttagttt

SEQ ID NO: 11295 - DNA, 57 bp, Zea Mays
cgcgctacgacttcttttgtgcacgctcggtcacgcgcaggatgacttcctttactg

SEQ ID NO: 11296 - DNA, 59 bp, Zea Mays
agaaaacaaagaagaagtggtagtcgaagaagaagttgccccgcaagctaaaattccac

SEQ ID NO: 11297 - DNA, 1949 bp, Zea Mays
gaaaaaacgcaggtgtcgaaacacattttcttgctccagagaatttaaaccgctgcgaattcaattcgaaagccccaagagagcatccatggcttccgctaccacctccatctcgtcgcaccccgccgccctccgcgacgtcaaagctgcgaggattggcgggctgaggcagcagcaggcgagcgtggccccgtcggcggcggcagcgcgtggccagcgcgctcgggcggtgcgatcgctgcgcgcggcggagcctgcgaggcagccggtggcggcttccgcggccgcggcggcgccggccgcgcccgtggccgacgaggcggcggcccttgcggccgtggactacgaggccctggcgcgtgagctggagggcgcgtcgccgctggagatcatggatcgggcgctggccatgttcggctccgaaatcgccatcgccttcagcggcgcggaggacgtggcgctgatcgagtacgccaagctgacggggcgtccgttccgggtgttcagcctggacacggggcgtctgaacccggagacgtaccagctattcgacaaggtggagaagcactacggcatccgcatcgagtacatgttcccggacgcgagcgaggtgcaggagctggtgcgcaccaagggcctcttctccttctacgaggacggccaccaggagtgctgccgggtgcgcaaggtgcggcccctgcgcagggcgctcaaggggctcagggcgtggatcaccggccagaggaaggaccagtcccccggcaccagggccagcatcccccttgtccaggttgatccttccttcgaaggcctggatggcggggctggtagcttggtcaagtggaaccccgtggccaacgtcgacggcaaggacatctggactttcctgcggaccatggacgtacctgtcaacaccctgcatgctcagggctacgtgtccatcgggtgcgagccgtgcaccaggcccgtcctgccggggcagcacgagcgtgaaggccggtggtggtgggaggacgccaaggccaaggagtgcggcctccacaagggcaacatcgacaaggacgcccaggcggcggcccccaggtccgccaacggcaacggctcggcgggcgccccggacatcttcgagagccccgccgtggtgtccctcacccgcaccgggatcgagaacctgctgcgcctggagaaccgcgccgagccgtggctcgtggtgctgtacgcgccctggtgcccgttctgccaggccatggaggcctcctacgtggagctggccgagaagctggcggggtccggggtgaaggtggccaagttccgcgcggacggcgagcagaagccgttcgcgcaggccgagctgcagctgcagagctttcccaccgtgctcctgttcccgggccgcaccgccaggcccatcaagtacccgtcggagaagagggacgtcgactcgctcctcgccttcgtcaacagcctccggtgagagacgacctccagtgagcgagaaccatcgttctctgtcagtctgtatgatcttatgttggtctttatgagtttatctaggttcgtagagaagggaggtggaggggactgggtttggtagtgacacaggaaggaacgagggttcaggggggaaaaatcaggtgtagcttttgtaactgcaaaatgattgcagcatgtatacctgaagtctgagcttctgaggccctgtgcttggtagctgagggagaggttacttgtgtgtgcttatagtcagtggcgagtgcctactataaggttcaccggtcatctaaagcactgttgtaaactgtattatttggagagtggagttttaatataggcataagaatgggtaagtcgctggagatagtctaagaaaaatcaaataagagaccaagatttgagagttttcgtttgtttataggttggttgtcaactatatagactgtagaaatcgg

SEQ ID NO: 11298 - DNA, 1913 bp, Zea Mays
gaacgagagcgacagaagcagagagcgtgtcgataaaaaggcgtaaaagccatcgccactctttccccatcccacgctgccctcggcgctgcgcctggccccggcacctacctcccccctccccacctcgccgccggcgggtggagtcgggctggagcagccgctctcctctgttaccccctaaccccctataaagaaaaagaaaaaaacagagagagagcgagcgaccggcggctcggcagccatggggcacggcgtcagctgcgcccgcaccggtgacgagcacgactacttccgcgcggcgcaggtcggggacctcgaggccctggaagcgctcctcgacgctgacccctcccttgcccgccgcgccacgctctacgaccgcctctccgcgctccacatcgccgccgcgaatggccgcctcgaggtgctgtcaatggtcttggatcacggggtgccgccggacgtggtgaatcggcacaagcagacgccgctgatgctcgcggcgatgcacggcaagaccgactgcgtgctgaagctcctgcaggccggcgccaatatcctcatgttcgactcccagcacgggcggacctgcctgcaccacgcgtcctacttcggccacgtcggctgcctgcaggccatcctcacggcggcgcggaccacgccggtggccaactcatggggtttcgctcggttcgtcaacgtgagagacgaccacggcgccacgccgctccacctcgccgccaggcagggccgccccggctgcgtgcaggcgctgctggagaacggtgccatcgtctccgctttgaccggctcatacgggtttcctggtagcacgtcgctgcacctcgccgctcgcagcgggagcctggattgcacccggaagctgctcgcctggggagcggatcgtctccggagggattcagcagggaggatcccttacgccgtggcgctgaagcgcaaccacgaggcgtgcgcggcgctgctgaacccgtcggcggcggagcccatggtgtggccgtccccgttcaagttcatcagcgagctggagccggaggccaaggcgctccttgaagcggcgctgacggaagccaacagggagagggaggagaagatcctcaggggcaccaagcactctccgcatcctcccacctgggaccacgcgagcgacgccgccgacgccgacgccatcgacgacgcgtcctcagatgccagcgccagcgacgcggagctgtgctgcatctgcttcgaccaggcgtgcacgatggaggtgcaggactgcgggcaccagatgtgcgcgccgtgcacgctcgcgctgtgctgccacagcaagcccgacccggtgacgctagcgctgccgtcgccagcctgcccgttctgccgcggcagcatctcgcggctgctgctggtggcccgggcaagcagcgacgacgcagacaccgagaagtcggcggcagcggctgcggcagcggctgcctcctccccgcagctcgtccggcggcggtcccggcggtcgcacaacctcagcgacggcggcagcagcagcttcaaggggctgtcgtccgccgtggccggttccttctccaagatcgggcgcgggtcgagccggacgatggccgacagcgacggctgcggcgtggacaagcccgagcacgacccgtgatcggcattggatcctgcgcatgtggagccgagcgcggggccatttgcggacatccaatcgaatccaagccaagcgtgactgcttgctgcgaaaataaccgcatccttttcttcttcttctccccatgtccctgtctgtcaatcctattcttgggcgtgccaggatttgttcacctggccattgccgtattccattgtcaccgaccggctatagtatatagtactagattccatttccattccaaaaaaaa

SEQ ID NO: 11299 - DNA, 317 bp, Zea Mays
cggccgcctccttccttcccaccaaaaccccgttaaaaaaaactctccctctggcgaccgaaaatcactcgccgctgtcgccgtcgccgcgcctcccggaccaagtacccgtcctgcctctgaaggcgttccccgaaaggggaacagagcgggggtaaatcccaggcaaccgccaagcgggaagcgccaggaggaggaggtaacgcggcggggaagtccggaagtggccggcagcggggaggaggggcggacggtggaggggcagcagccggaggagagggagctggaggagggacggggaaggggatggggcgaga

SEQ ID NO: 11300 - DNA, 63 bp, Zea Mays
taaaaaagaaggggaaaaaaaaaaaaaaaaaaaaaaaaaagaggaaaaaaaaaaaaaagaaag

SEQ ID NO: 11301 - DNA, 864 bp, Zea Mays
gccagatgttactttctgaagatttgacatgaacctgttccagacaacttcccatttgaattaatcgacgaagagggcatgagcgtggttattttgagaagggactacaaggacgagaaggtcgaggttactgtcagcatgcctaatttagaaggaggccccgagtttggtgatgaggatggcgagggcgatggtgagagcgctgtcaaggacgacggagaagcagaagaagatgacgagagtgccggggatagcagcatctctcttaaggtggtagtttccaaagactctggcccaaagctcgagttcacatgcacagccttccgcgaggagatcaccatcgatgatatgctgatagttgagaaaacagacgacgacgacggagaagagaagttcccctacgagggccccgagttcaccgagctccctgtgaatgttcagaaaggcctgttcaagtacctggagcaaagaggggtaacgctgtcggctaccaactatatgcacgattacatggtgactaagcaggctcaggagtacatccggtggatgactaagctgaaggatttcgtgacgcagtgaggaacagcgtcgtgattcggcagcattgtttggttagcctagccttagcatgtgttacagccttacaggaacactacgactacaccgaattggccacactccccaaaaaacaaaaaagggggagcattgtatctgcttcaatgtatctgtatcagctggcaaaacagtagcaagtagatttccagtaatgtttagtggtgggcattaggtattacgatacgtatctggatgaatgttttggaattctggtggctgttagaaataaatgcgacacaaaataggatc

SEQ ID NO: 11302 - DNA, 76 bp, Zea Mays
aattaacctatactaaagaggggaaacacttcaagcaagacatcacaaacattcataaccaagcattagatagaga

SEQ ID NO: 11303 - DNA, 2482 bp, Zea Mays
gccacacacgatcaccatcacccccgggctcccgacccagtacaaatagacacgcacactcccaactccccacccatctccgccgcgcacaccgcccaatcagccaatctcctcctcctcctccgctctcagacgagcagcggttgccatcactctccacttcccacgcccgctgcgggctcgcaggcggcagagaattgtctgtgccgccgggtgggaatttgattcggtcggattcgctgcgccgcgatgccggagcggcaccagtccatcgacgcgcagctgcggctgctggcccccgggaaggtctccgaggacgacaagctcgtcgagtacgacgccctcctcgtcgaccgcttcctcgacatcctccaggacctgcacggcccccacctgcgcgaattcgtgcaggagtgctacgagctctcggcggagtacgagaacgaccgggatgaggctcggcttggcgagctcgggagcaagctcaccagcctgccgccgggggactccattgtcgtcgccagttccttctcgcacatgctcaacctcgctaacctcgccgaggaagtgcagatcgcgcaccgtcgccggatcaagctaaagcggggagacttcgccgacgaggcctccgcgccgacggagtcggacatcgaggagacgctcaagcgcctcgtctcgcagctcggcaagtcgcgggaggaggtcttcgacgcgctcaagaaccagaccgtcgacctcgttttcaccgcccaccctacacagtccgtgaggaggtctcttctccagaagcatggaaggatccgtaactgcctgaggcagctttatgccaaggacatcactgctgacgacaagcaggagcttgatgaggcacttcagagggagattcaagctgctttcagaactgatgaaatccgcagaacccctcccactcctcaagatgaaatgcgtgctggaatgagttacttccatgaaactatatggaagggtgtaccaaaattcttgcgccgtattgacaccgctctgaaaaatattgggatcaatgaacgtctcccttacaatgctcctctcattcagttctcttcctggatgggtggtgatcgtgatggaaatccaagagtaacaccagaggttacacgggatgtatgcttgttggcgagaatgatggctgctaacttgtacttctctcagattgaagatttaatgtttgagctgtctatgtggcgctgcagtgatgaacttcggatccgtgcagatgaactacatcgctcttcaagaaaagctgcaaagcactatatagaattctggaagcaagttccgccaaatgaaccatatcgtgtcatacttggtgatgtcagggataaattgtactacacacgtgaacgttctcgtcacctattgacatctggaatttctgagattctagaggaggcaacttttactaatgttgaacagtttctggaacctcttgagctctgttatagatcattatgtgcttgtggtgacaaacctatagctgatggaagtcttcttgatttcttgcgtcaagtatcaacttttgggcttgcccttgtgaagctcgacatcaggcaggaatctgatcgacacactgatgtccttgattcgataacgacacatcttggaattggctcctatgctgaatggtctgaggagaaacgccaggattggctgttgtctgaactgaggggcaaacgtccattgtttggttcagatcttcctcagactgaagagactgctgatgttttaggcacatttcatgtccttgcagagcttcctgcagattgctttggcgcgtatatcatctctatggcaactgccccatccgatgtgcttgcggtcgagcttttgcagcgtgagtgccatgtaaaacatccactgagagttgttccactttttgagaaacttgcagatcttgaagcagctccagcagctgtagcacggctcttttcaattgactggtacatggataggattaatggcaagcaggaggtcatgattggatattcagactctggcaaagatgccgggcgtctctctgcagcatggcaaatgtataaagcacaagaagagctcatcaaagtggcaaagcattatggagtcaagttgacaatgtttcatgggaggggtggaacagttggcagaggaggtggtccaactcatctggccatattatctcagccaccagacacgatacatggatcacttcgtgtaacagttcaaggcgaagttattgagcactcctttggagaggagctcttgtgcttcagaactttgcaacgctacactgcagctactcttgagcatggcatgcatcctccgatttcccctaagccagaatggcgtgctctgatggatgaaatggctgttgtagcaactaaagaatatcgatcaattgtcttccaagaaccacgcttcgttgaatacttcagatcgtggactgctattaaactcgttctagaagtcg

SEQ ID NO: 11304 - DNA, 849 bp, Zea Mays
ccgctgctttcccacagcacccccaccgccgatccggactgcctatgatgtgtccattaatgacgactcttggccaacagaagtgtttgagcttgtcactggagagaaatcgaagacattggaaaggcttgaccctggtgccactgcttcacacacatatgtcctggagaccaaaacacagggcaggttccagggttcaccagctatcattacataccgtgttcccacaaagacagctcttcaggaggcatactcaactcccatcttcccactggatattctcgctgagagacctccagagaagaagtttgaatgggctaagaggcttgtgatgaaatacgggtcacttgtgtctgttgtctcttttgttggactgtttatctaccttgtcgcgagcccgtcgaagagcagctcaaaggcaagcaagaagagacgctgatctacttataggtcgcagttgacggtgtagctggtggttttgcctggaggaactcttggtagtttgagctgtgcgaaagcttttaagtttacatttactcaccactccatgaacggcaacgaagtattcatcagttagaaaagtgcacctataattttggttgcttataactttctatttgtcagagatttaactcgaaggacctgtaactaggaaagttaattttgcttggaagaacattttgatatgatcgttgttcctgtgcttcgtgcgtggtgccgtgaaattgagaggaaccatttggtgggacgttttcagctgacaatggtcatgacattgcaactgccgttaatctgaaccatgcatgttgaagatcacatatttaatagttaggccctgtttgggagcgc

SEQ ID NO: 11305 - DNA, 77 bp, Zea Mays
ctgatgatcgagtttgacttccctcctttcttgacgaggttgatcttgtccttttcgggtcttagtctcattgattt

SEQ ID NO: 11306 - DNA, 62 bp, Zea Mays
tcaagaagcaaaaagttctagcggaaccgaaggattcgactcccaagaaacgaaagcttgtt

SEQ ID NO: 11307 - DNA, 1799 bp, Zea Mays
ttcagtatagagttatgattatggaaaaactttggcttttgtcttgcccatattggaatctttggttaacggggcaaataaggcatctaggcggactgaacatggcaggaccccaagtgttctcgttctgctaccaacaagagagctggccaatcaggtgcatgccgactttgagttttatggtgcaacatttgggctttctgcatgttgtgtgtatgggggttcaccttatcgtcctcaagaaatggcattgagaagaggcgtggacattgttgttggaactcctggtcgtatcaaggattttattgtaaaaggaactctcaacttgaaatgcttgaagttccgtgtccttgacgaagctgatgagatgcttaacatgggctttgttgatgatgtcgagctcattcttggcaaggtagaagatgctaccaaagtacagacacttctgttcagtgccactctgccagattgggtgaataagctctctatgaggtttctgaaagttgacaggaaaacagttgatcttgtcggtaacgagaaactgaaggccagtgcatctgttaagcaccttgctcttccttgtaacaaggcagcaagggcacaacttattccagatattatccgatgttacagccatggaggccgaaccattatcttcactgagacgaaggattctgcatcagagctttctggtttgattcctggatcccgtgccttgcatggagatgttgtgcaagctcagcgtgaagtcattcttgctggatttcgtagcgggaagttccaggttttggttgctacaaatgtggcggctcgtggtctggatattaatgatgtgcagcttatcattcagtgtgaacctccccgtgacgttgaagcttacatacaccggtcaggtcggacagggagagcaggtaatactggtgttgctgtcatgctttatgagcccagatataagtacagtgtcagcagactagaaagggaatctggggttaagttcgaacatatctctgcaccacaacctactgatgtagcacaatctgctggcagtgaagctgcagatgccattgcgagtgtgtcagacagtgttattcctgtcttcaggcagcaagcagagcagttgctaagctcttccactctgtctgcggctgacttgcttgccaaagctcttgcaaaggcagttggttacacggacataaagaaaaggtcattgttgtcttcaatggaggattacgctacactacatcttcaaactggcagacagatgtggtcacctgggtttgcttttactatattgaaaaggttcatgccagaagagaaacttgcagatgtaaagggtgcaaccctcacggctgatggaacgggggttgtatttgatgttcctgcagcagatgttgaagattacattcaagcttcggagaatgccgcacaggtgacaattgatgaagtccagcaattgccacccttgcaagagaagcagctggcggcagggggaggcggcggcaatagatttaacaggaggaattagaagctgctgcaatcttaacggacgtttcagtgacgtagttttgaggaagagggggagggaatattctcagttttggctgcaattgtatcgggttttgtttatttgttagcgttcgtcaacgagaatacgacacacatttttgccaacgcaagaattcgcgtttatctactcgaaatcaaccaacgtgttattactaagtaaagctataaacctattgttttaacttgacatggatgctgactcggtctcctttggtcagaaagtgtagtttcta

SEQ ID NO: 11308 - DNA, 2738 bp, Zea Mays
cgctatgcacacgagttaatggttaatttgcttgaatccatgcataaatgctgtttaccttctggggtatcgactgagtctcaaagtgcttatgacaaaagcttagttcacaaaatatttggtggccgccttagaagtcaggtcaaatgcacacgttgcttacattgctccaataaatttgatcctttcttggatctcagtcttgagattgccaaggccacgactttggtgcgggcacttgaaaattttaccgaggatgagctactagacgagggtcaaaaggaatacgagtgtgaacgctgcaggcagaaagttgtagcaaagaaacgacttacaattgataaagcccccaatgtcttgacaattcatctgaagcgcttcagccctttcaatcctcgtgagaagattgacaaaaaagtggacttccaatcaattcttgatttgaaaccatttgttagtgactctaaaggaacagattttaaatacagcctttatggtgtcctagtccatacaggttggagcactcaatcaggccattactattgctacgttcgtacatccagcgggatgtggcacaatcttgatgataaagaggtgcgccaagttcgtgaagcagacgtattgaagcagaaggcttatatgttattttatgtacgtaacagtattgggaagtcggtggtgtgcaaagataataatgctgctaatttgctcaagaagaaaacctctgaaaaaatctcaagtttgaatggtattgcacaaaccaatgtaagagcacaaaatttgaatggtgtgtctccatttggtgataagacgcacggcacaatcattggctactctacaatttccagcaagactaaaacaatccactgttcaaagaatgaggtcaaagctgaagatgctccagcctctcaaaacaatgctctaccttccacacaagcccccatagctcgaaatgatgttggtatcttgccaactaaaccaatgcagtttgctgtaaaaaatgaggagaaaacctcatcccaccaacctgcgccatttacaaatacttgtggtgaacaaacagttgttgggaggcccttgcaggaaatggaacctaaggctggtgcaggggaaaatacttctgttgtctctgctgttgctaatgatgccgctacattgtccaaggcagacaaactaacttctcagcctcaaacagctccatcttccaagccaactgccaatgtaaaggacacagctactgagtttgctacactgtctttatcaaagaaggattctgttgtttcaaatggtgctgtgcttagcattggatgtctcacatccggtgagaaagcaatgaacttatcagaatctgtggatcaagctaatgaaatcacaaaggcacttcctacgagtcagaacaatactgcaccagtaattgctcaagcagattgtggagtagagatcagctctggtgtcatcatgcacgttgctgtgtctgcttcatgcaatggaactacagagaaaaaggtgaattcgaagtcaaagaagtttgtgaggtatcctgttgtgaacatgtggttagggtccagacatctaaagccagggaagaaagcgaaccgcaagagaagtaaaatgataagacgtgttgtagcctgcaaggacgcggcaaatttatcttgtttgagtgagcagctgacgtcaacatcgtccactgcatgctctgaaaccgtagaatgtacctccagccatcagaaacggtcacatgctagtgcaaggtccaaagatgacgcccagtcctcgcaaaacaagcagaaggtcgacggagctcgtgtcggtgctggcacaagtgcaccttcttgcagtgccggcgttccaaagtctgatccgaacccttccacagatgctaaggttgtagcgacccagcctgccagtattcgcgcaacggacctgatggaagctaccgttccgcgctgggatgacgtagacatgccaaacataaaggtcgctgagccgcagtccaaacgcaagagcggtggctacatcttagatgagtgggacgaggagtacgaccgagggaagacgaagaaggtgcggaggtcaaagcaagactttggcgggccaaacccgttccaggaggaggcggactacgtatcgcagcggaggacgaagcagaaatcctaccgaggcaagtcttggaacaagcgggcctaacacggtagagaggggggagttgagagaatacgagagagagagagagagagagagaatccccggacgcacatgctgtttgttgttacgttttagcacccattggtgagggagatttacgtttaaaaaccatatccgtcgtcggtacggtagtccccattagttgtcgacgatgtgacgttttgggcagttttcgtagaacatttgaaacatttgttcggttgtaacggagtgctgtttagttgagttggggggaacaaaattggcgagactattttgctgcattctgctctgctgtttttagttactgatgaagaataaaacgatggtggtgatcagttttatgattcagtgcttgccaatgcgatctttatccttttgggaaggaaaaaaaaaatccatctttgcaatttggaatgtaattctcctcctttttctttttgactgtgctgtaactgtaagtgcagtagaaggccgcaaggcaaggaaaccagaccggtggcgcggtgttgtagttgtagctggcgatcccacttgtttttattgttttt

SEQ ID NO: 11309 - DNA, 982 bp, Zea Mays
caattttccatgttcttttgaactggtgacaaggaacgctgttcgcaattccggcgccggcaccatgagtaagctgcagagtgattctctgagggacgcgattgcctcaattaccaatgattcccgtgagaagcagcgcaaatttgttgaaaccattgagctacaaattggactgaagaactatgaccctcaaaaggacaagcgcttcagcggttctgttaagctgcctcacatccctcgccctaagatgaaggtttgcatgcttggtgatgctcagcatgttgaggaggcagagagaataggtatagacaatatggatgtggaagccctcaagaagatgaacaaaaacaagaagctagtgaagaagctggcaaagaagtaccatgctttccttgcatctgaggctatcattaagcaaattcctcgtcttcttggtcctggtcttaacaaggcaggaaaattccctaccttggtgacacaccaggaatcccttgagtccaaggttaatgagacaaaggctacagttaagttccagctgaagaaggtgctttgcatgggtgttgctgttggcaactgcggcatggatgagaagcagatcttccagaatgtgcaaatgagtgtcaacttcctcgtgtcgctcttgaaaaagaattggcagaatgtgagatgcttgtacctgaagagcactatgggaaaggtgtaccggctgttctaaattttccaattaggcttagaatttccaggagactcgagtgcttggacacttgccattttccctaccatccatttttttgagcaactatggattatctagttacaaacttggtcttgtacttgatgttttgttcttgataccgaacctatgacattgttaccttatttcaatgtttctctcgtcacccacaggccgggggctacgatgtccttgagtcctatccgtacggtagcctagttttttgccctgcttgcttaacagcatcca

SEQ ID NO: 11310 - DNA, 1239 bp, Zea Mays
attaagaagaagcactcgatcggtctaagtgatcggttgagagaggggaaggaaatggctgatggtgaggacatccagcctcttgtctgcgacaatggcactggaatggtcaaggctggttttgctggcgatgatgcaccaagggcggttttccctagcattgttggccgtcctcgccacactggtgtcatggtagggatgggacagaaggacgcatatgttggcgatgaggcacagtccaagagaggtattcttacgctcaagtacccgattgagcacggtattgtgagcaactgggatgacatggagaaaatctggcatcatactttctacaacgagcttcgtgttgccccagaggagcaccctgtgttgctcaccgaggctcctttgaacccaaaggccaacagggagaagatgacccaaattatgtttgagactttcaatgttcctgccatgtatgttgcaatccaagcggtgctctcactctatgctagtgggcgtactactggtattgtactcgactctggtgatggtgtgagccacactgtgcccatttacgaaggatatgcccttcctcatgccattcttcgtttggatcttgctggtcgggacctcacagactccctcatgaaaattctcactgagaggggttactccttcacaacctcagccgagcgagaaattgtaagggacatcaaggagaagctagcatatatagcccttgactatgagcaagagttggaaactgccaagaacagctcttcagttgaaaagagctatgagctacctgatggacaagtaatcaccattggtgcagagagattcaggtgccctgaggtcctcttccagccgtcgatgattggtatggaggctgctggaatccatgagacaacatacaattcaatcatgaagtgtgacgtggatatcaggaaggacctctatggtaacattgtgctcagtggtggttcgactatgttcccgggtatcgctgatcgtatgagcaaggagatcacttcccttgcaccaagcagcatgaagatcaaggtcgttgcaccgcctgagaggaagtacagtgtctggataggagggtcgatcctagcctcgctcagcactttccaacagatgtggatatcgaaggaggagtacgacgagtctggcccggcaattgttcaccggaagtgcttctagggtttcacaagttcctcgtcgttacctagtctcaaattatgtcccctccat

SEQ ID NO: 11311 - DNA, 1764 bp, Zea Mays
agtttttttagaaaccactctcatcctctcgcaccgcaccgttcgcttcctttcgtcaactccactcctcttggccgccgcattacctcctcttcgccgctgccgccaccgctccaccgggcagccagccagccatggatgaggagtacgacgtgatcgtgcttggcacggggctcaaggagtgcatcctcagtggtctcctttccgtcgacggcctcaaggttttgcatatggacagaaacgactactatggaggagattccacctcgctcaaccttaatcagctctggaagaggtttagaggggaagacaagcccccagcacatctaggtgcaagcagagactacaatgtggacatggtgccaaagtttatgatggcaaatgggacattggttcgaaccctcatccacactgatgtgacaaagtacttgtcattcaaagctgttgatgggagctatgttttcagcaaagggaagatttacaaggtccctgccactgatatggaggctctgaagtcccctttgatgggtctattcgagaagcgcagagcaaggaacttcttcatttatgtccaagattacaatgaagctgatccaaggacacatcaaggattagaccttactagggtgacaactagagaacttatagcaaaatatggtttaagtgatgatacagtggatttcattggacatgcacttgctcttcatagagatgatcgctatcttgatgaaccggcacttgatacagtgaaaaggatgaaactatattcagagtctcttgcgcgctttcaaggaggctcgccatatatctatccattgtatggtctgggtgagctaccacagggttttgcacgattgagtgctgtttatggtggtacttacatgttaaacaagccagagtgcaaggttgaattcgatatggaggggaaagtgtgtggtgtcacatctgaaggtgaaactgcaaagtgcaagaaggtggtctgtgatccttcgtatttaccaaacaaggttaggaagattggtagagttgttcgtgcaattgctatcatgagccacccaatccctaatacaaatgagtcccactcggttcaaattattttgcctcagaaacaacttggacgtagatcagacatgtatgttttctgttgttcatacacgcacaatgttgcgccaagagggaagttcattgcatttgtgtctgcagaagcagagactgataacccgcaatctgagctaaagcctggaattgatctacttggttctgtggatgagatattatatgatatttatgacagatatgaaccagtgaatgaaccatctcttgataattgctttgtcacaacgagctatgacgccaccacacattttgagacaactgtaacagatgtcctgaacatgtatacaatgatcactggaaagactgtggatcttagtgtggatttgagtgcagctagtgctgctgaagaatactgatttcagtcataatgtttatcaaagatcacatcattggggacagcacatgaccaaacttcaatgagtggctagtatgagtttagtcggttccagattataccatgccgacttctactgtacctcgtgaatcgtgatgtctattgggcacttgttgctgacagaactgtgcacaatgttgatccaatttgatggatggtggtggttctgttatttactagtcggtcaaaacactaaacggtggccatcatggctgtgtgatgtatcataactgttcagtaaatttgtgttcttc

SEQ ID NO: 11312 - DNA, 2327 bp, Zea Mays
catcatcaatcaggcaagcgacggtggcttcttcctcccccttcaccgtaccgagacccaaaccaagccgcctcgccagcacccagcagcccgcatcactcgtctccattaaaatcggttttctccttggaaatctgctgccaaatcgggctatagatcaaacgctgcactgtagggagcgtgaagccagcggcgaatggaatccctagccgccacctccgtgttcgcgccctcccgcgtcgccgtcccggcggcgcgggccctggttagggcggggacggtggtaccaaccaggcggacgagcagccggagcggaaccagcggggtgaaatgctctgctgccgtgacgccgcaggcgagcccagtgattagcaggagcgctgcggcggcgaaggcggcggaggaggacaagaggcggttcttcgaggcggcggcgcgggggagcgggaaggggaacctggtgcccatgtgggagtgcatcgtgtcggaccatctcacccccgtgctcgcctaccgctgcctcgtccccgaggacaacgtcgacgcccccagcttcctcttcgagtccgtcgagcaggggccccagggcaccaccaacgtcggccgctacagcatggtgggagcccacccagtgatggagattgtggccaaagaccacaaggttacgatcatggaccacgagaagagccaagtgacagagcaggtagtggacgacccgatgcagatcccgaggaccatgatggagggatggcacccacagcagatcgacgagctccctgaatccttctccggtggatgggttgggttcttttcctatgatacggttaggtatgttgagaagaagaagctaccgttctccagtgctcctcaggacgataggaaccttcctgatgtgcacttgggactctatgatgatgttctagtcttcgataatgttgagaagaaagtatatgttatccattgggtcaatgtggaccggcatgcatctgttgaggaagcataccaagatggcaggtcccgactaaacatgttgctatctaaagtgcacaattccaatgtccccacactctctcctggatttgtgaagctgcacacacgcaagtttggtacacctttgaacaagtcgaccatgacaagtgatgagtataagaatgctgttctgcaggctaaggaacatattatggctggggatatcttccagattgttttaagccagaggttcgagagacgaacatatgccaacccatttgaggtttatcgagcattacggattgtgaatcctagcccatacatggcgtatgtacaggcaagaggctgtgtattggttgcgtctagtcctgaaattcttacacgagtcagtaaggggaagattattaatcgaccacttgctggaactgttcgaaggggcaagacagagaaggaagatcaaatgcaagagcaacaactgttaagtgatgaaaaacagtgtgccgagcacataatgcttgtggacttgggaaggaatgatgttggcaaggtatccaaaccaggatcagtgaaggtggagaagttgatgaacattgagagatactcccatgttatgcacatcagctcaacggttagtggacagttggatgatcatctccagagttgggatgccttgagagctgccttgcccgttggaacagtcagtggtgcaccaaaggtgaaggccatggagttgattgataagttggaagttacgaggcgaggaccatatagtggtggtctaggaggaatatcgtttgatggtgacatgcaaattgcactttctctccgcaccatcgtattctcaacagcgccgagccacaacacgatgtactcatacaaagacgcagataggcgtcgggagtgggtcgctcatcttcaggctggtgcaggcattgttgccgacagtagcccagatgacgaacaacgtgaatgcgagaataaggctgctgcactagctcgggccatcgatcttgcagagtcagcttttgtagacaaagaatagtgtgctatggttatcgtttagttcttgttcatgtttcttttacccactttccgttaaaaaaagatgtcattagtgggtggagaaaagcaataagactgttctctagagaaccgaagaaatatggaaattgaggttatggcttatgactgtcgtttgttcagtatgaaactagatttccaactgtgccttagaagtttgcaaatgtcttgttatataagggccggctcagtagactagtcatgtcttttaatacaactcatgtggtcctctttgttgcatattatattgcatagttatatgttagtgatactcctct

SEQ ID NO: 11313 - DNA, 78 bp, Zea Mays
ttgagcataacatcataagcatgggcatttcatatgtttgacacacctagagtgcattcactaggcaaaaatttcaaa

SEQ ID NO: 11314 - DNA, 57 bp, Zea Mays
tttattttgaacattttggaccacgcttgcaccacatgttttgtttttgcaaattct

SEQ ID NO: 11315 - DNA, 103 bp, Zea Mays
cttgtcagtgggatctggttgtgaggttacatctgtttcatttagcaactgtggcacttatttttctgcttctagcacatcaaataatactttagtttgggat

SEQ ID NO: 11316 - DNA, 1068 bp, Zea Mays
gtcgagaaaaagtccctttttcatagacgaactttgcacgactgtttcttatatagagatttaagtctatagatgatgagcccggcaagcaagtccggagcgcggtcaggatcaagaacatcagcaagtcccatgtggccttcaagttccaaacgactgcaccaaagagttgcttcatgaggcctccgggcggtgtgcttgctccaggggaaagcatcatagcaacagttttcaagtttgtggagcatccggagaacaacgagaagccgatggacaagtgcaaggttaagtttaagattgtcagcctgaaagtcaaagggccggtggagtacgtccctgaactgtttgatgagcagaaggaccaggtcgcggtcgagcaaatattgcgggtagtattcttggatgctgagcgcccaagcccacaaatggacaaactcaagcgccagctagctgaagcagaagcagcccttgaggcacgcaagaaacctccagaggacaatggtccccgtattgttggtgaaggccttgtgattgacgaatggaaggaacgaagagagaggtaccttgctcgccagcagatcgaaggtgttgattcggtgtagacacgaggcagccctgtaaactatgcagaatgaacataccgttttatgggcacgcactccagctgtcaaatggatttggagcttgattttgcgaaggttcggatttggagcaatcaagcaacaatgaggcttttgtgtatttggggttcacgctgaacttctgtcctgggtttgggtgtgtgtagataagcagccactgcttggtaatagtaatagtacgtccttcagccatgtactcgtgttgtggaatgtgggtctctatgtgaatgtgatgcattctctagctgctgtcccgtcaacattaaaagtgtaattgtaatgtcaaaaggcacactccaaggtgattcagtggtagttctgccatcatgttagttgttacagtaattcttccatcacttgtttgtacaactcatacatgtcatgccaccctgagatttatgtcattcagttgtcagtcaaaaaaata

SEQ ID NO: 11317 - DNA, 674 bp, Zea Mays
caggcctgctgtttgctggctagcaaaatgcaacgtcatcgaagttggatatctacatagaggacatccagaaagggaaacatggaagcgattcagggtcatacgacgccgaaggaaggtttgttcctgacaagttcgaagagatattcgccaagcacgccaagactgtcccagacgccctgacgtcggacgagatcgaccagctgctgcaggcgaacagagagcccggggactacagcggatgggctggcgctgaagcggagtggaagaccctctacagcctcggcaaggacaaggacggcctcctccgcaaggacgtcgcgagaagcgtctacgacgggacactgttccacatgctcgcgcccaactggaaatctcccgacgaggaggaggaacaggaactaagcgtgatccgggagagctgaaccgagaggtacaagcaaagtctggttgagagataaggactctgggaccctctgaacatgctgtcaagcaacatgtactactagcggtgtgaacgggtggtgtgaacactcttttcatatcacatcataaaaaaaggtgtgaacagatatttcaatgtacattatcataaaataagataaattcataattcaaataaaaatattctgtgtcttaccaaaacaaacgagatacaaaacaactaaaagaaa

SEQ ID NO: 11318 - DNA, 751 bp, Zea Mays
aatagaaaagcgacggggaaagggtaggaagaaaaaaagagaaaaaaaaacgccggaggccggagggatcacggaatctgagcccaccactcccccgcccccacttgtataaagcgaccccgataccagcccgtcatgggaagaaaaggaaggaagaagggcctcctgtatcctctcacttccctcagtcctcgtccgtctgctccctcctctctctacctagctctagctagccttcctgtagcgcggcagagatggctgcccctgcctccaccacggcggcggcggcggcagcgctgctgctgctgctcctcctgtcgctcgccgcggcggcggacatgtcgatcgtgtcctacggggagcgcagcgacgaggaggcgcggcggatgtacgcggagtggatggcggcgcacggccggacctacaacgccgtcggcgaggaggagcggcggtaccaggtgttccgggacaacctccgctacatcgacgcgcacaacgccgccgccgacgcgggcgtccactccttccgcctcggcctcaaccgcttcgccgacctcaccaacgacgagtaccgcgccacctacctcggcgccaggaccaggccgcagagggagaggaagctcggcgccaggtaccacgccgccgacaacgaggacctgccggagtccgtcgactggagggccaagggcgccgtcgccgaggtcaaggaccagggcagctgcgctagaacatgggaagcttctccagccgt

SEQ ID NO: 11319 - DNA, 1264 bp, Zea Mays
ccatacccagtaagtgagacttgtcgtccattctgaagtccggcggcggcggcagcggcgagggcgaggcctctgcgacttccagatctccccgacgaggaggaagtctctacagcggaggggagggagatgtcgtacatgcggggtgacctgctgacgaggatgcgtaagctggtgaagggcctcgccaggcccgagccccggtggctcaaggccttggaacgggctccgccagtgacatttcctcgcccagaggggaagatcaagactctggtgcttcctgaggatgtgtatgtcacgaagttcaacagaatacatccagattcgctttaccatgatgcaatcaagataagtggatttgatccaccgccagctcgagtgtttgcttggcgtgtcctggagttgaaagagcaaggagtcgatgaagatgttgcgatggctgtagcagataacgagtaccggacagagaagaaggcaaagaagaaagcgtacaaggagctgaaagaaatcgcccgcagcgaagggaggaagccacctccgaatccatacccgagtgccataaaggaaatacaagcggaggaaaagaagtatgtcatggaccgtttgcataacccgaaggtaatcgagattgcgaacaagatgaaggaggagcgagacaggatgttgagggatagagcagcaggtcagcggtagtcgtagcagcaggtaatgtttggactggcccgactgggtgttgtcgtttacgacatgggccaactggcgtcataaataatggttgttggagattgatatggcaaatatgaaactcgtgtttttgttattcgtatttctgggatttagatggcctctggaatgcaatgttgattgggatgtgtttttgccagcaagctggtaaattgagacgtgttttgcttgctccagaaagttctgcttatagctgatacaaggctagaccgaatcagcagttgcattgtgatatgttagcagaacgccagttccccttctattcgccccttgcatgttaatttctgcatatccctgtgatgagcattttagtaatctgagtgagtgctcattcagttggtgctccctccgatgagaggttgaaggaaccaatacctgttgagatgtggcattctgagggatatgattgagttgttggttgctctctaacattcaaggtttttttttgttgttgtttttttacttcaagaatttcttgcgaatttttctctctctctctgtgtgtgtgtgtgaagccgag

SEQ ID NO: 11320 - DNA, 405 bp, Zea Mays
ccccttttctacgtttttatgcagtcatggctggagctgctgctctcaatgagggtatcctttcttccgtgtccgagaaaaatgttgctgctcacccatggcatgatttggagataggaccagaggctcctgaagtgttcaattgtgtggttgagattcctagaggcagcaaggttaagtatgagttggacaagatatctggtctgatcaaggtggatcgtgtcctttactcctctgttgtttacccacataactatggtttcattccacgcacactctgtgaggatagcgaccccatggacgtcctcgtactgatgcaggaacaagttgtccctgggtgttttctgcgagctcgtgctattgggctcatgcctatgatcgatcagggtgagaaagatgataaga

SEQ ID NO: 11321 - DNA, 66 bp, Zea Mays
acttctgtgccctactggcttctcgcggcatagctgtagcttttatgaaggctggttgcacgcacg

SEQ ID NO: 11322 - DNA, 73 bp, Zea Mays
atctaattgatggttgggtagagagatctagaacctcttcactccaacaaaggcaagccccggtgcatttacc

SEQ ID NO: 11323 - DNA, 943 bp, Zea Mays
atgtcctgggtggcgagaagggaatgcgctatgcaatgccaaatgctagagtaatgattcatcaacctcaaggtggatctgagggtaatgtggaggaggtgaggcgacaggttggagaaaccatctatgctcgtgataaagttgataaaatgtttgctgctttcaccgggcaaccacttgacatggtgcagcagtggacagagagggatcggttcatgtcttcttcagaggccatggatttcggattgcttgatgctttactggaaacaagatactagagaagggacacaacccacattctattagcagactagaaatactgcagaactggagccaaagttagatgcttgccgtccatctcgattaaagccctggaatgacagatgtttaccgaagaacaagatttgcttccattgcatttatggttgtaccattcaccagcttatggtggcacgtaggatggcattgtcatgcactcatgctaaaacgatgaagactgtttaatgtagacctagatgatctttgcggatgggagaaaagtgccagtttgcaaacttatagcccaggaaaggagaagtggtttaagaaatcgtttggattcaacatattggatttatggtgagaccgtcacatgatttttatttgtatgtgggcaactactcgtgttagcgttcaggaaaactcatacattcggatgttgcaaatacgtcttcaaggattttgataagggccccgtttggtttggatactttgaattgaattttattctaataatcataatttggacacagatcaattaagctggtatgtttttttttataaatatatctgtatactattgttggccgacgtatcataactctatatgttgcatcccttgataatatgatatacctataattttaagtacaaagattactctataattcaaccatttaaattt

SEQ ID NO: 11324 - DNA, 750 bp, Zea Mays
aaaaccacggtgggccctagtcggtctggtgtttggagattttcagatcagatcggggagtgataggggtagtcgcaacaaaaagaaaccaaactcggctcgagagagatcgcatcttgcctgcccacccaagcttccctttcgttcctcctcgccccagcgacgcggcctcccgtagaccgagcaaggcaacccaccactgagaggcacgcagaggagcaggaagccggagaccaagatgtcgtcggtgttcagcggcgatgagacggcccccttcttcggtttcctcggcgccgccgccgccctcgtcttctcatgcatgggcgcagcgtacgggaccgcgaagagcggcgtcggcgtggcgtcgatgggtgtgatgcggccggagctcgtcatgaagtccatcgtgcccgtggtcatggctggtgtgctcggtatctacgggctcatcatcgccgtcatcatcagcactgggatcaaccccaaggccaagccctactacctttttgatggctacgctcacctttcgtccgggcttgcctgtggccttgctgggcttgcagctggcatggccatcggcattgttggtgatgctggagtcagggcgaatgcacaacagccgaagctttttgtgggcatgatcctcatcctcattttcgcagaagcgcttgctctcaccctttgatgagagatatgagcaagaggcttcaagaaaacttgtgttttcggaattatatgaagccagtaaac

SEQ ID NO: 11325 - DNA, 60 bp, Zea Mays
ctgggtattaatcgattcggatcgccgttacttctcaaatatgaagacttggtcactgcc

SEQ ID NO: 11326 - DNA, 988 bp, Zea Mays
ttcttcctatccttcgtgcggtggaacaccgctgcggatgtgtaaatgaggaagcaagtgacaaggttatggaggtggagcagaaatacagtgagatccgcagacctgtctatctcaagaggggtgacattatcaagaccatcccggacttttggctcacagcgtttatgagccatcctctattaagtgagcttctgactgaagaggaccagaagatattcaagtacttagactccattgatgtggatgattctgatgttaaggcaggatactccattcatcttaacttctctgagaacccgtactttgaggacacaaagcttgcaaagacctatatctttgctgatgatggaacaaccacaataaaagcttccgaaattaagtggaaggaaggaatgggacctgcaaatggaaatggtattaacaagaaggggagtaagcggccattagtagaggaaagtttttttagctggtttggtgatacagagctcaagagtcttgctgatggtgtgcaagatgaggtggcggagatcataaaggaagatttgtggcctaatcctttgaagtacttcaacaatgaggttgacgatgaatttgaaggagatgaagatgatgatgatttggatggtgatgatgacgatgaaggcgatgatttggagaactgagcccttgcgcttggttcagaatgttgtccgtggatgatgtggctgggcggaactgtgacccttttgggagattttttgttgttgttgtttgacttagctggaactcaacgtagggaactgtttaatgccttatgaagtcaaccaacttgaaaggagactgcttatatcataatctcggtatatctagcaacgcaatttgacctcagtgtcctgtttgtgattcagtttttgcttcggtcggttgcctaaagatgacgtattgccttcagtttgtgctcaacagcattgttaacccccttattcccaacaagggcttgttcggt

SEQ ID NO: 11327 - DNA, 412 bp, Zea Mays
gattcacactgaaacataaaaatggtaacaatggtgactctgaagagatcactgtttatgattacttcgtaaagcagcgtggcatagtgctgcaatactctggtgatcttccttgcatcaatgtgggaaaactaaagcggccaacatattttccaattgagttatgcagtcttgtgcctttacaaagatacactaaagctttgaacacacttcagaggtcatcactcgtggagaaatctaggcagaaaccgcaggaaaggatgtctgttttatctgatgtgctgcaaagaagcaactatgatgcagagcccatgttgaaggcatgcgggattacaattgctagaaatttcacagaagttgatggtagggtattgcagccacctaaggcacaaatcttgaatctgtcttctcg

SEQ ID NO: 11328 - DNA, 1950 bp, Zea Mays
caagaggacagcaaccggcggccctcgcagccgcgcctcacgcgccacggaatatccctccagttccacggggggccacggcgtcagaactcagaaggccgcagggataagagagagcgggtcccgtccgagccgaggcagcccattcgccgtccgccccgcctcttcctgccgccgagcgccacgaggcccacgcccgcgatggcgactatcacgacgccgctccgctccgctctgttctctccggccgcctcgtccgcgggccgccaccgcgggggccggcgccgcgcgccctcctccgtgcgctgcgacgcctccccgccctcgcacgccgcggccgcctcgctcgacccggacttcgacaagaaggcgttccgccacaacctcacgcgcagcgacaactacaaccgcaaggggttcgggcacaagaaggagacgctcgagctcatgagccaggagtacaccagcaacgtcatcaagacgctcaaggagaacggcaaccagtacacctggggccccgtcaccgtgaagctcgcggaggcctacgggttctgctggggcgtcgagcgcgccgtgcagatcgcgtacgaggcgcgcaagcagttccccgaggagcgcatctggctcaccaacgaaatcatccacaaccccaccgtcaacaagaggttggatgagatgggtgtagaaatcattcctgttgacgcgggtatcaaggatttcaatgtcgtcgagcaaggtgatgttgttgtgttgcctgcatttggagctgctgtggaggaaatgtacacgctaaatgagaagaaggtgcagattgttgatacgacatgcccttgggtttcaaaggtctggaatatggtcgaaaaacacaagaagagtgaatatacttcaattattcatggaaagtattcccatgaagaaactgttgccactgcttcttttgcaggaaagtacatcattgtgaagaatatggcagaggcaacctatgtgtgtgattatatacttggtggccaacttgatgggtctagctcaacaaaagaggagttccttgagaaattcaagaaagctgtttctccagggtttgatcctgatgttcatcttgatatggtgggaattgcaaatcaaacaacaatgcttaaaggagaaactgaagaaattgggaagcttattgaaaagacgatgatgcaaaaatatggagttgaaaatgtaaacgatcacttcatggccttcaatactatttgtgatgccactcaggaaagacaagatgctatgtatcagctggtgaaagagaaagttgaccttattcttgttgttggaggatggaattcaagtaacacctctcatctgcaagaaatcggagaactcagtggaattccatcatactggattgacagtgaacaaaggattggaccaggaaacaggatcagctacaagttaaatcatggtgaactggttgagaaaaataactggttacccgaggggcctattaccattggtgttacttcaggtgcctcaactccagataaggttgttgaggatgctcttcagaaggtatttgagatcaagcgtcaggaaattttgcaggttgcataaattttaagcagagatttggtgaagagctgaatagttttggcttggcaaaggttactagaaacgttgcacaggcaaatgtttgtacagtagctaaggatgtaacgagttgggcacgaatactaccacgagtcactatccttgtgctggaatttacagtacggtggaaactaaaatggtgttatcattggcccgaataacatttgcatcagcctttctaaaaaaaaaaagcttaattccagttccagtacttaaactctcatcagttgggacaaaatcgcaataaaacctcgaattgctctaatctaaatttcttccgtttccctaaggtgcaattgcgccagtgcctttaatttagctgca

SEQ ID NO: 11329 - DNA, 1194 bp, Zea Mays
aaagcttctattgaaaaggatatatggtcttctggaagtgctaacgaagaatatctcaaagcacttaatgctttgcttagtaacttccctcgtttgagggtcactgaacctgccacattgtgcattcctcatcttgtaacatcccttaaaactggttctgaggcaactcaagaagcagcgctagattcactatatcttctcaggcaagcttggtcagcttgcccagctgaagtatttaaagcacaatcagtggctgcatcagaggctattcctctacttcaatacttgatacagtctggcccaccgcggtttcaagaaaaggcagaattgcttcttcagtgcttgcctgggactcttactgttacaataaaacgtggcaacaatctaaggcaatcagttggaaatcctagtgccttctgcaagcttactcttggaaataatccaccacggctgacaaagattgtctcgactggcgcgacacctgaatgggatgaagcctttgcatgggcatttgacagtcctcccaagggccagaagcttcatatctcctgcaaaaacaacagcaaatttggaaagaaagcattcggtaaagtgacaatccagatcgacagggttgtcatgttggggtcagtcgcaggtgagtacaccctgctacccgagagcaaaagcggccccaatagaaacctggaaattgagttccagtggtcaaacaaataactgcatacctacataatttaggcgccctctgtaagttgaagatcgatgagtttgagtgttttcttgttttgtactctgctaaaggttaccctgtttgtgcatcattgtaaatagcgggcagagaaagatgtcgtttgctgtaccttctgtgagatataaacagatgagttctcagacgttttgtactggttgtgtcaggcttcattcgtttatttttttaccctgggattttgtctttgtaaaggggtgtaaacagaagtatatgatatggttaggttctcatacggaatggacgtttgcgactttgcagtctcttaccagtatacatgtttatttgccatgtttgttttgttctcatttttgaggtttgtgagggtgctgattaaaaattactgaatatttgattcatagtatgctttgtggttgattcggtttgtgtatgttattggcattgggtgtttgttcttttaagtggca

SEQ ID NO: 11330 - DNA, 2249 bp, Zea Mays
cggggcccggggctgccgctcaactcacccatccattccacctccgttcaccccgtccatttgatttgcgttcactgcgttgcgtttccttggaggggattgttctctcctctcctttggattggaggtccctccttcttctcctctctctctcagaggaaggcctgaggatccaggaagaggacagcaatgggggaaggtgcaggtgaccgtgtcctgagccgcctccacagcgtcagggagcgcattggcgactcactctctgcccaccccaatgagcttgtcgccgtcttcaccaggctgaaaaaccttggaaagggtatgctgcagccccaccagatcattgccgagtacaacaatgcgatccctgaggctgagcgcgagaagctcaaggatggtgcttttgaggatgtcctgagggcagctcaggaggcgattgtcatccccccatgggttgcacttgccatccgccctaggcctggtgtctgggagtatgtgagggtcaacgtcagtgagctcgctgttgaggagctgagagttcctgagtacctgcagttcaaggaacagcttgtggaagaaggccccaacaacaactttgttcttgagctggactttgagccattcaatgcctccttcccccgtccttctctgtcaaagtccattggcaatggcgtgcagttcctcaacaggcacctgtcatcaaagctcttccatgacaaggagagcatgtaccccttgctcaacttccttcgcgcccacaactacaaggggatgaccatgatgttgaacgacagaatccgcagtctcagtgctctgcaaggtgcgctgaggaaggctgaggagcacctgtccaccctacaagctgataccccatactctgaatttcaccacaggttccaggaacttggtctggagaagggttggggtgattgcgctaagcgtgcacaggagactatccacctcctcttggacctcctggaggccccagatccgtccaccctggagaagttccttggaacgatccccatggtgttcaatgtcgttatcctctcccctcatggttacttcgctcaagctaatgtcttgggttaccctgacaccggaggccaggttgtctacatcttggatcaagtgcgcgctatggagaacgaaatgctgctgaggatcaagcagtgtggtcttgacatcacgccgaagatccttattgtcaccaggttgctccctgatgcaactggcaccacctgtggccagcgccttgagaaggtccttggcaccgagcactgccatatccttcgcgtgccattcagaacagaaaacggaatcgttcgcaagtggatctcgcgatttgaagtctggccgtacctggagacttacactgatgacgtggcgcatgagattgctggagagcttcaggccaatcctgacctgatcatcggaaactacagtgacggaaaccttgttgcgtgtttgctcgcccacaagatgggtgttactcactgtaccattgcccatgcgcttgagaaaactaagtaccctaactccgacctctactggaagaagtttgaggatcactaccacttctcgtgccagttcaccactgacttgattgcaatgaaccatgccgacttcatcatcaccagtaccttccaagagatcgccggaaacaaggacaccgtcggccagtacgagtcacacatggcgttcacaatgcctggcctgtaccgcgttgtccacggcattgatgtgttcgaccccaagttcaacatcgtgtctcctggcgcggacctgtccatctacttcccgtacaccgagtcgcacaagaggctgacctcccttcacccggaggcgaaaaaaagagtctgcttttgctaggcggcgggcgttcgttgctgctctttgcttcaagagttaaatttacctaccttgtcaaggtcttgttccatcattgatccgggtgtcgcttttttagtagtctgatggactgttagtagtttgcgttgcgtcggttgagagggaacgttggtggtggtggtgtgtgtgcagtcaggcgtggtgctccctttgtttcctggatgggatgttgctccttgaataataatcgtagtggccttggagcccttttcctgaaataagagcagcatcctagtgcttacctttgcagctgtaactggtgtttgcctcaggatttttgctcctcccttctatggattgtgcttaaaattctctataataaccttacagataaagct

SEQ ID NO: 11331 - DNA, 71 bp, Zea Mays
gagattccagttaccagggtgatcttcaaatcctcgaaacctctcgctagtcgtagcaatacaaacaaaca

SEQ ID NO: 11332 - DNA, 1115 bp, Zea Mays
ttccggacccatcgataagagagatggctgagcaaattgcaagtgaccctgtgttcaaccagatggctgaacagcttcagaaaagtgctcagggtgctggagaacagggtattcctgcattggatcctcaacagtatatggaaacaatgcaacaagtcatgcaaaaccctcagtttgtgtcaatggcagagcgtcttgggaatgcccttatgcaggatcctgctatgtccagtatgcttgagaacttgaccagtccagctcataaggagcagcttgaggagaggatggcccgtatcaaggaagatccatccttgaagccaattcttgatgagatagagaatgggggtccatctgcaatggtgaagtattggaatgaccctgaggttcttcaaaagattggccaggcaatgggtgttaaccttcccggagattctagtgtgtccactgtgctctctggacctgaagagactgaggaggaaggaggggatgacgatgagtccattgttcatcacactgcaagtgttggtgatgaagagggtttgaagaaagctttagaaggtggagcagacaaggatgaagaagatgccgagggaagacgggctttacattttgcatgtggctatggtgagttgaagtgtgcagaaattctccttgaggcgggggccgcagttgatgccctagataagaacaagaacactccgttgcactatgctgctgggtatggtcggaaggaatgtgtggatcttctgttgaagtatggtgctgctgtcacgctccagaatctggacgggaaaacccccatcgaggttgccaaactcaacagtcaagatgaggttctcaagttgctagagaaggacgctttcctatagagaagagaaccgccgaataaagtgtatcaagccgtcaaactattggttttgcattggtttatttatctcggtctggtatggttgtctgtagcttgtgaatttgatgttcttttcatagcgaatgccgtttttgaaccagtacttgtgtaagaagtacctaggcttgttcttgtcctccatatatgaatctttcacacttgtcaagaattgattacagttattttcaaggctatttcctccgttccc

SEQ ID NO: 11333 - DNA, 1662 bp, Zea Mays
ccacacgtgagtccgccggaaaagccgaggcatctcgctcgctcggcgccagttgcctcgcagtttggatcatctcatacctcggcgaagatgagggagatcctgcacatccagggagggcaatgtggcaaccagattggcgccaagttctgggaggtggtgtgcgatgaacatggcattgaccctaccgggcggtacactggcaattccgaccttcagttggagcgtgttaatgtctactacaatgaagcctcctgcggacgctttgttccccgcgctgttctcatggatcttgagcctgggacaatggacagtgtccggaccggaccctatgggcagatcttccgccctgacaactttgtgtttgggcaatctggtgctggtaacaattgggctaagggccactacaccgagggtgctgagctcattgactctgttctggatgttgtgaggaaggaagctgagaactgtgactgcttgcaaggattccaagtatgccactcccttggtggtggtactggatctggtatgggtacgctgttgatctcaaagatcagggaagagtaccctgaccgcatgatgcttacattctcagttttcccctcaccgaaagtatctgataccgtggttgagccatacaatgccactctttctgtccaccagttggtcgagaatgctgatgagtgcatggttctcgataacgaagccctctatgacatctgcttcaggactcttaagctgaccacccctagctttggtgatctgaaccatttgatctctgcaaccatgagtggagtcacctgctgcctaaggttccctggtcagctgaactccgacctcaggaagctggcagtgaacctgatccccttcccccgtctccacttcttcatggtcggcttcgcgccgctgacgtcccgtggctcccagcagtaccgggccctcacagtccccgagctcacgcagcagatgtgggatgccaagaacatgatgtgtgccgctgaccctcgccatgggcgttacctcaccgcctcggccatgttccgcgggaagatgagcaccaaggaggttgacgagcagatgatcaacgtccagaacaagaactcgtcctacttcgtggagtggatccccaacaacgtcaagtccagcgtgtgcgacatcccgcccaggggcctgtccatggcgtccaccttcatcggcaactcgacctccatccaggagatgttccggagggtgagcgagcagttcactgccatgttcaggaggaaggctttcttgcactggtacacgggcgagggcatggacgagatggagttcaccgaggccgagagcaacatgaacgacctcgtgtcggagtaccagcagtaccaggacgcgactgccgacgaggaggagtacgaggacgaggaggaggtgcaggccgatgacatgtgaggggagggctgttatcgtgtgaagccttgtggtccctagggcaagcggacctcgatgagttcggtgttccctttcgtgttgttgccatctttctactgctagcgtacccaccctcgtggcccattccgtcgctgttgacgtatgtatttttcttgtgctatggaaccttgcttttggtacggtactatcctgctagtatgcttggcgtttgagtagtaaaaaaaaaaaaaa

SEQ ID NO: 11334 - DNA, 57 bp, Zea Mays
aaacaccccaaccaccaccactccaagcatccaagtttccagcacttcacattcaat

SEQ ID NO: 11335 - DNA, 1500 bp, Zea Mays
ctctgaactgaacaacgccgtcttcgttctccatgctcaccgctttctgcatccacaacatctcctaccagggccggttcgccttctccgactacccggagctgaacctcccggagagattcaagtcgtccttcgatttcatcgacggctacgagaagcccgtggaaggccggaagatcaactggatgaaggccgggatcctcgaggccgacagggtcctcaccgtcagcccctactacgccgaggagctcatctccggcatcgccaggggctgcgagctcgacaacatcatgcgcctcaccggcatcaccggcatcgtcaacggcatggacgtcagcgagtgggaccccagcagggacaagtacatcgccgtgaagtacgacgtgtcgacgtgtacgtacgtgcgtgcgacggtggtgtggtgtccggttcaggccgtggaggccaaggcgctgaacaaggaggcgctgcaggcggaggtcgggctcccggtggaccggaacatcccgctggtggcgttcatcggcaggctggaagagcagaagggacccgacgtcatggcggccgccatcccgcagctcatggagatggtggaggacgtgcagatcgttctgctgggcacgggcaagaagaagttcgagcgcatgctcatgagcgccgaggagaagttcccaggcaaggtgcgcgccgtggtcaagttcaacgcggcgctggcgcaccacatcatggccggcgccgacgtgctcgccgtcaccagccgcttcgagccctgcggcctcatccagctgcaggggatgcgatacggaacgccctgcgcctgcgcgtccaccggtggactcgtcgacaccatcatcgaaggcaagaccgggttccacatgggccgcctcagcgtcgactgcaacgtcgtggagccggcggacgtcaagaaggtggccaccaccttgcagcgcgccatcaaggtggtcggcacgccggcgtacgaggagatggtgaggaactgcatgatccaggatctctcctggaagggccctgccaagaactgggagaacgtgctgctcagcctcggggtcgccggcggcgagccaggggtcgaaggcgaggagatcgcgccgctcgccaaggagaacgtggccgcgccctgaagagttcggcctgcaggccccctgatctcgcgcgtggtgcaaacatgttgggacatcttcttatatatgctgtttcgtttatgtgatatggacaagtatgtgtagctgcttgcttgtgctagtgtaatatagtgtagtggtggccagtggcacaacctaataagcgcatgaactaatttgcttgcgtgtgtagttaagtaccgatcggtaatttttatattgcgagtaaataaatggacctgtagtggtggagtaaataatccctgctgttcggtgttcttatcgcttctcgtatagatgttatatagagtacattttctttctgaatcctacgtttttcaagtgtttttgaattaat

SEQ ID NO: 11336 - DNA, 56 bp, Zea Mays
cgtatatgaagacgaaggttcgaaccaacttaaagatgaaatgacttcttcgtcca

SEQ ID NO: 11337 - DNA, 3076 bp, Zea Mays
gcaggatcgtagcaccgagggtttccagtccacgttctagaagattcccgtctacattggccgaccccgcggcccacaccgtatatcaccgcctcctatccggcctctgcccttctcgccgaacggaaaaccctgcccggaccttcgttgcagcgctacgagcttcgacgggccgctcgatctccacctctgaagtggctgcttgtgatctagatctgaaagctgcagtggttgacagctgagtgtgaaactgtgaatcgaagatgagcgtggtgggcttcgacctcggcaatgagagctgcatcgtggcggtcgcgcggcagcgcggcatcgacgtggtcctcaacgaggagtccaagcgcgagacacccgccatcgtctgcttcggggacaagcagcggttcatcggcaccgccggcgccgcgtcctctaccatgaaccccaagaactccatttctcagatcaagcgcttgctaggccgcaagtactccgaccccgaggtacagagagatctcgcctccttcccgttccgtgtcacggagggccccgatggttttcccctggtccatgtacgatacctgggcgaggaacggacgttcacctctacccagctgcttgccatggtgctgtccaatttgaagggcattgctgagggtaacctgaatgctgcagttgttgattgttgcattggtattccagtctactttacggatctgcagcgcagggctgttcttgatgctgctactattgcgggtctccagccattgcgattgttccatgagacaacagccactgcactggcatatggtatttataagactgatctcccggagaatgaccagttgaacgttgcatttgttgatgtcggtcatgcaagcatgcaggtcagtgttgtcggttacaagaagggacagctcaagatgttgtcgcatacgtatgaccagtctcttggcgggagggactttgatgaggccctgtttaagcactttgcagctaaattcaaagaggaatataagattgatgtgtaccagaatgcgcgtgcatgcattaggttgcgtgtggcatgtgagaaacttaagaaggtactgagcgccaacccagaggccccactgaacattgagtgtttgatggatgagaaggatgtgcggggttttattaaaagggaggagttcgaacagatcagtgcctcggtgctggaacgcgtgaaaggaccactggaaaaggccttggctgaagctgggttgactactgaaaatgtgcactttgttgaggttgttggatctggttctcgtgttccggctataatcaagataataactgatttttttgggaaggagccaagacgaaccatgaatgcaagtgagtgtgttgcgcgaggatgtgctcttcagtgtgctattctcagccccactttcaaagtgcgagaattccaggttaatgatgggtttcctttctcaattgcattgtcatggaatggagactcccagaacaccccccaacaaacccttgtattcccaaaggggaatgcaattcctagcactaaagttcttaccttctttaaatccagtacatttgaagttgatgttttgtatgtcgacccaaacggcttacaaattccacaaaaaataagcacatacacaattggccctttccaaacctccaaaggagagaaggccaaactgaaagtgaaagtgcgtctcaacatccatgggaccgttacagttgattcagcaataatgctggaggatgatgtggaagttccagtttcatctgcaaatgaagctccaaatgatactatgaagatggacacagatgatgcaccaagtgatcctgctgttgcatctgatgtgaatatgcaggagcctaaaagcgctgataccgctgaggctgctcatgcagctgaaaatggaccacaagatactgaggaaaaatctgttccgatggaaactgatgcaaaggttgagccgtcaaaaaagaaagttaagaaaattactgttccggtccatgagttggtctatggggccttggctgcggctgacctgcagaaggctgtagagaaagagtatgagatggctcttcaagacagagtaatggaagaaacaaaggagaagaagaatgctgttgaagcttatgtgtatgacatgcgtaacaagctatatgacaagtacagtgattttgtcacgtctgaggacaaggaaggtttgattgctaagcttcaggaggttgaagactggctctatgaagatggcgaggatgaaactaagggggtttatattgctaagctagaagaacttaaaaaagttggtgatcctattgagctgcgcttcaaggaatgggagattagaagttctgctgttagccaactggtatactgcatcaatagcttcagagaagctgcacagtctaccgaccagaagtttgaacacatagacatgtcagaaaagcgaaaggtcattaatgagtgttcggaagcagagacttggctaatagagaaaaagcagcagcaggatgctctgccaaagcatgctaattcggtactccttgctgctgaccttaagaagaaagctgaaacacttgataggttctgcaagccgatcatgacgaaaccgaagccagctcctaagccgcagactccgcctgtggcagaaaaccaagctcctgagcctcagacaccagagcagcagcaatcaggtggcgaaagcacagccagcgagggagccgcagaggagcctcgagccgagcagatggagacagacaaacctgagggagccacagatccctcggcttagctttgccagtgatcaaacatttgtgtgattgaccctgttcacctgctgttatagtcggtaggggggagtgaactaagcgagaggttcgccacatttgatttgaggatgtgtgttgggacattcaaggtattctgtttcttgtccttgacaagggaggtggttgggtgtttgaaggataagagcagtggggtacactttctcacgtttttgtgccccacacgctcgatatctttattgatgatggtccgtaaaaccaagagaaattgtcatttggagctctgtttaag

SEQ ID NO: 11338 - DNA, 94 bp, Zea Mays
aatgctcatgagagtgcaaatataataaaggtttattatctaaaatcttgaatacaattttccttcacggatctccgagaactttgggtttccg

SEQ ID NO: 11339 - DNA, 126 bp, Zea Mays
taggttcacgtaccaatggtgaggatgctgatattctccgaccacggcgctagtggttccgcggcatctggctttctctctccatctctcagtttgatctctccgctgcttgctcggaggcctcac

SEQ ID NO: 11340 - DNA, 360 bp, Zea Mays
agtgaactcaacaaagtcgatgacaggccatctgctaggagctgctggtggaatagaggctgttgctgctatacaagctataaggacaggttgggtgcatccaaatctcaatttggacaatccagagaaaaccgtggatgctggtgggcccgcagaaggagagatgtgatgtgaaggtggcgctgtcgaactcgtttggatttggcgggcacaactcatcgattttgtttgcaccattcaagtgatagccgttgacaaatttcttgtggtgggctacacaccgtcgaactgagaccttgtataagaatgtatttaccggacgcagcaatatctcctgtactgcaagattaggaagacgat

SEQ ID NO: 11341 - DNA, 581 bp, Zea Mays
tcagatcaatgatgacgaggtggagcaatggattgtgaaggcaattgcatccaagatattggattgcaaggttgaccagcttaaccagactgtcattgtcagtcggcacacagagaggatctttgggatggaacattggcatgctctgcgcacaaagctcggagcttggaggggaaacattgccagagctatcaacacaatacaagctaacaaagtcaccgaagagggggcacaagggatgcaaggcttggcgatccactgattcagggcagatcagcgggttcgtgaattgagattatagcgtgggagattagaagggcaacctttttttgtataagacaagctgtaatggtttatttacttagatcccgtaaccatgcctggttattccttgtatttggtcagacacgccgcgcattacacatcccaagtttttaccctcgacgtggtctgtcctgataaatttccttccctgatatttttttgccctttccaagctttgatcagtcatgtgtgttccattggagcatctgatgttatccttctattatgttcactcaagatggttgggcttgtacatc

SEQ ID NO: 11342 - DNA, 2082 bp, Zea Mays
attaaattcaggtgatgagatgaccagggtattctggcagtctatcaaggacaagcttatcctcccatttctggacctggacatcaagtactatgatttggggatactgcaccgtgaagcaactgatgacaaggtcacagtggaggctgcagaggctactctcaagtacaacgtggctattaagtgtgcgaccattactccagatgaaactcgggttaaggagttcaatctgaaacacatgtggaagagcccaaatggcacaattaggaacattataaatggcactgtgttcagagagcctattatatgcaaaaacgttccaagacttgttccaggatggactaagcccatctgcattggaaggcatgccttcggtgatcaataccgagctaccgatgcagttctgaaggggcctgggaagctgaagctagtttttgagggaaaagaagaacagattgatctggaggtattcaacttcactggtgctggaggagttgccttgtctatgtacaacaccgacgagtcaatccgagcttttgctgaggcttctatgacaactgcttatgagaagaaatggccactctaccttagcaccaaaaacacaatcctgaaaaaatatgatggcaggtttaaggacattttccaggaggtctatgaagctgactggaagtccaaatttgaggctgctggaatatggtatgagcatcgtcttattgatgacatggttgcgtacgcgcttaagagcgaaggaggctatgtgtgggcttgcaagaactacgatggagatgtgcagagtgatttcttagctcaaggttttggatctttgggtttgatgacatcagtgttggtgtgccctgatggaaaaaccatcgaagctgaagctgcccatggcacggttacccgtcatttccgtgtccaccagaaaggaggcgaaaccagcacgaacagcattgcttcgatctttgcatggacaagaggacttgcccacagggcaaagctcgacgacaacgctagactactcgacttcgctctcaaactcgaggctgcttgcgttgagaccgtggagtccgggaagatgactaaagatctggcgattcttgtccatggatcttccagcgtcacgagaagccattacctgaacaccgaggagttcatcgacgcagtcgctactgagctccgatcaagactgggagccaactgagcctacaagaaactttgcatggcgactttgaatgcttcgtcaccgtcaccgatctgctagtcgtcttttctgttatgaagaagtgaatgtgcgtcaccgcagtttcgatgcaagctaattatagatgtggtgtcacgtgagcgctcaaaataaaggatacacatgattaaattgtttttatgtcagtactaagctcagtcatccccccccccccagtatttttgtcgtttttctcctttgatttgcgtgtccattgtgttgtgtagtttacaaaatgccttccgttcaagccgcgtactaccgcgggatcacggaccactctctcagacggccaggtggttgtggtctcccaattccgcgctccagtggcaccacgtctccaggccacgcgttccaatttccacggcgctagtgacgtcgccaaaaaaggtgagaggaaaaggagggccgcgacgaggacgaccatgccggggcaaccgacaccgggactgccgcgtgatttgtgcccttgcgcacagtactacctatctatgcgtgtgtacgatatcttgtgtgcgctgcttggctgctctgtctacgcgcgcgtggactgcgactctgaaacctttcggcagcgtacgcaattgtcggatttcaataaaggaccgtctggtctgaatctctcaataaggacatgtataagtctaggttcttggttggctttttcagtataaaaacagctaagagatcagcatgatataactctaaactttaaatcagaaatgtatttcaaagacaatatgtatagaaagttgtgttgagatatgttttttatgaagagtctgtctcttgtaccttttttagttaatccttaaatacttctcaagagaccttatattaaa

SEQ ID NO: 11343 - DNA, 1049 bp, Zea Mays
atggcgaaccccttgaaacagcatgagcccaccacgtcgttataggatcatcagttcccagcctagtaacgcaagaaaatgcagcccatgaaggcccatttcaaaaccagcacagagtcatcgctaccaggccaccgcccaaaggtcacacatacaagtgtcacgtccccggtccctcgcgaaccctagagccgcagcagcacactcccgcagtagcagcagccgccgccgccgccgcccagccgcaggaaacaggaggaagatgccggcggggcacgggcttcggtcgcggacccgcgacctgttcgcgcggccgttccgcaagaagggttacatcccgctcaccacgtacctgcgcacctacaagatcggcgactacgtcgacgtcaaggtgaacggcgccgtgcacaagggcatgccgcacaagttctaccacggccgcaccggtcgcgtctggaacgtcaccaagcgcgccatcggcgttgagatcaacaagcaggttaatggccgcatcatcaggaagcgtatccatgtccgtgtggagcatgtgcagccctcccgttgcacagaggagttccgcttgaggaaagccaagaacgatcagctcaaggttgatgccaaggaccgtggcgaggtgatcagcaccaagaggcagcctgtgggacccaaacctggcttcatggttgagggtgctacacttgagaccgttactcctattccctatgatgtggtaaatgatctcaaggggggttactagagagaattatgtatcttgagcagttcaagcgagctggcataaatacctatctgaatctttttgacaactgtctagttcttttgttctagaagggcaggcatggtacattggtgatatttgtctcaggcattcgaaccagactccacatttctaggggcggtttgtcccttcttgagtatcgtcttgagagcctcgtgcactgggtcggcctctctggttctttttgttctggtgttataaacctatgtggctattgctagttaatgctaaagattttgccatcgtttaaaca

SEQ ID NO: 11344 - DNA, 57 bp, Zea Mays
caatttgcaaaattttttttttttttttttttttttttttgttttttttttttgttc

SEQ ID NO: 11345 - DNA, 474 bp, Zea Mays
cagggagggacctaaaaatcaagcccaaaggcccaagcttcttttcttccccgcaaagaaagaagggaagagttctcggcttctcgcgagtcgcgacagagagaggcggagttgcggagaatatgcagagcagcagcatgaagagggagatcagcgaggcccacgacaccattcgcttcggcatcaacgccggcgtcaaagccgacctcgccccgccgcacccgctccagtctaccatccaatcggagaccaagttctgggcggacaagaagaagttcgggacagatgccatatatggatccgccctcaacatccgcaaggatctcgatgcccaaatcctctccaggttccaaaggccccctggtgctttgccgtcatctctgcttggatacgaggcactgacaggttccctggatgattttggatttgaagattatcttaacagcacggccgcgcgggggatgtcggatgggg

SEQ ID NO: 11346 - DNA, 1004 bp, Zea Mays
ataaagcccatggcccaaaaaacagcccagattgctaagaaaacggcccaccaaaccagcggattaaagaaggttgcgaaggcactagccgaagccacgctccccggaacgaacgacgcagcccaacccgttcccaccaaaccagcggcaccacccatggcttcggcggcggcgagatccggtctccggtcgctggcggtgcgcgccggcccgttgaggcgccgcatgtcctcctccgtccacgacgacgcctatgagacggccaagtgggagaagatcacctacgccgggatcgtgacctgcaccctcctggcggcgtacaacctgtccaagggccaccccccacttcgatgagccgccggcgtacccctatctgcacatccgcaacaaggagttcccatggggccctgatggcttgtttgagacgaaggaccaccactgagccctgattagcacacattcaggagctggtgcatgcttaaaagagttatatggttgtttcagtgattttccttttcccttgagacctatttgctgcaacaagaaataagaatgaccaaactcttgtattgacagtgaggttttaactgtgttagctgttaccgtcttgtcttcttttctttgccgtccacgtcaaatatggtcacctgtaagttgatcttgcccggtgtcaggaaacggcatcacaattatcaaaagctgttatcatattctgatggcttaagattgcaccctgtgctcgtgatgatttcccgtatcaactatcattctatcaaggcagaacgtaatggtttgttttgtttattttccagtaaacatgtaggttggacaaggtaatattttaatgttctctattgctagtgtttgtgaatcccagctttcggtttctagctgtgtagcaacggatcagaaattgtgatcaactgtagtttcagggaaagagagacctcatcgttcatctgcaaactctctattgctgcactaggaaaacaatgcttcgggca

SEQ ID NO: 11347 - DNA, 432 bp, Zea Mays
aatatattcagctgttaaaataaagtttacaaggcaaaaaatagaggattgcggagctgagaacaccctgaagcccggagatgtcatccagtgccgtgaatgtggctaccgcatcctctacaagaagcggacccgccggattgtccaatatgaagcgcgctgaagagtgaagacaagggaaaacactgaagatggttgatctattactcgccacattacctatgtaaacagtcttctgggggaaatgaaaatgtcagacttaacgtttgtatgtcgtgtgcctcctttgaacctgagctgtataatttgtaacgcttgaactggggactgatttgagaactgagacactgcagcaatatgttgatgggtcctaaaagaaaaaaaagcaaaacgtcttataaatacgaaatagattgagtacacaaagaaaca

SEQ ID NO: 11348 - DNA, 722 bp, Zea Mays
ccaaataatgtcttttgagtgagttgaattctatccaaatttggcttgcaatggcatatgaagccaataggaggcacaaggattgcattgcattgtacaaagagttggagagtagccaccccatgatcaacatcaggcgccaggcagctgagcttagatacattttagaggcacccaagttgaagatatcaaatgacgaggtggtcacaataccacaaattgggagcagctgggattggtatgctggaacatggagtgacaaaatcaaggaacaagaggacaagaaaaggaagatgagtgctgctagcaaccaagttcaaccttctccaaacatctttggagacctctctttcttgcgaccgccaaatgaatggaagaagagtgcatgggtggttgttaccttgtggatccttttgataggaacagcaatctatctgcaatcatgaatggctcctgcagctctgaaacaagccattcacatctctgcgaggcactggtccatggttcaacagaacccagagatgtcgctaatatggccgtgtctcagactgttgcatttgttgtttttttttgctgcagtgtaaatactaactactgtaactagcaatacaagcagatgccatctagttcaattgattagaaatcaatctgtctgctcatatacacttgatgatattgcatctggagttgatttgatattaccgtggtaggagtttattcta

SEQ ID NO: 11349 - DNA, 193 bp, Zea Mays
cccaatcctaacacggggaggtagtgacaataaataacaataccggacgcgttagtgtctggtaattggaatgagtacaatctaaatcccttaacgaggatccattagagggcaagtctggtgccagcagccgcggtaattccagctccaatagcgtatatttaagttgttgcagttaaaaagctcgaccttg

SEQ ID NO: 11350 - DNA, 479 bp, Zea Mays
tagctgattcatccccagttggatcaatcttcggacaagctcgactacgagaggatatgatggccggccggcggcctcgcagggcaccgtagcgccgccgccgaattcatgcttcatttcgcatcaggagtcggccaagcaggacacacctcttgttgttgacttgttgtaggtatatacgtacatgccagtattgccagaacagtcgacagaggcaatctgagacctcagctgctggaataatcaggaagtagatcgagagcgacgtacgatgacgagattcataattgctgctgcacatcacttctttatgttatttaaactcacatttcataattaatactaataatatattgtctccgttcttgaatatttgtctcgtcgatagtttattttcgaataaaaaacgacaaaataaaaaaatgatagtgtaccgattatgaagcagccacaaacaaaggtttataatatacctttcc

SEQ ID NO: 11351 - DNA, 1408 bp, Zea Mays
cacctgcactgcaccgcaagtaacccaaccctgcttccagtgcaagtgactgaccccgtgacccggcccatcataacaaatcaaaccatcacccgacttgtttacccccgaaaatttgccgtcttctcatctcgctcccctctttgcgccgcccccagatccggcaccgcccgctgctcgaacccgcaccccacgcccgcaggccgggaccggtgggcgcgcgccgggcagtaggagggagaggaagggcggcatggcggcgccgccggcgagggcccgggccgactacgactaccttatcaagcttcttctcattggggatagcggtgttggcaagagttgcctcctgttgcggttctctgatggttccttcactacaagctttattaccacaattggtattgactttaagatacggacaatagaattggatggcaagcgtataaagctacagatttgggatacagcgggccaagaacgcttccgtactattaccactgcgtactaccgtggagctatgggtatcttgctggtttatgatgtcaccgatgaatcttctttcaacaacatccgaaactggattcggaacattgagcaacatgcctctgataatgtcaacaaaattttggtgggcaacaaggccgatatggacgaaagcaagagggctgtacctactgcgaaaggacaagcacttgctgatgagtatgggatcaagttttttgaaacgagtgccaagacaaacctgaacgtggagcaagtgttcttctccatcgcacgtgacatcaagcagaggcttgcagagactgattcaaagccagaggacaaggcaatcaaaattaacaagccagaccagggttccgaggcaccagctgcccagcgatctgcatgctgcggttcataagcagacgcacgatagccataatcattggttatttgacactatttatttcctgcttggcttttataggaagaatttgaggaagccacttatgatatactgatgatgtggttgtactcttgtttgcttccactcttcgaagcaagcacctcttgctgttgacgtagctattgcactctggacatccgttggaacaacctctctcctccctacagtctacagtgtgtgatggacgaattccatgccgttgggtttgcattatcgatcaatgcatggattaacgtatcgcccttgtgtggattgttgtgttttttttctctcatgttgctgttcctttagattgaatttgttgggaaggaaaatatattttccttttcttatgtatatcaggtgcatttttatcttttgtacctggaatgtatgtatccacggaaagcgtgaatcttcaatttagaaaagaagaaaacttatctggaaatataagaccagtgcatgcggtattgtttgaat

SEQ ID NO: 11352 - DNA, 838 bp, Zea Mays
ttcgaacctaacagtaaaaccttgtgatctccgcatccaggcacgtacaacgctgctgctgacaccgagctacctacctcccccgtgccaccacctctaaaatcccccagcggcccaaccgaacccgcctagggattcctaccgagggaggccgcacgcagccatggatttcctgcaggagcaaagcgtcgagaccacagtggccgtcgccgtcgctgtcgccgccgtcgccgcaggcggcgccttcctcctccttcgatccaggaagcccaagggctgcttggatcctgagaacttcaggaagttcaaacttgttgaaaagaagcaaataagtcataatgttgccaggttcaagttcgctcttccaactccaacttctgtattgggccttccaatcggtcaacatatcagctgcagaggacaagacgctacaggtgaagaagtaatcaagccttatacccctactacattggattctgatcttggatattttgagcttgtcataaagatgtatccccaagggagaatgtcccatcatttccgcgagatgaaagttggtgattatttgtctgtgaagggacctaagggccgattcaagtaccacgttggccaagtgagggcatttggaatgctggctggtggatcaggcattactccaatgtttcaagttgccagagcaattcttgagaaccctaatgacaacaccaaggttcacttaatttatgctaatgtcacatatgaagacattcttctgaaggatgagctggacgacatggccaaaacctatcctggccgctttaagatctactatgtgttgaatcagtgtttttacttgtgc

SEQ ID NO: 11353 - DNA, 925 bp, Zea Mays
gtatcaacgaggggagtgccttgcccctcgtcagcggattagatagggggcaggcagcagaggttcccggctccttcgcggcgctgcttatctcccgctcccggctcccctcctcccccgcgccgcgatgaacacagccatggccaccacctccttatccctccaaggccgcccatcccacgctcccactaggaagctctcctccccgttcctcggagcccccgcgtcctttctccggccgctggctcccacgcccgccgccggcccctcctcgcggcggacgcttgccgtcagggccatggcgcctcccaagccgggaggcaagcccaagaaagtggtgggccttataaagctggcgctcgaggccggcaaggcgacgccggcgccgcccgtcggcccggcgctcggtgccaagggagtcaacatcatggcgttctgcaaggagtacaatgccaagacggccgacaagcccggctacatcatccccgtcgagatcaccgtgtttgatgataagagctttaccttcgtcttgaagacccctccggcttcagtcctgctactcaaggctgcaggtgtcgaaaaaggttcaaaagagccacaacggcagaaggtgggaaaggtaacagtggatcaagtgcgtgcaatagctcaagagaagttgccggacttgaactgcaagagcatcgactctgctatgaggatcatcgctggcaccgccgctaacatgggcatcgatgttgatcctccaatccttgttaagaaggaaaaggtcctcttgtagtttgtttttgctggcaccaccagtgcccattttgagattatatgtgaaaggaccaagatgatcaaaagagtgaattgagtttctctaaaatatcttgtataaattaatgcctattaatgagtccatttcaccctttgaaaaaca

SEQ ID NO: 11354 - DNA, 1444 bp, Zea Mays
gagaaagtggcgtgtttaagggcctttttgctactcagcctgttgcttatctgttgttgcttcagtagtctggtacaatgtggctatcaagtgtgccaccattacaccagatgaagcaagggtaaatgagtttggcttgaaggctatgtggaagagcccaaatggcacaattaggaatattctgaatggcactgtgttcagagaaccaatcatctgcaaaaacatcccacggcttgttccagggtggacaaaacccatttgcatcgggaggcatgcattcggtgatcagtaccgggcaactgatgcagttatcaaggggccagggaagcttaaattagtttttgagggaaaagaagagcaagttgagctggaggtgttcaacttcactggtgcaggaggagttgccttatcaatgtacaacactgacgagtccatccatgcctttgctgacgcttctatggccactgcttatgaaaagaaatggccattgtatcttagcaccaaaaacactattttgaagaaatatgatggcaggttcaaggacattttccaggaggtgtatgaagctggttggaaaaccaaatttgaagctgccggcatatggtatgagcaccgccttatcgatgacatggtagcatacgcacttaagagtgaaggagggtatgtctgggcttgcaagaattatgatggagatgtgcagagcgatttcttagctcaaggttttggctcattgggtttgatgacttcggtactggtgtgccctgatggaaagacgatcgaagctgaagctgcccatggtactgttacccgtcattaccgtgttcaccagaaaggaggtgaaactagtacgaacagtattgcctcaatctttgcgtggacaagaggacttgcacacagggcaaagcttgatgacaatgctagactacttgacttcacccagaagcttgaggctgcctgcgttggagccgtcgagtctgggaagatgaccaaggaccttgcccttctcgttcacggatcttcaaatatcacgaggagccattacctgaacacggaggagttcattgacgctgttgctgatgagctcagatcaaggctggcagccaactcgaacctttgaaatccttgccgaagttgtggtgctttcctgcgcgacgctttcgaaccgtttttattatgtcgccattttctttccctgtgccaccaccctgatgaatgaagaaggcctgagctaggcgaacatctgcaggctgcagcagtatgccaaatcattatcattaccgttaccattaccaattggagattgccgtagatttccgcgattatgggaactcatttacctgattatctgatacgtttgaaataaaaggtcgcccattagaatgatttctggttgtctcttcatctgtgcccgatttcgtgctagccattggatttttgtcaattt

SEQ ID NO: 11355 - DNA, 1252 bp, Zea Mays
ttcttttgcaccctgttcctcgtttcttctcaggggaaagcacttaatgcggtcgcctcgcggaacgcgaaagtcttagttgtcggaaatccctgtaacactaatgcgctgatttgtttgaaaaatgccccaaacataccggcaaaaaactttcatgcattgacgaggttggatgaaaatagagcaaagtgccagctggcactaaaagcaggtgtattttatgacaaagtatcaaacgtgactatttgggggaaccattcgacgactcaggttcctgatttcttgaatgccaaaattgatggaagaccagtgaaagaagtcattaaggataccaagtggttagaggaagagttcaccctcacagttcaaaagcgtggaggtgtgctcatccaaaaatggggcagatcatcagctgcatcgaccgctgtttcgatagtggatgctattagatccctcgtaactcctaccccagaaggtgactggttttctacaggggtttatacgactggaaatccttatggcatagcagaggatatcgtgttcagcatgccatgcagatcgaagggtgatggtgattacgaactagctagtgatgtgttgatggacgattttctctgggaacggattaaaaagagcgaagctgaattgcttgctgagaagaaatgcgttgcccatcttacaggagaggggaatgcattctgtgatcttccggaagataccatgctaccaggagaagtgtagtttagttacagaagcaacagcagcggaatgcatttgccaatacattagctgagacttgaaacatctgcttgccagatgcagcaactacttttatatatatatgtgtatattcaataattgtgccacacgaatttgactatgatgcaaacctcttacacaggtaagtcttttttttttccgtaaatacgagaaagactgcttcaaattcatgatctggtgattcagtgagataatcctcaccaatccgctaggcgtgtgccgttcagccacaacttgcattcatcgttacgttgtgaaccatcatgactcccatggaggatctgaaatatatatacatgattttgcactatcatcgccactgcaactagaagcatggcaaatgacatcatcacaccaatgaggcgattcgcatactattattaaatgctctctccattctaagttataaattatgttattaagagtcgaagcatcttaaatttagtcaacattatagaaaaaaaaatacaaa

SEQ ID NO: 11356 - DNA, 85 bp, Zea Mays
tatctgttagccgcgcacgaagctctctgttcgtcgtcatcgctcggtcgcgcgacaggctgactgcgtgtcgtgtgtcgcacat

SEQ ID NO: 11357 - DNA, 1580 bp, Zea Mays
ttttttctttttgcaaaaggattccattctcgtgttcttggagtggtccatcgatcgagctccgtgaaagagagagagagagagcaagcaatggcgacagcagggaaggtgatcaagtgcagagccgccgtggcgtgggaggccggcaaaccgctgtccatcgaggaggtggaggtagcgccgccgcaggccatggaggtgcgtatcaagatcctctacaccgcgctctgccacaccgacgtctacttctgggaggccaaggggcaaaccccggtgttcccgaggatcttaggacacgaagcgggaggcatcgtggagagcgtcggagagggcgtgaccgagctcgcgccaggcgaccacgtcctcccggtgttcaccggcgagtgcaaggagtgcgcccactgcaagtcggaggagagcaacatgtgcgacctcctcaggatcaacgtcgaccgcggcgtgatgatcggcgacggtaagtcccgcttcaccatcagcgggcagcccatcttccacttcgtcgggacgtccaccttcagcgagtacaccgtcatccacgtcggctgcctggccaagatcaaccccgaggcgcctctcgacaaagtctgcatcctcagctgtggtatctcgaccggccttggcgcgacactgaatgtggcgaaaccagccaagggctcgacggtggcgattttcgggcttggggctgtaggccttgctgctatggaaggtgctagactggctggtgcatcaaggatcatcggcgtggacatcaacccagcaaaatacgagcaagctaagaaatttggctgcactgaattcgttaaccccaaggaccacgacaagccagtgcaagaggtgctgattgagctgaccaacggcggcgtcgaccgcagcgtggagtgcaccggtaacatcaacgccatgatatccgccttcgaatgtgtccacgacggctggggtgtcgccgtgctggtgggtgtcccgcacaaggacgaccagttcaagacccaccccatgaacttcctcagcgagaagacactcaagggcaccttcttcggaaactacaagccccgcaccgacctgcccaacgtcgtcgagatgtacatgaagaaggagctggagctggagaagttcatcacgcacagcgtgcccttctcggagatcaacacggcgttcgacctgatgctcaagggggagagcctgcgctgcatcatgaggatggaggattagagcttcattgcaagcttgctcctcctgcagggcaggcatgtcgcacagcaaatgggcatgaaaagttgaaggcgctccagtcctccagcttgtgtagtacacagtagcaataaaacgttagtgtttgtcctgtgcccatcctgtattattctgttccagggtttcacctttatcgtcagtgtgtggtcaggtttcaacccttctcagaacaaccccctcccagaaaaaaaacaaaggaagaagtttgtgtccaggtttcagaatcccctgtctgtaattaccattttgcatgacaataatgagatactgtagatattaataatgttccagaccttcaaggcctccctccc

SEQ ID NO: 11358 - DNA, 1568 bp, Zea Mays
tcaagcccattttctcggcctgcctcgcgcaactcgtcccagcacaccgctgtggcgctgtcgtcctcgctcacctcgtccgtcctcgtgagctccgcctgccctccatctggacagctccagcctccagccatctccccccacctgtacacagttacaaagcttggcacttcgcagttcgcactcgcatgctcttcgcccctcgcgcttaccgctgccgcgcctcccgacttgccgcctccgcctagctccgggctctccaatggcctccatgctcgccatcctcaggccctccgcgccggccccgctcgcggggcgccgggccagggctgccgcgccggcgaccgcgagggtggcgctatcttccagatctaggtattcgtcggtcagggtgtcgctcggctccgaggttgcagtgggcgccgacgcgctcttcgccgactataagcccaccaccgctttcctcttccccggccagggtgcccaaaccgttggaatgggggcagaagctcagagtgttccagcagctaccaaattgttcaaccaggcaaatgaaatccttggatatgacttgctggatctttgcaccaatggaccaaaagaaaagcttgactcaacaatgatcagtcagccggctatatatgtcaccagccttgcagcagtagaggtactacgtgcacgcgatggaggccaagatgtgattaactctgtagatgttacatgtggtctcagtttgggagagtataccgctcttgcatttgccggtgcttttagctttgaggatggactgaagcttgtcaagctaagaggagaagctatgcaggatgcttcagatgctgccaatagtgcgatggttagtgtgattggtctggattcagaaaaggtgcaagaactatgtgatgctgctaatgacgaagtagatgaaaacgatagagttcaaatagcaaactttctgtgccctgggaattatgcagtttctggtggtgtaaaaggtattgaagtagtcgaagccaaagcaaagtccttcaaggccagaatgacggttcgcctagctgttgctggcgctttccatactagcttcatgcaaccagctgtttcaagattggaatctgcgttggctgccactgagattagaacacctagaattccggtcatctccaatgttgatgcgcagccccactcagatcctaacaccatcaagcagattttagctcagcaggtaacctctccggtgcaatgggaaaccactgttaagaatcttatgggcaaggggcttgagataagttatgaactcggacctggaaaggttatagcaggtattctcaagaggatcaacaaaggcactagcattgagaacatcggggcttaaacgtctgggatctgaagaactcttgatggaaccaagttacacagcagaggattgaaacatgccattattgtggaacgatgtttccactcagagttaccgttttttttaccttagtggttgaattttgatcttgatgtaaaattgacatgaaacacatggttaatgattttatgaacagtgtagttttcacaaaaaaaat

SEQ ID NO: 11359 - DNA, 59 bp, Zea Mays
ttttggcgattaatgccaaagggggagaaaatattaagtccaaagcaaaaggaccgcac

SEQ ID NO: 11360 - DNA, 203 bp, Zea Mays
agaacgcaagcgggatttcgcggacaacgccaacgggctgtactcggcgcaggcggctccgaagcctccggccgccatgtacaccataaccgaggggatgaaggtggggggaaagaggagagtgattgtccctccagagctggggtatgggaagaggggaatgagtgagataccgcctgacgctcctttgaactggacctcga

SEQ ID NO: 11361 - DNA, 2071 bp, Zea Mays
ccagcccaacttacagaagcccataaaatagtcatagcttctgtaactaccggcccaggaagccatccgctcctcttcgaacaatggatctacttctttacaggctatattagaatgtcggtggtccagcccaacttacagaagcccataaaatagtcatagcctctgtaattaccggcccaggaagccatccgctccctctcgaacattggatcctatgctctcctctccctgctcgcagtcagggcacagggactgcctccggagaccggagcaggccgcaagcgtccaggttcgagacgccagcacgctctcgcagtacagcagcattatcagggagcgtgccgtgggagtgggaggttgcctcaggtgcggagcagtcgccggcggcgaccatcggtgtctgagatgaaggagagaggcggctccagggcggcagtggacgagcgctacgcgcagtggaagtcgctcatccccgttctctacgactggtttgccaaccacaacctcgtttggccatccctctcctgccggtgggggccacagtttgagaaagctacctacaagaatcgtcaacgcctttacctatctgaacagaccgatgggagtgtgcctaatactctggttatcgcaaactgtgaagttgtgaaaccaagggttgcagctgctgaacatatctcgcagtttaacgaggaagcacgatcaccttttgtaaagaagtacaagactatagttcatcctggtgaagttaacagaatcagggagcttccacagaacagtaagatcatagccacacacactgacagtccagatgtacttgtttgggatgttgaagcacaaccaaatagacatgctgtcttaggagcttctgaatctcgtcctgatctgatattaacgggacaccaggaaaatgcagaatttgcgcttgccatgtgtccagcagaaccatatgtcctgtcaggaggaaaggacaaatttgttgtcttgtggagcatccaagaccacatatctgcccttggggattcctcgtcttctcccggagcatctggcagcaagcagtctggcaaaattgcaaatgaaaaggagagtcctaaagttgatcctagaggtatattccatggccatgacagtactgttgaagatgttcagttctgcccttccagtgcgcaggagttttgtagtgtgggtgatgatgcttgtcttattctgtgggatgctcgaactggcactgacccagctgttaaggttgagaaagctcacagtggagatgttcattgtgttgattggaatccccttgatgttaactatatcttaactggttctgccgataactctgtccgaatgtgggatcgtcgcaatctgggttcgggaggagctggttctccaattcacaaatttgagggccataaagctgctgttctttgtgttcagtggtcacctgacagagcatctgtttttggaagttctgcagaagatggtttcttaaatgtttgggaccatgagaaggttgggaagaagaaaaattctaatgtcccagctgggcttttctttcagcatgctggtcatagggataagatcgtagacttccactggaattcgtcagatccttggacaattgtcagtgtctcagatgatggtgagagcactggtggaggtggaacactgcagatatggcgaatgagtgatttgatctaccgcccagaggatgaagttcttacagagctggagaatttcaaggctcacctggccagttgcgctccgaggaattgagtcatgtgaaaactctgagtaggttatgtagtttcctggccctaagtagtttcctggccataagtatggccccaattgacattggatctgtcttctcatgctcctagagctgtacccttcgaggtgcttgtgcctttgtgagcttgtgttgaaccatgttgtatgactaaatagtccgcaaacgagtcagctggatggctaatctgtaggccaactattgggatattgttggatattatcaacaaccggttcagattcgtgatgagattgtccgcaattgtttagttttttttttttaaca

SEQ ID NO: 11362 - DNA, 125 bp, Zea Mays
ccgttaccgtcgtaattcctccgcacccgacccgtttcgtgttcagcagacaccccactgctccccgtcgcctccgcatctcggggaccttgcacctcgctagcgcatccggcgacttcccagaa

SEQ ID NO: 11363 - DNA, 64 bp, Zea Mays
tgctcttcaggtggctcgttacctcgcactagtcgtagcaatacaaacaaacatgatataggca

SEQ ID NO: 11364 - DNA, 702 bp, Zea Mays
tattgaagtccattctgttggcatcgtcccatctcccttgaaccctttcgcccacaccacagcaccgctgccgaaggtgggaaagaaggcggcggcggaggcaccggcaccggcaccgcctaggaaaggaaaccgaggaaactacagccatggtggtacggatccgtctggcgcggttcgggtgccggaatcggcccttctaccgggtgatggccgccgatagccgctcccctcgagacggcaagcacctcgaggtcctcggctactataacccgctcccagggaaggatggaggcaagaggatgggcctgaaattcgaccgggtgaagtattggctgtcagttggggcacagccatcagatcctgtgcagagtattctctttcgtgccggacttctgccaccacctccattgctagctatggcacggaagggtgggccacgtgataggcgccccattcatccaatgactgggcgccctctggatctcgagggtgtcgcaattattgataattccaatgctcctgaaggcgatactgaagtgcctacagatgaggtggctcaataagccttttgtattagcatagcatatgtagcggtgctgcaaaagaaaacttgtttgatgtgcttgtggcaagactttgggtactcgtacaatgtggcaaacttttaaacaggtcaggattgttgagtgctcaggaggg

SEQ ID NO: 11365 - DNA, 1220 bp, Zea Mays
  misc_feature (1220)..(1220): n is a, c, g, or t
agggattccagcttctggaaccttcctttcgctatacgacctgagttcgcttcaggcagccgccgctctctctctctcccgcgtccgtcccaccttcgcaagccagccacctccctgagaggcctgaccgtgatttcggcgtggcatccaaaggcggtcaagattcgagaggccggaggaaccaagcgtagggcctccgaccccacgtcgtcgtccgcgcgcgccgcccgccgccgcagggagatgggggccgattactacaaggtcctcggcgtcgaccgcggcgccagcgacgacgacctcaagaaggcctatcggaagctcgccatgcgatggcaccccgacaagaactccaccaataagaaggaggcagaaaccaagttcaaggagatctctgtggcatacgaggagaatctcaaacacagaggatattctgacaatacaagtaaaggctggttggaagaagggaacaaggattacatttcctgacaagggaaatgaagctccaaatatgaaacctgctgatattgttttcatcattgatgagaagccccatgatgttttcactcgggagggaaatgatcttgtcgtgactgagaagatctcactggtggaagcactgactggctataccgcacgtgtcactacgcttgacgggcggagcctatcattgcacatcaactcaataatccatccaaagtacgaagaggtgatgcctggagagggcatgccagtgcccaaggaccccacaaagaagggaaatctgcggattaagttcaacataatgttcccctctaggctgacttctgatcagaaggccgggatcaagaggctattgggttcttaggccgccacctcaaatgacatcttctttatgatgaaagttgtttgtgaatattgccagtaatttgtttgtcacagtttagttttttaaagtggtgcccttagttttgccgatgtcctcatttttacccttagtcgtgtttttttttaagggtgaaccttcaccattttattttagtcaggcagagtgttgtgccctttgcattacggtattccattcagttacaggtgaattaataccgctgtgtaccgccaaccggatttacttaaagaagccaaatttgtatcgctgccaattccacaaacagaatttgcagacttttaatcaccagactgggaacaaacaatggaccgactgactcaagatgaaaacaaan

SEQ ID NO: 11366 - DNA, 415 bp, Zea Mays
ctctttccggcccaaccacgaaccactcctcctacagaaatcacctgccggcctggcctttccgtagctacaaccgaagccaccaccagcagtccagcacgactagcggaataatatccaccggcgacgggaacgggaggcggcgcggccggagattcgaagcgatggcgttcacgatgcgggcagtgaaggtgcctccgaactcggcctcgctggaggaggcccggcaccgcgtcttcgatttcttcaagcaggcatgccgctctatccccaccgtcatggagatctacaacctcgacgacgttgtcacgccctctcagctccgctcgaccatcgctaaggagatccgtaaaaaccagaacgtcaccaaccccaagaggcgtgctccaagaaagagtggcatttcagacacctt

SEQ ID NO: 11367 - DNA, 1148 bp, Zea Mays
cctggcgatccgtgagatcgaggggcgctggcgtggtgggccgggtggatcaagtgcatcacacctttagggaggccccttggacagcagtttgtgctgcaaattctatatagctctgtcgcagcatggcctcggtgggcgtggcacgctcttctttgggatttcagaatggcacaagttctagcagtgacccagatcgtcttcccaacgagttgggcagtatgagcataagggacgacaaggacgttgaagatattgtagtcaatggcaatggggcggagcctggtcatatcatagtgaccagcattgatgggagaaatgggcaggcaaagcagaccattagttacatggctgagcgggtggtaggtcatgggtccttcggaaccgttttccaggccaagtgtcttgaaactggtgagaccgtagctataaaaaaggttcttcaagacaagagatacaagaatcgtgagctgcaaaccatgcgagtgcttgaccacccaaatgtggtggctctaaagcactgtttcttctcaaagactgagaaagaggagctttacctcaatttggtgcttgagtatgtaccggagactgctcatcgtgtcatcaaacattacaacaagatgaaccagcgcatgcctttgatttatgcaaaactgtatatgtatcagatttgtagagccttggcatacattcacaacagcattggagtgtgccacagggacattaagccgcaaaatctcctggttaatcctcatacccatcagctaaaattgtgtgactttggcagcgcgaaagttctggtaaaaggcgaaccaaacatttcttacatctgttctaggtactacagagctccagagctcatatttggtgctactgaatacacaacagccattgatgtttggtctgctggctgtgtgctcgctgagctgcttctaggacagcctctgttccctggagaaagcggtgttgatcagcttgttgaaatcatcaaggttctgggcacacccacacgtgaagaaattaagtgcatgaatccaaattataccgagtttaaattcccgcaaatcaaagctcacccatggcataagatattccgtttaaagatgcctgctgaagcggtagatctcgtgtccaggcttctacgaatc

SEQ ID NO: 11368 - DNA, 72 bp, Zea Mays
ccatcttttcaccatccctttagttcattggattgctacgtgtaggtcagtgaccaagtcttcatgtccgag

SEQ ID NO: 11369 - DNA, 1000 bp, Zea Mays
cttgactccttgagcccagtgcccagacggcttgcgcttggcctcacctcctcttctcgtcgagcggataacagaaccgatgtgcaagctccggccggagcgtcaggataagaaccgcgcgccggcaggcagctgctcctgcgactgcgagcgcccgtccaatggcgtccctctccccttccctccacctcccttgcaattcaagaactggcttccttggaaagacacgtgggattcgtccttgtgttttccctgctggaagagttggatttgtcagaacagtagtggaatgcaaggaatctagaattggaaagcagcccatcgaagttccatcaaatgttactctcacattagaagagcagtttgtcaaagctaagggtccgctgggggagttatctctgagctttccaggtgacttgaagatcgtgaaagaagaatccggtaacctgagagtttataagactgcagagaccaagagggcgaaccagatgcacggacttttcagaacgttgacagacaacatcatcgtcggtgtgtcaaaaggattcgacaagaagcttcagttagtaggtgtcgggtaccgtgcggcggtggagggcaacgatctcgtgatgaacctgggattctcccaccctgttcggatggccattcccgaaggcctggcggtcaaggtggaagagaacacaaggatcatcgtgagcggctacgacaagagcgcgatcggtcagttcgctgctaccataaagaagtggaggccacctgagccatacaaggggaagggtatcagatacatggatgaagttgtcagaaggaaggaaggaaaagctgggaagaagaaatagaagtgtttgttttttgtttgtcctttccatgcttcatttcattttcccgctgtaacggtcctcgtctgctatgaccgaacccgagaaaaaaagtattgttctgtggctgtgctgatcatgccatatttatgtgcaccttgagcatcccaaaaaaataa

SEQ ID NO: 11370 - DNA, 859 bp, Zea Mays
ggagaaggaaatggctcgaagactacccggaggcgacgagcacagacgatgccgtcgtcttcgacacctccattatcccgtggtgggcatggatgaagcggttccaccttcctgaagccgagaagctaaacggtcgggccgccatggttggcttcttcatggcctacttcgtggacagcttgacgggcgtgggcctcgtcgaccagatgggcaacttcttctgcaagacgctgctgttcgtcgccgtcgccggcgtgctgctggtcaggaagaacgaggacgtggagtcgctcaagaagctcatcgacgagactacgttctacgacaggcagtggcaggctacctggcaagatgacccaaccgaggggccaaagaattagttcggcgttgggggtgcaaacgcagaatgctcgcttcttgtggtgtgtctttgcctctttcttcggcccctttttgtttcaccgtttagtcaggcttggaggaactttttgatgaacgtcataatctatctacgtgatcttgtgcaaaaacaaaaggtatgggagtactttctgtgctagagataataatcatgttgcagtttcactggtttatgctttctgtcaacacgcgtcaaggtgctcgtcgaagaagactttgagcaaatcgcaaataatttgatgtcagacatggaattcgctcacatatcgatcaaataaatgccatgtcaaggtactcgtcgaagaagattagtctgaaaccaacctgtgagacacaaagcgaaaaggcatgcctgttgatggttaacttttcacgtactactacttgctttgatctggcatggaattcaagtcaggcatgacacgactgaataaattac

SEQ ID NO: 11371 - DNA, 176 bp, Zea Mays
  misc_feature (1)..(1): n is a, c, g, or t
nagaccaacctactacagtacagtacagtacacctacctgagcgagcggaagaagcctcctagactgtgtttgtgtctgtagtgttgcggcaacccaatgcaaaggggggaaaaggaggaggtgtctctctctctcccggtttgccctccccccctcggcgctcgggctctattga

SEQ ID NO: 11372 - DNA, 281 bp, Zea Mays
atgttccagaacggcgagtcctggaagacgaggttggagacgacgacgtcggtggagtacatgagctccagcaggtgcggcctcgtgaagggcagcgtgcgcttcttccacatgtcccaccacacgccgccttggccgtcgatggtgccgttctcacctgtgatgaagacgtcctgcagaccgtggccgtggatcaagctcatgtatctcccgccaggcagctcgcgccctctcccgtacgacggcagcgggtcgatgagcggccagctcgacgtgtcctg

SEQ ID NO: 11373 - DNA, 736 bp, Zea Mays
gggcgaaaattttctgtggctccagcggctgaaggacgctgcggcacccatgtcggacgacactggtggccgcgctctacccaagttcggcgagtgggacgtgaacaacccggcgtccgcggacgggttcacggtcatcttcagcaaggccagggacgagaagaaagctcccccgacccaaggccacatcaggaacaacaggtcggtgtcggctgacagcaaggactccagggccgagaagatgacctcctacaacgccaggaccaacgcgtcgaagaaatggttctgctgtgtctcgcccagccccacacaatcttgaggaagctaacgacagagaaatggtccattgcatcgctgcggctggcagaccggccgcgagtgaactctccggatacttgccagtgacagtgtatagccgccgttgcaaatgacagtgtatagcgttcttagctgcctgtgcataccgtcagttcaggttgatgtctgcttgtaatttttcttttctcgcctcttctctacggtgtgtaacccttcctcagcgttaatcctcctgctgcattttgctgtaacttgggcgagggtggatttgtttcggctctgaccaaaaccaggtcacagcgaattctcagattgctgcagtgaccgccaccaacctgacaaacaaaaatgctgcgacgttttcagagctgtagaggatgttctcatggaaatacgttatatattcatataattctta

SEQ ID NO: 11374 - DNA, 925 bp, Zea Mays
cgtccagagtcgtcgcggtgagcggggcccggcagacccgcggcggccaaggacgcgcggccgaccaaggtgcaggagctgtacgtgtacgagatcaacgagcgggaccgcgagagccccgcgtacctgcgcctcagcgccaagcagacggagaacgcgctgggcgacctcgtccccttcaccaacaaggtgtacaacggcagcctggacaagcggctgggcgtcaccgcgggcatctgcgtgctcatccagcacgtccccgaccgcaacggcgaccgctacgaggccatctacagcttctacttcggagactacggccacatctcggtgcagggcccgtacctgacctacgaggagtcgtacctggcggtcaccggcggctccggcgtcttcgagggcgtctacggccaggtcaagctcaaccagatcgtcttccccttcaagatcttctacaccttctacctccggggcatcccggacctgcccagggacctgctctgcacgcccgtcccgccgtcgcccaccgtcgagcccacccccgccgccagggccgccgagccgcacgcatccctcgacaactacaccaactgaactgatgattgatgaatccattatcatccatctctgctctgtctgtcgcggctgtcagaacttgacgagacaagctcccctgctactcatcagtactcctcactcgtagccgtagtttggctactcttatgtgtgtatggctggtttcttcaattcgtgagtgcgtggtagtaccaataagcaataagacgcagagggatcgatcaagctgtgtgcttcacttggctgcttctgattacaattgatcaatggtaacgtaaacggtaaagctctgtttagtgtttagatgtgtttaaacggagttaaatggttttagcatcattttagcaagatt

SEQ ID NO: 11375 - DNA, 69 bp, Zea Mays
gttattacataaatcggagtttgtgagtagcaaataagttcataaattaaagtgcagcggataatcgat

SEQ ID NO: 11376 - DNA, 79 bp, Zea Mays
ttaccggcagcttgtacagtgagaggaaacgatcgagatagttcactgccaagtaggcagtaagaggagaaagttgtag

SEQ ID NO: 11377 - DNA, 708 bp, Zea Mays
ggatcatgtttgtgaatgatgaactggcttactcaagcattgtttgaaagaaagcaaaacacaaaagcctgttgttgcattcattgctggacttacagcacccccgggccgtcgcatgggtcatgctggagctatcgtggcaggaggaaagggtactgcccaggacaaaatcaaggcactcagagaggcaggtgttaccgttgtcgagtcaccagcgaagattggctctaccatgtttgaaatcttcaagcagcgtggaatggtagaatagacgatggtacagtagagacattgagaaaccgcattttgatgctcatgggcaattgcgagcaattccttccatggcctcaaacaaaactaatgaggctaccttttcttacgtgccttctgtttggaagatggcctgacttcacctggatcaccttccaatgagctcatttccaataagacgtttcagagccatggacatgtttggagtcaatgtgaatgcctaatttcgaatttttattgtttacacatgtcaatctaggtttacctatctgtttccttgtattatattgtgcggtaaattgccccacaactgaggacgattgctttgctcggtgtcatgtttgagaaaatttcttatttggccctgattgaaacctgtctttctttcttggcccttgtcctgaaataaaatttcttacctattcgccctcacttgaa

SEQ ID NO: 11378 - DNA, 955 bp, Zea Mays
ccaaagataagcccctgaactaccagtggccacacacagattccttcgattcccgctgacagcgaagctgaggagaatcccaagaaacagagctggtgaaattgcattgtcgcaacaggcaagagaagaggagaagaaagaaatggctgcaatacctgcagcgatcccgggctgctgctcttcgtctcgcctgcctcagcttgctggcctccctgcctccacaagcagaaggcgcttcaaggtcacggccatggcgcccaaaaagaaggtgaaccgctacgacgagagctggtcgaagcagtggttcggcgcgggcatcttcgcggagggcagcgaggaggtgtccgtggacgtgttcaagaagctggagcggcgcaaggtgctgagcaccgtggagaaggccggcctgctgtccaaggccgaggagctgggcctgacgctctcctcgctggagaagctgggcctgctctccaaggccgaggacctgggcctgctcagcctcgtcgagaccgcggcggggacgtccccgtccgtcctcgcctccatctcgctgccgctcctcgtggccgccgtcgccgcggtggtcgtcgtgcccgacgactccgtcgcgctcgtcgccctacaggccgtcgtcgcggcggtgctcgcggcgggagccgccgggctgttcgtgggctctgtcgtgctcgctggcctgcaggagtcggattgatgcattgatctgcagctgcgcaaggtagaaccaagctgtgtacgtacgtcgacagtaccgccttgtgtagtaggatcgatcttgttagcagagcagaactcgttactaaaaaaatctatagtgtctgtaatataatataatactttagctttttgataacttgccgtgcaaatgtggtaacatattatgaagaaaattgcgatcaaatggacggttaactcggattcaaccagacacttttac

SEQ ID NO: 11379 - DNA, 72 bp, Zea Mays
gctagcggctgtggcgcgccgaggcgggtgaccggcgacgacgctcctatggtgggcgggcaagcaccgacg

SEQ ID NO: 11380 - DNA, 164 bp, Zea Mays
cttttccattatgcgatctatcttctgcgcctcaccaggaaggcgaaatcctttcaggaacgcacgaattgcagcatcaaatttcaaccctataaacttcatggagtcaacataggaatgcatcacagcaagagggaactcctcatgctgtcccaagtattcac

SEQ ID NO: 11381 - DNA, 3138 bp, Zea Mays
gaaggtgtatatgtttaaacccccgtcctcagtcacgccgcacctaacccttcgtcagtttcagtttggcacctccgaagcttccgtccgaatctctgctgcctccttcctcggccaggcttgcgggcgatggcggcggagcagaccgccgagcagttccggggccaggcgcggctgccccacttcgcgtccccgcggcgctacgacctgcgcctcacgcccgacctccccgcctgcgtcttcactggctcggtggcggtttccatcggcgtggccgcgcccacccgcttcctcgtactcaacgcagccgagctcgacgtcgcgaccgggggcgtcagcttcgcgcctcagggctccgaccaggtgctacaacctttggaggttaccaacgtgccagaagatgagatcctgattattcgcttcaatgaggtgctttctatcggggagggaactttgacgattgcattcaaggggactttgaatgataagatgcatggattctacagaagtgtgtatgagcttaatggagagaagaaaaacatggctgtaacacagtttgaaccagctgatgcaaggcgctgcttcccttgttgggatgagcctgctttcaaggctgttttcaaaattactctagaagttccttctgagacgattgctctgtcaaatatgccagtaattgaagagaaggtcaatggccctaccaaaatagtctacttccaagaatctcggataatgtctacatacttagtggctgttattgttggcaatttttgactatgtggaagatttcaccacagatggtactagggtccgtgtttacacacaagtcggtaagagtgcgcaggggaggtttgctctagaggttgccttgaagacattggtcctgtttaaggagtattttgctgtgccataccccctccccaaaatggacatggttgctattccagattttgcagctggagccatggagaactatggcttggttacataccgtgaaacagcattgctatttgatgagatgcactctgcagctgccaataagcaacgggttgcagttgttgtagctcatgaattagctcatcaatggtttggaaatcttgtcacaatggaatggtggacacatctgtggcttaatgagggctttgcgacttgggtgtcttacttagctgcagatcagttctttcctgaatggaatgtttggactcagtttctagaggaatctacagtaggtttcaagttggatgctcttgcaggttcacatccaattgaggtggacataaatcatgttgatgaaatagatgagatatttgatgctataagctataggaaaggagcttctgtcattcgtatgctgcaaaactatcttggggctgaggtctttcagaattctttggctgcatacatcaaaagatttgcgtattcaaatgcaaagactgaggacttatgggctgcccttgaagaggggtctggtgaaccagttagaacattaatgcattcatggaccaaacagcaaggttatcctgtcattaatgtgaaactcaaggatggaaagttccaactggagcagacacaatttctttcaagtggatctacaggagttgggcaatgggttgttcccatcacactatgttgttgttcctactcgcgccaagcgaagttcctttttcatgggaaacaagaagattttgatttgtcagcgtccgggtttacggactgccaaaagaaagatggcttctggattaaacttaatgtcaaccagactagcttctatagggtgagctatgatgaggaacttgcagcccgacttcgatatgcaattgaaaccaacaaactgggtgcagcagacagatatggcgtacttgatgatgcctatgccctctgtatggctggcaaacaaaagctagtctccttgctgcatttgatttctgtgtacaaggatgagactgagtatactgtgcttgcacacataatcacgacaagtctgcacattgccgagatgatggttattgctgctccagaggagttggttcatctgaagaagttcctaattgatttcctggagccatttgcgctgaaacttggctgggatgctaagagtgacgagggccatctgaacgctttgttaagaggtacactcttaaccgctcttgcagaacttggccatgaggctaccataaatgaagctgttcgtcgatttaatgtctttctggaagacagagagacaccactcctccctcccgatgttcgaaaggcagcatatgttgctttgatgcagacagtgagcaaatcaaacaaaactggctatgaatcactactgaggatatatagggaaaccgatctaagccaggagaaagttcgtgtgttaggttctttggcatcatcccctgaccatgatgttgtccgtgaagtattgaatttcatattgtcacctgaggtgaggaatcaggacgcaatatttttgctaagaggggtgagttcaggggcacacgaggtagcatggcaatggctgaaggaaaactgggattacatattgggagcctactctggaactctgctcacctatttcgtcaacataactgtctcgccactggccaccgatgaacatggtgatgaggcggaggagtttttcaagagcagaaccaaggcgaacatcgcgaggactgtgaggcagagcatcgagagggtgaggatcaatgcccaatgggtcaagaacatcaaggccgaggctgacctcggcaatgttctcaagaagctggcttacaagcactgatcagagacggtccactttcatttctgtgttaatcctagtaccgagatgtaactttgttctctggaataagtggattaataaagggcactttcgtttgtgtgtcgtcctgagctgccttgtccgtagattcttacaaactgttctgtgcgaaagctaccatgatagatatgcgtcgaattgattgattctatatcctgataattgattgtgtatcgcccatgtcgcacaggagaacggtaaatttgttccaatgattgtctgactgcgagttggcttccaaacctgcacttcatcattattttagggtctgactctattactccctccgtttcgttttagttgtcgctggatagtgtaaaattaaacta

SEQ ID NO: 11382 - DNA, 658 bp, Zea Mays
gaagtttgcaatgagggtgtctgaatggaggaaccagctgtcattgagtcatactataacaagcggatagtcggttgtcctggtggcgagggtgaggacgaacatgatgttgtatggttctggttgaaaaaagacgagccgcatgagtgtccagtctgctcgcaatactttgtgcttaaggtaattggtgatggtggagatccagatggccatgacgatgaagatgatggacatcactaaggatgccttgtggttctgaaaataagaatctgatgaggcagatgagtccatcacacttcttttttcttgaaccagactgcacggcatccttgtttatgaacagacatttggccatcaagcgggtggtagttaatcacctagggattttgtccagacaaaagcttattgagatttgacccatgcatttctttaagagcatcatcgaataaaagatgactgcatcagattgctttcttttgttaccgtatggccatcgggtgtgatggacatgtaatattcagtcatggaatggaacagacccatttctttattcagtgtgctggggaatttgcaaaaggtctcctatatctcttacaagtttcaagccagaggttgatccttcagttttatgactattatctattaaactatgctgttc

SEQ ID NO: 11383 - DNA, 58 bp, Zea Mays
ttagcttcgtaataaaattatctacactttggtaaccttagttttatcatgagacatg

SEQ ID NO: 11384 - DNA, 1558 bp, Zea Mays
gggggctttgatatgaatctagggtttttattttgggggcgtccagccggcggatggttgctgatgtgaagaggatcattgagaccactcaaggtcagagtacctaccgggcggaccagcaaatgctcatataccaagggaaaattctcaaggatgaaaccactttggaaagcaacggagttgctgagaacagcttccttgttataatgttgtccaaggctaaggcatcatcgagtggagcttctaccgctactactgcaaaagctcctgcaactctggcccaacctgctgcccctgtggcccctgctgcatcagttgcaagaacaccaacacaggctcctgttgccacagctgaaacggcacctccaagtgtccaacctcaggctgctccagctgctacggttgctgctactgatgatgctgatgtgtacagtcaggcagcttcaaaccttgtatctggcaacaatctagaacagactatccaacaaattcttgacatgggtggtggtacatgggaacgtgatactgttgttcgtgctctacgtgctgcatacaataaccccgagagagctatagactacctgtattctggaattcctgagaatgtggaggctcagcctgttgcccgagcacctgctgctggccaacaaacaaatcagcaggccgcatcacccgctcagccagcagttgcattgccagtgcagccatcacctgcctctgcagggcctaatgcaaatcctttgaacctttttcctcagggtgttccaagtggtgggtccaacccaggtgttgttccaggtgcaggatctggtgctcttgatgccttgcgacagcttccacagtttcaagcactccttcagttagtccaggctaatcctcaaatcttgcagccaatgcttcaagagctaggtaaacaaaacccacaaattctgcggttgattcaggaaaatcaagctgagtttctccgcttggtgaatgaatctcctgagggtggtcctggagggaacatactaggtcaactggcagctgctgtgccacaaacgctgacagttaccccagaggaacgggaggctatccagcggctcgagggaatggggttcaaccgtgagcttgtgctagaagttttctttgcatgcaacaaggacgaagagcttacagccaactacctcctggatcatggccatgagtttgacgagcagcagcaatagacgtggggtggatggaggaaaccgaggcagttgcagaacagcgagtgtcgttcttatgctatgctgctgactatcttttatttccatatatatttgttcggaatgctttctaagtacatattaattcaatatcaagcgttacaccgtgtatgaaagcctgtcaaatcgtggcctttggtttggagggaaggattcgattgctcacttgttttctttgctctttttcctggcgtattgttgcattgtatcaatattatgagttttagggcgttttggattttctataatatataatatacataaagtatagtgcattgtaaaactaagaatctataaaagctaaaatgatc

SEQ ID NO: 11385 - DNA, 1663 bp, Zea Mays
gcctcgctctcgtctctaatgccaatcgctctcccttaccttcctacgccctgccgcgcgctacgtacgccaccggaccaccaccacaagcgctggacgcgagcggcccagcctgacgcagcgcggatagagggataggcctcgacgccgattccgttggagctccgcgacccttggctcccagcctcactttctcgctcgccgtgctaccctaccccgcagagacacgtcccgtcccgtcccgtcccaccctgtgccagccagctcccgaccggcgcccgccccgcgggatcttgtctaataatataccgtgcgcgcgggagcagcagctggttcgtcgtgcccgcgcgctcactgcactccgtgatcaccaccacaccgctatcctgctagctaggtagctgaattcggagccaggctcgagcgaggggagggcggaggcgagatggaccacgcggcggacgcgcaccggacggacctgatgaccatcacgcggcacgtgctgaacgagcagagccggaaccccgagtcccgcggcgacttcaccatcctgctctcccacatcgtcctcggctgcaagttcgtcgcctccgccgtcaacaaggccgggctcgcccagctcatcgggctcgccggcgagaccaacgtgcagggagaggagcagaagaagctggacgtcctgtccaacgaggtgttcgtcaaggccctcgtcagcagcggtcgcacctgcgtccttgtgtccgaggaggacgaggaagcaacgttcgtggaccctaagctgcgtggaaggtactgcgtctgctttgatcccctcgacggctcctccaacatcgactgtggcgtctccatcggaacgatctttgggatttacatcatcaaggacaaggacaacgtcactctggaggacgtgctgcaacctggcaagaacatgctcgccgccggatactgcatgtacggcagttcctgcacgctcgttctgagcactggaactggtgtcaatggcttcacgctcgacccttcacttggggagttcatactaacccatccagacatcaagatacctaagaaggggaagatctattcagtcaacgaagggaacgccaagaactgggacgcgcctgttgccaagtttgtggagaagtgcaagtaccccaaagatggctcgccaccaagatctttgagatacattggaagtatggttgctgacgtgcaccgtaccttgctatacggcggtgtgtttttgtaccctgctgacgagaagaacccaaacggaaagctccgtatcctgtacgaagttttccccatgtcgttcctaatggagcaggcaggaggccagtccttcacaggcaaagaacgggctcttgatctgatcccaaccaagatccacgacaggtccccgatattcctcggaagctacgacgacgtggaggagatcaaagcgttgtacgccgagcaggcgaagtcgagctcggcttcatcctaagtgagggtgtaaatcgacttttcctggcttaatttgttgcttacctgattcagacattcgtttccgtttcccttggtgtcgtcgtaagtgtgacattcagtgcaatatgtatagcaactaagggactccgtaaaagttacatgcatctctagcacctaaagcattgcgttaaagaataaa

SEQ ID NO: 11386 - DNA, 250 bp, Zea Mays
ggaggaagatcgaacccgggaccgtcccggaggtgatactattgttgctgtggatagcccttttggacggttggggcttactgtttgctatgatttgagattcccagagctttatcaaattttgcgttttaagcatcaagcacaggtattactagtgccatctgcattcacaaagataacgggagaggcacactgggaaattctcctccgagctcgtgcaattgagacacaatgttattgttcgaaacca

SEQ ID NO: 11387 - DNA, 93 bp, Zea Mays
taacggaagaacttttctggttttcaggagtcaaggtttcctcaattgcggacgctcgcttgctgctatgtgatccaaaccccgatagggcgt

SEQ ID NO: 11388 - DNA, 877 bp, Zea Mays
cgaccctcgaggtctcgagtcttgaccaacccatacgcacccaccctccgccgccgtttttctctccccatctcgcccgccgttttcgtccttatcgatctcctcgcacctcgtggcggcacctctccccttcgatccaccaagggtttaggatcggcggcgatggcggcgaggctggcacagctgcgcgctcaggcggtgcaggcggcggagttcgcctcgaagcacggcggctcctactacaaggagctcatggagaagaacaagcagtacgtcgtgcagccccccaccatcgagaaatgccaggagctctccaagcagctcttctacacccgcctcgcaagcctaccaggtcggtatgagtcattctggaaggagcttgatggtgtcaagcaggtatggaagaacaggaaggacctcaaggttgaggaccttgggattgcgactttatttggagttgagctttatgcatggttctgcgtaggcgagattgttggcagaggtttcaccttaaccggctataaggtctagttgatttccagtgatttaagacctgctttataaatcgacactttagctgatgcttgtcgaaacgacgatgatacctgccttccttcacaattttgtttcttgtaagagtctacctagtgctgaatgccagcaaagacgggcacatggttgcaacattgcctcaataatttgcccgcgcaattcttgattttgatgcatgtaattctttgtcagttgcatgtgctgcagtccctgcgtgcagactcatttcgtgtctttcgttctgcccacaaaataaattctttctgcgttacatatgatcgttttggatgaactgaacaaccaattgctgagtgtgtgaacggat

SEQ ID NO: 11389 - DNA, 75 bp, Zea Mays
agtgtccggtgtgccagcggagcaacggctacttcgcgaagcaacggtcgactgcaacgcattaattgcgcgcct

SEQ ID NO: 11390 - DNA, 78 bp, Zea Mays
cgcgggctgagtcttcaccaacatgctccaaagtcctccccctacgacacgggggctgggtcccacacgtcatgcaag

SEQ ID NO: 11391 - DNA, 65 bp, Zea Mays
caagatttgaaattttctccccctatttcaaatgcttttccttttgactaaacaaaactccccct

SEQ ID NO: 11392 - DNA, 1155 bp, Zea Mays
ccctcactggtggtgcgtgtctgctgtctaggcctgaagctggctagttcggcgcggctctccccagtccccaccactgtcattgtcagttggttctgctcatcgccacctacgagtttctccctgcgcctttggagactcgctgactggggaagatggttgtccaggagttcacagttgatctcaacaagccccttgttttccaggttggccatcttgaggaacggtaccaggaatgggttcaccaaccgatcgtcagcaaggagggtccacgctttttcggaaatgatgtcctggagttcttgactcgcacgaagtggtgggctgtgccaactatatggctgcctgttgtctgctgcctgctcgtgaaatctattctgatgggtcataccgttcaggacgtagctatgatggctctatttgggatatttatttggacgctgatcgaatacactttgcaccgcttcctgttccacattgagaccaagacctactggtggaacaccgcgcattaccttcttcacgggtgccaccataagcaccccatggactcactcaggcttgtgtttcctcctactgcaacagcaattttgtgtttcccgttctggaacctggtcgcgttcttcgcaactccctctaccacacccgcactgttcggaggcggtctgttgggatatgtgatgtatgattgcactcactactacctgcaccatgggcaaccatccaaagacccagcaaaacatctcaagaggtatcacctcaaccatcacttcagaatccaggacaagggcttcggcatcacctcatcgctttgggacgctgtctttgggacattgcctccatccatgacgtctgggaagaagaactgacgcacgtaactcaattcttggcatgagagattctaggggacctgtaatatatattcaagctagggataatcctggatctgtcttcgtgcgatgggttgacatgttcattcagttctcaaagttcttgtagtgtactgattgtctgttgatctattctgaatgtgatgatagtacttcgctgcctcagccttctgtgcattgccagctgtaccgaaaacggcatgttttacttaactcttttcgtctagttcttaaaatcagagcatcagactcttgcaaatgcaag

SEQ ID NO: 11393 - DNA, 97 bp, Zea Mays
cccgagatggagtcgcagccgagtcggacttgatctccttcttgttgtggcgcccttgctgctcctcctcaacacctaggcctttcccaagtccttg

SEQ ID NO: 11394 - DNA, 71 bp, Zea Mays
cgtatacgagttcggaagctcgactcactctgtgattttgtccgaaacaagatttattagaactcgacgac

SEQ ID NO: 11395 - DNA, 747 bp, Zea Mays
acatgcaaaagttataggagggtcaaaatttaaaagtaggacagcctagcgttccaattccaaggtccaagcctccaaggctgctcccagcaactcgtttctttcttcgagagagggcaaaaaccggcaaggggagcgaagcggagagtctcgagagcaagggagcgcggtgacgtcatcgttttccaaggtttctcgatcggctgctatggcgaccagggcggcgtcgagattcctgcagcgcaggctcctgtcttccggcggcaaggtcctcagcgaggaggagaaggccgcggagaaagtgtacatcaagaaaatggaacaagagaagctggagaagctcgcacgcaagggccccagctcaggagagcaaccttcgtcgactacagtctctgcagcaagtgatgtgaagactggggctgggccaacagagtcagcgtctgcaaacgtgtctaccgacaagaacaggaactacgctgtcctggcaggcacaattgctgctctgagtggcctgggttggtatctattgtcaaagcctaagaagtcggaggaggttgtggactgaagagggggttacgaatgcgagctgtggatggttggccttatatttcaccatggtttactttctgcgcacaccttctggaaataattgttgaaacatacgctgcagtctgcattacttgttctgaggcctgttgcaacaccgaacattgaagtctgtactcgagacgttccgtaaaaaaaaaa

SEQ ID NO: 11396 - DNA, 1804 bp, Zea Mays
gagacacgggacccacccccggtctgcccgtggtatctctctcttgtccctgcctcccttcctccctccctccaacccagtgtgcgcacttcaccccccctctcggtctcaccctcctggcgacgactgggcggccgaacggccgtcgccgccgccccacgccaggtttcaaagtcttcgtcaggcccttctccggcgactcgagcaccacagggtgacaaggatagctttctcgggtcactgaaggaagacatcttctcgacgcggtagaccttctgacggttggctggttgtgctataagtgttcaaggggtggattaggaccgggaaactctgtactgaagggaaggtcaaaagtgtcaagagagcttgttccaagatggatgaaggtcagggagttaggtattggtgccacatgtgtcaggaggtgatagatcctatgcccgagatgaagtgcccaggctgcgagggcgggtttgtggaggagatggactccgaagacttcgagccagctgcgaacgcgagatcaagactcaggagggaggccatggttgaagctgatgccgaccaggatgacgaagaggatgattcagaccatgagcttgaactttccaggaggaggcggaggaggaggcgctcatcagcgcttttcagtgtgcttgaggctatgcgtgaccgtgatgaagtaaggggctcggatgacaccgacagtgatacagagagagacctggagagagggagaagggagaggatggagaggcagagggagaggttaaggcagatcgagagggtgagtgctcgtggcagagagaggacggaaagcttaatactgatcaactccaacaacgaggctattattctgcagggaacattcggatctgatgacaaccaggaggactcaagcaacacaagttctggtgtatcacttggggattactttcttggtcctgccttagacactctcttgcagcgtttggcggagagtgacctcagtcgttctggcacaccgcctgccaagaaggaagcagtcgccgcgctaccaaccgtgaacatcgaggaagcgttgggctgttcagtctgtcttgaggatttcgagatgggaggagaagcgaagcagatgccctgtcagcataagttccactcgcactgcatactcccgtggctggagctccacagctcttgcccaatctgccggtttcagttgcctactgaggagacgaagaacaacccatgcgaatcagccagcaccgcagggaccgtgaacggcggtggagacaacgctgctgcaagcggcagcgatacagaaagtactaaccacaatgaagatgaccattccgatagccctatcttctctgctctgagcacactcttctctgatccgttctcatccgacgatgatgaaagtgttccacactcttacgagaactgaagatagcgtcggacgcaggcttgcaatatggtgaagacgttctgcttctgaggctggcatctttatattgtagcttctgtacatatctctctgaacggtcgccccccataagacaaactattacctctccgttttactgaaaactatgtggcttgtaatctgctagtgcttgctatgttcacttgcctcgaataaatgttatcctttagcgtgcttattaccatctccggacggccctagacgtgcatgtggacgcagatttgattgacagtatggccaatgtaaggcatatatgtatgcagtggcgttgcgtcttactcctatattttaactgtcaatgagaaggtccttggaagatggctggataaaaaaaat

SEQ ID NO: 11397 - DNA, 646 bp, Zea Mays
gctgatcaatcacctaatcgaatgatgtctccttcggaagttgaacttctgccaggacttgatggtatatgcaatgaactattgcaagaggatggtataacagacgtacagtttgggcgccaggcattggagaaacgtgtcgtttcacaagatttagagctttggatttcgaatgttcaagctaaggacaacaggttcacacttcttgcacgagctgggaggcaggtccaggaagtgtatttgaccacttccctagaccaggagggcataaagaaagccgtgcaaagagtgctggggcgtgttccttgaacccgacacgcagcgtgtagaaaccgattttctaactaaagcattacaaggaatcaaaagtacgagcgaacagcctgaaacatttgccactgtcagtctgtcacaacacccggctaaatttttctctgttggatactacgacaaccaaaaatctgtaaatatttgcagtcctacacgagtaggttaggcaccttgggccctcccttcaaactaagacgttgctaagcagtggttctgtgtatttgctggggtctgtcttttgatgccatgtgcacttgtcatactgtgacttcagttcactgcttgcacttggctgaactcccgaggtaacttgtgt

SEQ ID NO: 11398 - DNA, 1712 bp, Zea Mays
ataataataataataatgattaaatataattagtagtttagttaagctttcatcaataaatactttgttcataaatactttcttcataagtttagcttgtccttgtaaatggaaaaatgataaatagttgatctataattcagaacactacaatggtattgactattaagcacacagcacttgcaacagaatgaaatatactacatcgaacttcgatgaatagcattgcaaatcaaaacaggatgatatgaacaacaatcatggccaatagggggctacgaacaatttatcacaaaatacaaaatggaaacacacagcagcagcacgcaatggagtggacccatacagagtatactcaaaataactcaaccattaagcaccagcgaactaattattaaccggctactcaatagtcatcgccctcgtcaccctcgtcatctgcaccctctgcgccgacttcctcatagtccttctcaagagcagccaagtcctcacgggcctcggagaactcaccctcttccataccctcaccgacgtaccagtgaacgaacgcccgcttggcgtacataaggtcgaacttgtgatcgatgcgcgagaacacctcagcaacggcagtgttgttgctgatcatacacacggcacgctggacctttgccaggtcgcctccagggacaacagacggtggctggtagttgatgccacacttgaatccggtggggcaccttccacaaactggacagttctcttggtcttgatggttgcgactgcagcattgacatccttgggaacaacatcaccacggtacatcaagcagcaagccatgtacttcccatgccttgggtcacacttggccatcatgcttgagggctcaaagacggcattggtgatttcaggaacagagagctgctcatggtaagccttctcagcagagattacaggggcatatgaggaaagcatgaaatgtatacgtgggtatggaacaaggttggtctggaactcggtgacatccacattgatagcaccatcaaacctgttcaagttggtgtaggttggcctttcgatgtcaagggacctcctgcatatgtcatagatagcctcgttgtccaggaggactgcaacatcagtgtgctcaagcaaggagtgggtggagaggacactgttgtatggcgctccaataaaagtgacccaagtccagagccagtcccaccaccaacagcattgaacaccaagaatccctgcagcccagtgcagttgtctgcaagcttgcgcacacggtccaggcatagatcgacaatctccttcccaactgcattccacataattagaattgaacatatccacagtcacagaagcataatacccactcctattacatattcacatacacatggtgaattaccagtgtagtggccacgggcaaagttgttagctgcgtcttccttgcccgagatgagctgctctgggtggaagagttggcggtacgagccagtgcgaacctcatcaatgacagtgggttcaaggtcgacgaagatggccctcggcacatgcttgccagaaccggtctcgctgaagaacgtgttgaaggcatcatcattcacctgggcatggtgccatcgggctcgatgccgtgctcgaggcagtagagctcccagcaggcgttgccgacctggatcccggcctggccgatgtggatgctgatgatctctctcatc

SEQ ID NO: 11399 - DNA, 648 bp, Zea Mays
gcgcaatgcaatgccatttcagtggtacgatccttcaacaggcatctacggaatggacttctacgtcgtgctggagcgtgcgggctaccgtgtggcacgccgcaggaggtgcaagtcccgcgtcgggattcagcacagggtgaccaaggaggactccatgaagtggttccaggtcaagtacgaaggcgtcatcctcaacaaggctcaggccaacacgttgtaaacctcacctgtgggcaaaacagctctctggtctcttctcctcctccgtgtcaacgcaagaccaccacccacctcgccaggcttttttgggtttaatttgtgttctcagccctgatgtttagtctgctagcactctgtgggtgctgttgtcgcaagatcaccaccatgtcaattatttccgtgcccttgtcgcactctgtgtgctgttgcttgaaaacatgctagtttgatctccctagcgcagcttgtgatctggcttttttgtttggttatatgcttttatctgccacctgcgttttagttcttgatggattaccatctcccggtctggaaaatagagggtgacctaaagcatctccaccagaatgagaattctcttttactgaaatattggtataggagattgagaaaaacaaaactatagaa

SEQ ID NO: 11400 - DNA, 1408 bp, Zea Mays
aaacaacaactacttcctagtataaagtgacagtagcgggggagaagggaaccgaaaccaagcaacccaatccaaaccagacaagcaaggaatcccccgatggctcatcgcgttctcctcctcctctctctcgcgtcggccgccgcggttgccgccgccgtcgacgcggaggacccgctgatccggcaggtggttcccggtggagatgacaacgatctggagctgaacgcggagtcccacttcctgagcttcgtgcagcggttcggcaagtcctacaaggacgccgacgagcacgcgtaccggctgtccgttttcaaggccaacctgcgccgcgcgcgccggcaccagctgctggacccgtcggcggagcacggcgtcactaagttctccgacctcacgccggcagagttccgccggacctacctcggcctccgcaagtcccggcgcgctctcctcagagaactcggggagtcggcgcacgaggcgcccgtgctccccaccgatggtctccccgacgatttcgactggagggaccacggcgccgtcggccccgtcaagaaccagggttcgtgcgggtcgtgctggtcgttcagcgcgtctggagcgctggagggtgcgcactacctcgcaactggcaagctggaggtgctttcggagcagcagttcgtcgactgtgaccacgagtgtgattcatcggagcctgattcatgtgattcgggttgcaatggtgggctaatgacgacggcattcagttatctccagaaggccggtggccttgagattcagaacttcagtgttgtgtctgtggacgaggctcaaatttctgctaacctcatcaaacatgggccattggcaatcggcatcaatgctgcctacatgcagacatacatcggaggcgtgtcatgcccatacatctgtggcaggcaccttgaccatggtgttctccttgttggatatggtgcttctggtttcgcccccattcgcctgaaggacaagccttactggatcatcaagaactcgtggggcgagaactggggggagaacggatactacaagatatgcaggggttccaacgttcgcaacaagtgcggcgtcgattccatggtctctaccgtgtccgcagtccacgcctcgaaggagtagactctggtcagcggtgataatcgtgattccatatattgtagaactataatccctgctagtaatccatttgtgctgtttatgtatcgaaggcagcaaagatgtgtgaagcggcaatgggatgcttgctgtaaggtaatatgtttggcttgctaggcatgctacacgctatttggatgtagcaacgttatcaccagctgtatacgctttttaatcgacaacatttgaataatatgtacataacattatgttgtgctctaaaaaaaca

SEQ ID NO: 11401 - DNA, 685 bp, Zea Mays
ctctgtgatcgtctttctgtctttcatatagctgtattgatgttataacttctctgagatagtttatgccttatctgaattctactagatagtcggttaatgtcaaggcatacgcataccttgccagaccttttctgggttttcactgttttaatgaaactcctttatgaattatgtgccatgtttctttctatttgcttttttgattcttacttgtgccattgccttttgtatggccaatacttgacaacagtttgccgtgaagaggaaagcagttggtatctggggatgcaaggactgtgggaaggttaaggccggtggcgcctacacaatgaacactgctagtgcggtcactgtgagaagcacaatccggcgcctgcgggagcagaccgaagcatgattgcgggcagcttgaaaaggagtacctggatttttgtagttcagccaagagccgtgaaccattttgcctttttagctaaatgaacaagaaatgtttatctatctgtagtgaccactttgtactcatggtttgtcatgctaaattgatggtatgcactatgcaatgcaaatacttgcgtaatcgtatgttttcttgtgctgccgaacaactttgatgctctgtgatggttctggtggtgtttagctgctgctagtatcgagatctgggacatcgttatacctaatt

SEQ ID NO: 11402 - DNA, 310 bp, Zea Mays
gttcacaatcacaacctccacgaccaacgaggcaacgaccaaacgtccaaacccttccccctccctagctccgtgctccagcgggagtccgcggcggcggtgaagatgattatcccagtgcgctgcttcacctgcggcaaggttattgggaacaagtgggatctatacctcgacctcctccaggccgactactcagaaggggatgctctggatgctttggaattgttccgctactgctgcaggcgaatgctcatgacacatgttgacctcattgagaagttgctcaactacaacaatgtatcaatcttta

SEQ ID NO: 11403 - DNA, 1231 bp, Zea Mays
cgcgcgcgtccttggctttaagtaccggaggagcaagctcgcctctgccagactcagacggcgagcagaacacacctgcagctgcagaaatagggtcatgtcctgctagcttgagagctctggtacggtgtagcaaggtacgggagagagagagagagtagcaaactagctagggcacagggcagggcaggggccggctgcattatattgggatcggatctgggggcgaccgagctagcatcagctgagagaagagagagggggcaatatataatggtgttgttgtcgctggaggcgttgaggaagaggaacgtggccggtccgctgctgctgttcaacctcgccctctacgtctccatgttggggttcgcgagctgggcgctcaacgccttcgtcgaccacataggcgaccaccaatactacgacccacctgcacgcggccaaggccgcggcgttccacgcgcgcgccttgtggtggacgcagggcctcgcggccgtcgctgcgctgggcaccgtcgcgtggggcggacaccgcgctcgcgctcggcctcgcgtgcaaggagatgcgggccgccgccgccgcggcgcgcgggtggcagatgcgcacgctggaggcggtcaccgcggtgctggccgtcacgcagctggcgtacgtgctgatgctgcaccgcgccgccgccgccgcgtacgctgatgatgaagccgatgctaccgcctacgccgacgctggtggcgaccagtgcgagcctggctgttccatcggcaccgaggacgacgccgacgccgactgccagcgcgcgcagcagcagcagcatggccgccaccaccaccaacccaggcagggcggcgggccctcgtgcagtgtcatgtgaactagcatacccatgcatgcatgtttggtggtgtcgctctcttgtcttgccattttccgtgctcgtgtttcgtctcgtggaaaataagcaatttaaacttagtttaatttcctgtatgtcatgtgttcgttttagtgtgtatgcctcctatatattatggtcgtatgtgtgtgtcgacatgcttgtgtctctcagtatgtgcgtgtgtctgtttgtatgtgtcagcatcagtgtatgtaagggtcggtttggtaagttctatcttattctgattcttcgtgagaattagttctatgacataagtgattctatgactaaaagtgattgtttttattctttaatataaactctgaaaaaca

SEQ ID NO: 11404 - DNA, 2775 bp, Zea Mays
gcggttcctaaactcggatcctgcattttgttgcggcgatatgcgcaccgttctgagctgcgctggtgctcctggaaaggtactggtgcctggaggtggcagtgatgacttgctttcctccgcagagccggtcgtggacactcaacctgaagaactacagatacctgaagcagaactgactgtggagaagacatcctcctcaccaactcaaacaacatcagcagtggctgaagcaagctcaggagttgaggctgaggagaggcctgagctctcagaagtgattggagttggaggtactggtggaaccaaaattgatggtgcaggcatcaaagccaaagcaccactcgtggaggagaaaccacgagttatcccaccaccaggagatggccaacgaatatatgagattgacccaatgttggaagggtttcggggtcaccttgactaccgatacagtgaatataagagattacgtgcggctattgatcaacatgaaggtggtttggatgcattttcacgcggttacgaaaagcttggatttactcgcagcgctgaaggtatcacttacagagaatgggctcctggagcatactctgcagcattagtaggtgacttcaacaactggaacccaaatgctgatgctatggccagaaatgagtacggcgtttgggagattttcctgcctaacaatgctgatggttcccctgctattcctcatggctcacgtgtaaagatacggatggacacaccatctggtgttaaggattccattcctgcctggatcaagttttctgtgcaggctccaggtgaaataccatacaacggtatatattatgacccacctgaagaggagaaatatgtattcaaacaccctcaacctaagcggcccaagtcactgcggatatatgaatcacatgttggaatgagtagcccggaaccaaagataaatacatatgctaacttcagagatgaggtgcttccaagaattaaaaagcttggatacaatgcagtacagataatggcaatccaggaacactcttattatgcaagctttgggtaccatgttacgaatttttttgccccaagtagccgttttgggactccagaggacctaaaatctcttattgataaagcgcatgagcttggcttgctagtgcttatggatattgttcatagtcattcatcaaataataccttggatggtttgaatggtttcgatggcaccgatacacattacttccatggtggtccacgaggccatcattggatgtgggattctcgcctattcaattatgggagttgggaagttttgagatttctattgtcaaatgcgagatggtggcttgaagaatataaatttgatgggtttcgatttgatggggtgacctccatgatgtatactcaccatggattacaagtgacattcactgggaactatggcgagtattttggatttgccactgatgttgatgcagtagtttacctaatgctggtaaacgatcttattcgtgggctttatccagaagctgtatccattggcgaagatgtcagcggaatgcctacattttgtatccctgtccaagatggtggtgttggttttgattatcgtcttcatatggctgtcccagacaaatggattgaacttctgaagcaaagtgacgaatattgggaaatgggtgacatcgtgcacaccttaacaaatagaaggtggcttgaaaagtgtgtcacttattgtgaaagtcatgatcaagctcttgttggtgacaagacaattgcattctggttgatggataaggatatgtatgatttcatggctctggacaggccttcaacgcctcgcatcgatcgtgggatagcattacataaaatgattaggcttgtcacaatgggtttaggaggtgaaggctatctaaatttcatgggaaatgagtttgggcatcctgaatggatagattttccaagaggtcctcaaagtcttccaaatggctccgtcattcctgggaataacaatagctttgataaatgccgccgtagatttgaccttggagatgcagattatcttagatatcgtggtatgcaagagtttgaccaggcaatgcagcaccttgagggaaaatatgaattcatgacatctgatcactcatatgtatcacggaagcatgaggaggataaggtgatcatctttgagagaggagatttggtcttcgtgttcaacttccactggagcaatagctattttgactatcgcgttggttgtttcaagcctgggaagtacaagatcgttttagattctgacgatggccttttcggtggatttagtcggcttgatcatgatgccgagtacttcactgctgactggccgcatgacaacaggccgtgttctttctcggtctatgcacccagcagaacagccgtcgtatatgcacctgcaggtgcagaggacgaatagggcacaacagcggttgttggggaagaacttcagagggatgtgctgctggtggactgacaccactgccacgcgcgatgctgccagatgttgccctcgagaccacgtggcaggacgatcagctattcaggtggataggttagcttaccgatgagctctcgctttcgagtgactggtgaaggaaatggacctcgcacaccgcattttcgctatgcattctgaaaatgtaccgtgtggttttgtacatatggcatcagtaggcattatatcattcatctcgctgaaccaaccatttacgctatactccgtactgctgtgcaaatctctctctc

SEQ ID NO: 11405 - DNA, 1178 bp, Zea Mays
gaagagatccgtgtggccaaggtcttcctctcctatatattgactcgccgccacacagatagggttttctctccacgcagcgcgctcctcgatccccaacaggcaacagcccagccgctgtcgccctcgttccgtagtacggcgccgccagatcgtcagtcaccatgatcatctccaagaagaaccgccgcgagatctgcaaatacctcttccatgagggggtcttgtacgccaagaaggactacaacctggccaagcaccccaagcttgatgtgcccaacttggaggtgattaagctcatgcagagcttcaagtcgaaggagtatgtgagggaaaccttctcatggcagtactactactggtacctcaccaacgatggcattgagcacctccgcagcttcctcaacctgccatcagaggttgtgcctaataccctcaagaagtcttccaagcccccgtctcgccccttcggctctggcccacctggtgaccgccccaggggccctcctcgttatgaaggtgacaggcctaggtttggtgatagggatggttacagaggaggtccacgtggcgctccaggtgactttggtggtgataagggtggtgctcctgcagatttccaaccatcttttaggggtagcagacctggctttggccgcggtggcggcggtgctttcggtgctggtggatcttccatggagtgatgtgtcaacatgagctagcataacattcgtctttgaactatgagaacaatgagattttgttttgttttaccgagctgttgccgtgggttgacatggttttgtgatcgtttttgtttagatgaaattattgaaatcaagcagcgagttatcagtctatcgcgtgctgaattccttgtgctttctggtctatggtttcaagaaaaaaatttgtcaagacacacgataagtatggcaacgaagagctgacaaaaaaacattcctcctagccccgttggtgtgatgtcctcattaccttccaatgcagtgcaagaatttgcaacagccaacgttatgaattatatatatgaacatccataggaaaaaaatccatctacttttaaggcatgcatttattgcatgaatttgcaacagccaatgttatgctgaatttgttggatcaactagaaatcaaaatatcccatctacttttaaggc

SEQ ID NO: 11406 - DNA, 1066 bp, Zea Mays
ctcgaagcccacttctggttccggtggacccgcgtacatcgctaaggaacgcagcagctcccccgacaaccaccagataaagctgcaagctgcttatcttctcccgtcccataggttgctaggctcggccgtgtagagcagcaagagcacgccgcgccaagcaacaaagagggaccccgcatccatggaggtggtgggcggcgtgtcgctgaggccgtcgccagcgccggcgcgtatccggactaccctgccacccgtcgacgtaggcggacgcttccttctccgccgggtcgcggggcgccagccggcgaggcgcgcgctggtcgtggaggcccggggcggcaggggctggtcggagcggcagatgcagcagcagcgccgcgcgccgctgctgccgaaaatcgaggacgacggcaacccgcgattcgtcatcttcatccgcaccgccaatgtctacttctggtacccgctcaacatcatcacgggcggtacgacggcgaagatcatgctcgccgccaaggacaacttcctcggcaagtacatctacaaggacacgctcgccaggaacctcgccgccgtcatttacaaagacgaggacgtgatcatagacacagcgaaagagcagtaccgtgtgctcaagaccgaaaatcagtttcggtatggctacaaagttgtggagaaagggaacataaggtctgctctgacgacaagcaatgtgatcgaacttccaaagaaggacgagctcaaaaccgtggttgacaaggtgaaggacttctttggcgacgtgactgccggcgccaaagaatcctttgcgcagataacagggtctgctgtcagcaaggaggaagaggaagcagagagcaaagagaagttccgctccaagagacgaaagaagcagcggaagtcgaaggagggcctcaagacggagaaatgattcagtcagtcacacaagtaaagcaccggctgtagtttcgctatcgatgtccgagaactgttctgtaatttctccagcttccttttttttgaagaaaatcacagacagagccacagataggaaactcgaaat

SEQ ID NO: 11407 - DNA, 825 bp, Zea Mays
gaccaaccagccaggacaaacaaggtgattatgttgatcgaggcaaacaaagtttggagactatatgccttcttcttgcttacaaaatcaagtaccctgagaacttttttcttctgaggggcaatcatgaatgcgcctcaataaacagaatatatggattctatgatgaatgcaagcgtcgatttaatgtgcggctatggaaggtcttcacagaatgttttaacactctacctgtggctgctcttatcgatgataaaatattatgtatgcacggtggactctctcctgatctagcacacttggatgagataaagaacttgcagcgtccaactgatgtaccagatcaaggtctactgtgtgacttgctttggtcagatccaggaaaagatgctcaagggtggggcatgaatgatagaggggtctcatatacctttggtgctgacaaggtttcagaattcttgcaaaagcatgatcttgatcttatctgtcgtgctcaccaggttgtcgaggatgggtatgaattttttgctgacagacagcttgtcaccatattctcggcccccaattattgtggtgaatttgataatgctggtgcaatgatgagtgtcgatgaaactttgatgtgctcattccaaattctgaaacctgctgagagaaaaaacaaatttatggggtccaacaaaatgtgatagtgaaagccattttgcttccagcagctctagcctgttaagtacggaccgacattattgaaagcaactattacgaatcaagactactagaaactagcactccaacattaccagaagttcacaattccgcaaaaac

SEQ ID NO: 11408 - DNA, 72 bp, Zea Mays
cacaggatcgaatgtcacatctttatatataacatgagttctatacaaaataaatagataattacattataa

SEQ ID NO: 11409 - DNA, 1617 bp, Zea Mays
cttatcgagatccaggatactggaaaagatttgtgcctgggttttcgtcttcatctctcgggtcaaaactgtcaaagaaccctatacccctccacgagaggtacatcgccaaattacccattcactaccacctcaaaagcgggagattttcgattcacttcaaccttgggccaaggataacctactgaacctactgaagccagttgaaaagtcatggcagccacaggacttcctaccagagccttcttctgatgggttttatgatgaagttaaagaactgagggagcgggcaaatgaaatacctgatgaatactttgtttgcttagttggtgatatggttactgaggaagccttacctacataccaaacaatgcttaacactcttgatggagtccgggatgaaactggtgcaagtccaaccacgtgggcggtttggacaagggcatggacagctgaagagaacagacatggtgacctccttaacaagtacatgtaccttactggacgggttgacatgaaacaaattgagaagaccatacaatatctgattggttccggaatggatcctggaactgagaacaacccctacttgggtttcctctacacatcattccaagaaagggcaacatttgtgtcgcatgggaatactgcaaggcatgccaaggagtatggtgatctcaagctggcccagatatgtggcacgatagcagccgatgagaagcgccacgaaacagcctacaccaagatagtcgagaagctcttcgagatggaccctgattacacagtgcttgcgtttgctgacatgatgaggaagaagatcacgatgccagcccatctcatgtacgacggtaaggacgacaacctgttcgagcacttcagcgcggtggcgcagaggctgggcgtctacaccgccaaagactacgccgacatcctcgagttcctggtccagaggtggaaagtcgcggagctcacagggctgtctggagaagggagaagcgcgcaggactttgtctgtaccttggcgccgaggatcaggcggctggatgatagagctcaagcgagggcgaagcaagcaccggttattcctttcagttgggtttatgaccgcaaggtgcagctttaatcaagaacgctaggcaatgtgggcatttactacgtatatcattttcagtcctggggttctctataagaaacagtctctaggttatctagcagggtagaattcaactactcgtggatctcactcggtgcaaagtagtgcaaagtacgctatctgttgttaccgtgcaagctgcagagtttggattactatgtgggcctggtggtggagaggaattctgtggggtgcctgcagccagttatgagtggcagctccatcgcaactgagttgttgtattgaatatgttacaggacctatagtaaccgaaagtaataatatggagtttgtatatcgacaagcttgctttggtgattgatgagaatctgaagtaataatatggagtttgcatatcgacaagcttgctttggtgcatgatgagaatctgaagtttgtattgtgtgtgtgtgtgtgttggattctgaattggttacttctgatatcgtctcgacagtgtgtgc

SEQ ID NO: 11410 - DNA, 2110 bp, Zea Mays
ctggtgtcttcatacttgcgtccataacagttctagccgaaggagcgttcgccatgtctgaaatggagtctgtcgcggctcttatggactcgacaagctccaagatacaacagcttcaggaggcattcgctgagcttgagagccagagcgctttctgcatgaacttcaagtggaagcagcttgaagaccactttcgtggtcttgaacaatccctcaagaaaaagtttgacgagctaaaagagcaggagaaggagttccaggagactgtcgcaaaatcagagcagatgctggagcagcgggaggcagctgttgtggccaaggaactgacctctttggagaggttgcaggagaagagggaagctgcattagctatgatctttagcaagtccaggctttccttacctgttccttccatcaacccaatgaacaaggcactggataatcttggtgtcaagtggcctaaaccggcttctgaggagagtgtgcacttgcaagttgataatgctgcagtgaggcctcgttctgagcttgttgcactctgtgaggaaatgaatgtgaacgggcttcataagttcatatccgacaacaggaagaacttggcagccatccgcgaggaaattcctagtgcactgaagaaaacatctcatccttatggcctggtgttggattccctggaagacttttattctggagataatcttgtattagatggaaaaaaggatggtgaccttctgggtgttagaaggacatgtttgatgttgatggagtcacttggacaactgcactctaatgatataacttgttcttctttggagaggcacatgcttacaactaatatcatagagcgagcaaagacgattgcatttaagtggaagtccaagttagataatcttgacattgatgctagcaatgggaactgtcttgaagctcatgcgtttcttcaactcctggcaacctttggtatttctgctgaattcaatgaagatgacttgtgcaaattgcttccatatgtcagtcgtcgtcgtcagacacctgaactttgtcgattgcttgggttgtcgcagaaaatgccaggtgtcattgaagttctggtggaaagtggaagacctattgatgcaattaatttggcttatgtgtttgagcttactgaacaatttgaaccagtacaccttcttaaagcatatctaagggatgttaagaaaatgtcacacgccaggaatgtcaaaacttctcctggagcacagaatgagatgaatgaacgtgagttatctgcgctgaaatctgtcattaagtgcattgaagagcacaaacttgagcagcagtaccctgtggatccacttcagaaaagggttttgcagctagagaaagcaaaggcagacaagaggatggctgttgaagcagcaaagccgcagtccaagaggcctcgtgccaatggatcggcctttgcaacccgtgctacaggctttgctgacaagagcttctactcagcaaccccagagaggcatccattcaatccttgcgagaggcagtttgtgtatggcgctgaggttcatcttcctcccatgatgacctcagcgtcttacacgatgcaacctgcccatggaccttattacggtaatggctacccagttcagtaccaggtctcgtatatccactaatggagacagccaggtgcaggtgctctttcctaacaatctagcttaacctgctgctctttgctgtagtcgtatcagttactctgcaagtttccctagctggaaatatttggaccactcaatgtgtgtgctctgagtggctgttgtggtaattttatgccctaatgacatgacataaattactcctaatatttagctatcgatgaatctcccaatgtacttcattcggcttgtgaaatgcctgtcactgaagaagcgcccaggggcatgaaaatatcatgtcgtcatggacgcctgccaaactgtcagttgcatcctgactggttgttgtttttagtttggtgtatcttttatgcccaagtatatttgctgagttatcatcttcagtttgccgattctaattggtttgtactccctcttttttctaaattataagatactttgatttttttgat

SEQ ID NO: 11411 - DNA, 67 bp, Zea Mays
gtggtcagcgccacgatcatggttgagagacgagaagaagggcatgcattgcccgtccagaggccgg

SEQ ID NO: 11412 - DNA, 2008 bp, Zea Mays
cgctatagaattctcaggtcgcttccttcgtctcgtcctacggctccacatcccccatcgccctcatcctctccggggggacggacgccgctgcccctccgccgccccgtcgccatgggcaactgctgcccgggctccggggatgcggagcccgccccggctgcctccgccgacccttcctcccgcctccactccggcggcacgtccctcaaggccggcgcctcggtcagctcggcccccacgcccaccaagccgcccgcgcccatcggcccggtcctgggacggcccatggaggacgtgcgcagcatctacaccgtgggcaaggagctcggacgtggccagttcggcgtcaccagcctgtgcacgcacaaggccaccggggagcgcttcgcgtgcaagaccatcgccaagcggaagctgtccaccaaggaagacgtagaggacgtgcggcgcgaggtgcagatcatgtaccacctggccgggcagcccaacatcgtggagctcaagggcgcctacgaggacaagcagtcggtgcacctcgtcatggagctctgcgccggcggggagctcttcgaccgcatcatcgccaagggcaagtacacggagcgcgccgccgcgtccctgctccgcaccatcgtggagatcgtgcacacctgccactccatgggcgtcatccaccgcgacctcaagcccgagaacttcctcctcctcagcaaggacgataacgcgccgctcaaggccaccgacttcggcctgtccgtcttcttcaagcagggggaggtgttcaaggacatcgtcggcagcgcctactacatcgctccggaggtgctgaagaggaactacggccccgaggcggacatctggagcatcggcgtcatcgtctacatcctcctctgcggagttccgcccttctgggccgaatccgagcacggcatcttcaactccatcctcaggggacaggtggacttcacaagcgacccgtggccgcgcatttctccgagcgcgaaggacctcgtcaggaagatgctcacctctgaccccaagaagaggatctctgcctacgacgtcctcaaccatccttggatcaaggaagatggcgaagcgcctgacacgccactggacaacgctgtcatgaacaggctgaagcagttcaaggcgatgaaccagttcaagaaagccgcgctgagggtcatcgccgggtgcctgtcggaggaggagatcaggggtctgaaggagatgttcaagagcatggacgccgacaacagcggcaccatcaccgtggacgagctgcggcgagggctggccaagcagggcaccaagctcagcgaggcggaagtggagcagctgatggcggccgcggacgcggacgggaacggcacgatcgactacgaggagttcatcaccgcgacgatgcacatgaacaggatggacagggaggagcacctgtacaccgcgttccagtacttcgacaaggacggcagcgggtgcatttccaaggaggagctggagcaggcgctcaaggagaaggggctcctggacggcagggacatcaaggacatcatctcggaggtggacgccgacaacgacgggaggatcgactacagcgagttcgtggcgatgatgaggaaagggacggccgagcagaaccccaagaagcggcgcgacgtcgtgttgtagcctgtacgtaggaacagagcagtgagagagctagctgctgaccgacccatgagcatgagtggccaaacaggcggtggttcgtgtatatatctaatggtaatggatcggcgtcgagcggctgatgccattgccacggccgagagagcaaggcactggcagccagaccccaagcatgcacggtgagctgggtggagcctggactggaggagccagggaccctttgacaatgtaaagtaaactatgggatgatgaaaggatgcacgcgctcgcaccgtacgttattgacaacgacctctcgacgtgcaatggccatggactgtgtatatacatg

SEQ ID NO: 11413 - DNA, 1456 bp, Zea Mays
gtggtccaaacaaccaaacagccgctatatagcggactaggggctcgttggagagaaaacttattacaaccgaccaacgcgctttgtaacgcctccgctgcaatcagcccccgcggcgagcttgccctgcccctgattgctagttctcgccgttacgtaaggcttcttggccttgcgtcctccgtctttcgttgctgatacatcgaggtattaaagaagctgcctggttccgggcagcagaggtcgccgccgcctgcagcaatggccgacttctcctggctcacggtgcttggcttcctattcctcaccttcaactcaggcatggcgatttatcggtccaacggtgacgccggctccgtcgctttcgtcgtgcttgccggcgtggacagactggcagatctggagctcggcgcgaccagatccggtgctgctgtgcccgatggcagaggagatctctctggtttactctgctaagagtcaaagaggagctgatgacgacaactaagcttgggttaccgataattgagcctgttctctgcacgagaagaaatttccggcctcacctagtactaataagtatgctggatagtcccccagcacgggagttaattgtatcaagagaagtggagaccaagggcagagtagaactacagaggatatctttgtatatggaggctacatgtgaacaagaaaggagaggaggaagactgtatagatctgaagaacctaaggagaaacaatcagagtacttgctggaacacatatatcttccatgataaaagttagatttcttgtttggtgctcatgcatgggttccatatgttcttcccgtcttattagaacatatctattggactaccatgcataaaaagccgtcgtttcataaactattgggactatacggcaccaatgaagctattgatgctggccggcaagctgacagcgaggtgaaagcttttcaaaacgatattccgagtggaagagaaaagaaaataaaagaaatagcaggttattttagaaaaaaatagttggcccatatgtaacgcgcggtagctttaagattattatgtccagcagcttattcatatattatacatatattcaaatttcactctgtgaatagtagtctaaaatacagtagtgttttgagtaaactatggataaactgctggacaaggtctaagataagtgctgcgtggtggcaacaaacgacacttagtcttgtttggtggcaatgatattggaggggctaaagttttttcgctcctaaacaagctcctaaacaagctcctaagaatcttacgtgttatgttgcattatggaatatctatgtatctgcaaactctctgtagtctgtatgtacctcggatgtgctctatgtggctttgtaattctgaacggaggaagtaataataagataaatggatggcgtaacaagataagttgctttgtgcaa

SEQ ID NO: 11414 - DNA, 325 bp, Zea Mays
tcccggtcagccgcccagttgcgcctgcaacagttgtccaatatgaagcgcgctgaagagtgaagacaagggaaaacactgaagatggttgatctattactcgccacattacctatgtaaacagtcttctgggggaaatgaaaatgtcagacttaacgtttgtatgtcgtgtgcctcctttgaacctgagctgtataatttgtaacgcttgaactggggactgatttgagaactgagacactgcagcaatatgttgatgggtcctaaaagaaaaaaaagcaaaacgtcttataaatacgaaatagattgagtacacaaagaaaca

SEQ ID NO: 11415 - DNA, 285 bp, Zea Mays
cagaaaaccggtggctgatgcggaccggagaatctccgcccgcaggcaggcccacagacatttggggccccgccacgccgtccgccagccgccagccgccagccgccagccaatcccttcctgtttctatttattcatccgcccgggcccctccgcacgcctgcacacattccgcgcacaccccggcagccgcaaacgccttcgccgtcgcgtcccgctcctccgcccgcccgacgcgacccctaggacctggagagagaggtcggcatggctgccgcaggggca

SEQ ID NO: 11416 - DNA, 617 bp, Zea Mays
aatgttttggtgaacttgatattttcctgaaggagaatgcaggatgagaaaacacactacgccgcaagggattctatcacggccttgaagaagtacatcatagagcagaacctcgcaaccgaatccgagctgaagagcatcgagaagaagatcgacgatgtcgttgaggaggctgtcgagtttgctgacgcgagcccgcatccgccgcgcagccagctgttggagaacgtgtttgccgaccccaaaggctttggtatcggccccgatggtaagtacaggtgcgaggatcccaagttcacccaaggcaccgcccaagtttaaggaggttaatctgcgctctgtaccactgtacttgggttctctagttttgtcgatccagtgtcatgttaaggatactgtatgcataaggtggtccatttctttggctcttaggattgtgtctgatactgttgtgtaatttattcgaatgctcaactgatgcccaggttttatgatacgttccggagcttaacttgttcaggaacagctcagtttctactctatagaagtatgtagaatggttttggggtagtaaggccttgtttgtttaccccataaattatataatccagcttata

SEQ ID NO: 11417 - DNA, 60 bp, Zea Mays
aaaggcatcaaactcaagaaaatgatcggacatgtctttcctaggttgggttgataaagc

SEQ ID NO: 11418 - DNA, 67 bp, Zea Mays
ccagtgcgtccactcagctcgcttgaccttaattctcatcgcgtcatcgactccgccgttccaataa

SEQ ID NO: 11419 - DNA, 731 bp, Zea Mays
caggatttcatatttcattgaagaatttatgacaatctaagacacacacatgagatcttggtaatttgaacttatctggtcatctggtgcctgagcttgggaaattggagcatctgcagtacctggaactttacaagaacagcattcaaggaacaatcccttctgagcttggtaatttgaagaatctaataagcttggacttgtacaagaacaacatttcggggacaatacctccttcccttggaaagttgaaatcccttgtattcctgcggctcaatggcaatcatttgactgggccgatcccaagggaactttctggaatatctagtctcaaagttgtcgatgtttcaagcaatgatttatgtgggacgattcccacatctggaccatttgagcacattcctctgagcaactttgagaagaacccacgcttggaaggtccagagctacaaggcctggccatatatgacaccaactgctagagggggcaccacgaacaaaagaatcgctaggaagaaatgggcgaacaaggttaccaaaaagtgggcgacatagattattaggtctggttctgctgccactctgtaatcccccctgcatagctcttatttgtaacttgctgtctgcacgaaagttggtggatgttttagcagaatgctttctgcccgtgaaagtaaacttgaaactgcttattatgagtgaaatgatgatgttatttcccttgccatgag

SEQ ID NO: 11420 - DNA, 825 bp, Zea Mays
aaacctgacatcggaatcataccttctatccaatcattggcatttcaaggaagacaactgagggtgaactgcgggccaccgccacctagagatgaatccacaccaagagcaccaaggggtggtggtggcggcggcggcggcggctttgtcgattcagctaacaaggtctacgtggggaaccttgcgtggggcgttgacaactcgactctggagaacctgttcagtgagcaagggcaagtgcttgatgctaaggtcatctacgacagggatagcggcaggtcaagggggtttggtttcgtcacctatggctccgcccaagaggtcaacaatgccatatcaaacctcgatggcatcgacttggatggtagacagatccgagtcacggctgcggagtcaaagccgagacgtcaattttgagattattttcttatgggggtttagaggctgatagtgtgtttcaaaacttttagtttgtagtgtctattctttcctccatatgagtaccaagaagatgataatgagagactggctgtgaaatggctgtatacaggaagacttttccccgctggaaagatgcatttatttgtttcagctgtaccacaaaattggcagttcaaatttcccttccatctactcactttattttaaattataagagaatttagcttttctaaatactagcttttgctatgtgtacgccatatgtagatgtataggaaaaacaatgtttctgagatatttaagaaggacaacaactaatatgccagcaatcattaaatgcaagcgtttaagcaggttttttggtccatttgatttagatctagc

SEQ ID NO: 11421 - DNA, 70 bp, Zea Mays
ggtcactccacgaacaggtccttacggagaggtactcagggaaaatggcttgagccccctaaaatatcac

SEQ ID NO: 11422 - DNA, 272 bp, Zea Mays
atgctccttcagaggtgcatagatattgcagaattttatccttgtgtttctgggtttagtttcagtaaattacataaaaactgctgcaagtctggatctgaagaattacaatgcctgtactttcaattactaggcattactattgcagaggtacatcttcctcgccaaaccattttggaggatcatacccatatccaccaagaggattacaacggcaaaggcgccaagcagtcaagatggaaccctttacaacaccatatcgtttgtacgcc

SEQ ID NO: 11423 - DNA, 63 bp, Zea Mays
ggaccttgatcactcttgcaagaacaatgattgatgagtataacacactagagaggttttggg

SEQ ID NO: 11424 - DNA, 2324 bp, Zea Mays
cgtctggcagttgaaggggagtcccgggctagctgtcaggacggctcagctccagctttgcggccctccagctctccccagttcaagttcaatattggcgagcatgcgagtttgccctcttccgtcgtcgtcatcatcatcgtcctcgcgatcccggcgtccctgtttcggcctacgcctcccgtagacaacagttgcgccctgctctccggcaagctatggccaagctgagctgcttccccgctctgctccccggcaagaggaagaagaagacacgcaagatcaccgatgctatcaaggccagcggcaacgagtgccccaaggtgaagccggtcgaagtcgaactcatcgacccgacgcttggtgcaggcgtcgtccaggacgtcgtccccgccgagctctcggtccccgtggaggaccgcaacaataaggaagcggctgatcaactggtgttggtgaaggagagcgatctgtcagatttcgacttcagcttccacgcggccatgaagcccgtccggtccgacagtgacgtggcactggacacctcggccgacgctgcggtggcggacacatcgccgaagctgaagcggtcttgctccaacatcgagactaagcgaccaggctcgcgttccgcgcccgagatgccggcccggtcgcgctcctacggcgatctgggcaacctggtcgccggcctcgccctggacgcgacggcgaccccgcacggcgcgccggaggccagtccggcgtccgtgaagacgtcgcgcactgccgaccgcgtgatgctgaagaagcggtcgtccagccaggtgctgccctcgcgcagccggaagctctggtggcggctcttcctctggagccaccgcaacctgcacatgccgcggtcggcgcgcacggcccaccgatcgttctcgcctggccgccacgacgggtacacctcggacacgttcgaggagggcccggccgccgaccgcaagaacaagacggtcatggtcgacgagtcgccgccagcagcgtctgtgcccaaccagtgggtcgccttctgcgccgagagctccatccacgaccgcgtcagcgcgtgggtcagcagcatcgaaagcgagcctccgttcgatatcgccgaggaggatgacgacaactacgacggagaggacgatgaggagaatggcgagtgtgcggcgtcgcagccgcgccatctcgagctcggggagccatcgtccgggaagggcggaaacagcaaatccaagcgctgcgcaacgacggccgacgaggtcgtccaggccaacaccgtggtgcagtccctgaacgccttctcgtcggtggcgcacatctcagggatgggcctcaaggtggtgccgatgatcgcgcccttctcaaccctccgggccgtcaacctctccagcaacctcatcgttcatatctcccctggatcgctgcccaagggcctccactctcttgatctgtccaggaacaagattgccagcgtcgagggcctccgggagctcacaaagctacgcgtgctcaacctcagctacaacaggatttcgcggattgggcatggtctgtcgaactgcacggccatccgggagctgtacctggcgggcaacaagatcagcgacgtggagggtctgcaccggctgctgaagctggcggtgctggacctgagcttcaacaagattacgacggccaaggcgctggggcagctggtggccaactaccactccctcctggcgctcaacctcgtaggcaacccggtgcaggccaacatcggcgacgacgccctgcgccgggcggtcacgggcctcctcccgagccttgcctacctcaacaagcagcccgtgaagccgcagcgcatcgcgcgggaggtggccacggacagcatcgcgcgcgccgcgctcagcggctcggacagccggagcatccggaagaggacgtcgcggcggctcacgcagagcccccgctcgtcgtcgttgaccagggcccgtggcggcggcggcggcggttcacccacaccaagaaacacctctcgtcgtcgttgaccagaagaaccaactgcgtgattcgcgttgctctttggagacgggagacggtggcgtgactgcgtgcaggcagactcagacgacaccatgattcggcacggcgccagcatgatatgagacaaaccaagtatataaagcaagtatgatgtgagagaattgcgatgcaacacataatgtacatacttgttagggagatattgcttagattaatactacgaccgatgcatctttgtacctgaaaatatcaatttgagcctggttgaagatgaacatccatccaacatcgca

SEQ ID NO: 11425 - DNA, 1169 bp, Zea Mays
aaacaacctgatcaacagacaagaacgccctgctcagagatggtgcgccgccttgccatggagatccggcaacttgctaattcacaaccaataactgttctcaatggaggttctggacaatcaggagtatcaggcctgatagtacctgcagcaactgttggagcactaggttatggttatatgtggtggaaagggatctcgttctcagacctaatgtatgtcaccaagcgcaacatggcaaatgctgtttcaagcatgactaaacatttggagcaagtgcaaagttctcttgctgctgctaaaaggcatttgacacagcgcattgaaaagttggacgataaattggatcagcagaaggctctatctggacaaataagagatgatgtcactgatgcacgtctgaagcttgagaatattggttcagaaatcaagaacatcaaagaattggtttggggtctggatgggaaaattgattcaatggaagctaaacaggacttctcatgtgctggtgtgatgtacctctgccaattcatggagcaaaatggtggaaagcttccggatcgcctggaaggctccaaaatgacgacaaaacgttttggaggccaaaagttcttacagggattgcaactggcaatagaatcagggaattgtggcaaggacaccattgatatgctgttgaaagatgctgattcctctgataaaataaacaggacgtcctccatcaaatctgccagctaattattatctggtcgatactgattcgatgcccagtcggaatatttatagggttttcattacaagtaaatatgtaaatagctgcagccttttgcttgcaggaagtgcattttgtttaatttgtaagcttcgcaaaatgctagtagttgctactacgtaggaacctagtcatgctttaattttgtggtttcgctttgtgaaacgagaatgcaacacgtaataaacgaaaaacaccggttggctttacaatgtggacttgtaacttaaggccgtttggatcttgtcatttttagaggaattggaatctactgtgtagattatttggcttgaaatttgatgttccaccactttgtaaaattcaaatacaagtctatctcattcctcataggatagagggatggaaatgatttttatgtatcacttgactgtttcta

SEQ ID NO: 11426 - DNA, 1249 bp, Zea Mays
tattatgtccatcagttctgtggtcccttcagcctctttataaactgtacaggcgttatgttgtgaagaggaatcaacgcaaacgccagagagaggaagatctaaagaaagaagagaagaaatcctcagagaagcgatccaagaccatgcatgagactataattgaaagtgttgataacctaggaggcagcgttgaagtgacaaaagaggatgaagaaaagatgagcaaagatcaatcagcaaatgttcatgctgaactgccaaaagagggtcagataaaacttggcacagatcatccaattgttaaccatggcgaaccagcaaaagagggtgatgaaaatatgaacactgatcattcagaagctgttctcgataaacctgcagctgatgcaaatatggcagaggaagatcctgaatacgaggaagatcctgaagaaatagaaatatatgaagatgatgaggacatggatgatgctcatgctggagcacagaatggagaacagaatgagaacacaaatgacagagatgttaagccagaagtagcgacagcagatggtggaaataacagaagttcaacacaacctgaagtaggaaatattactaatacccatgaaagagctgcttcaatggaggacaaactgtctgtggcagagaaaggagattctgtggaaggtggagaaaaggtagttagtaaggaggttaagccagcaaaagatgaggtggtcgacaaggacctgttgcaggcctttaggtactttgacataaatagagcaggatatctcaagatggatgatttaaaatgtattcttcacaacttgggcaagtttttatcaagcagggacgtgaaggacttggttcaagttgctcttgttgagagcaattctgcaagggacactcgcataatctatcctaagcttgtgaagatagttgacctgtaatctggcactgcttggcccatgtgagccccttgaagttaactacgctatcatcgatgagtcagttatgaaaaactattttctttatttataaatggcttcactgtcattttttggttacctgttcgtactattatgttgtacggagctacttttgctttcttgttgaatatttttttattgtaattgtggagtcattaacttggcaaccaatgcttattgtaagcatcaaggattatcacatttcataaatgagggcacttgaaaaaggcgacgaacattgtattaaaaaccaaacatccaaaaaataaaaa

SEQ ID NO: 11427 - DNA, 62 bp, Zea Mays
ttttactgtatttaccccatctttgatgttcgccagcctcgcgaagacagtcaccctcgcag

SEQ ID NO: 11428 - DNA, 453 bp, Zea Mays
agcttctcactgggattcgatgagtacatgaacttggtcctcgaagacgctgaggaaatcaacgtcaagaaaaacactaggaaatcacttggccggatactcctcaaaggtgacaatataactttgatgatgaacagtggcaagtgaagattcttatggcaggaacgatgtttggtgctcgcttcgattatctgtgacacaatgtactccatccatccgtccagacttaaatgatgtatcatgtcattgtggtttagtgagagttgtataactacctgaggaaactcacgtgttactatatgctaagatgctgtgacggtgagctattcagtgctcacttgtgttccaaagattagcccgacttgtgtgtgccatgctgacatcttttctggtttcatactcagctttacgtaaagctttgctctgctcacgcttgccttttggaagctggga

SEQ ID NO: 11429 - DNA, 141 bp, Zea Mays
gtcgggctagcccgccgtgcctagtttcctgtccaagcccgcccgcttattctaccgtgccgggttcggaccgggcccaaaaagcgggcttcgtgccgggctcacgggcctcgtgctttttggccatctataatatatact

SEQ ID NO: 11430 - DNA, 91 bp, Zea Mays
ctaacctgttcatcttctgcaattgcaccactcaactctgctcctcgtaacattaacttcagttcatcttcagtaacatatggttcactga

SEQ ID NO: 11431 - DNA, 77 bp, Zea Mays
actaagagcgtcactgtaaaaatcccttatttttaagtctaataggctcatgagaaataagattagtagagaattat

SEQ ID NO: 11432 - DNA, 1333 bp, Zea Mays
ctttataaacctccacctccaactcactcgtatctcccttccgttccccaattcgaaatcgaatcgggtccgacgggtcggtcttgccgtgcgtgcgtggctgcgcgagcgactcgactgcacccccgctcctcccagtccccacacactgcgcgccgccgccgggtcctcctagggtttcgccgcgatgtcgctccggccgagcgagcgggagcagatgcggaagggcaactacaagcagacggtagacgcggaggagagccgccgccgccgcgagggccagatggtggacatccgcaaggccaagcgcgaggaaagcctccagaagaagcgccgcgatgggtttcccgcctccgccgccggtgtgccgccgatgggccactccaccgcgctccagcagaagctcgatggcttgccggcgatggtgcaggccgtccactccaacgacccctccgtgcagcttgaggccaccacacagttcaggaagctgctttctatagagcgtagtcccccaatcgaagaggtgatcagcacaggagtggtgccgcgattcattgagtttcttacactttgaggctgcatgggcactcaccaacattgcatcaggcacatcagagaacactaaggtggtggttgagagtggtgctgtgcccatctttgtcaagctactcaactccctcagcgaggatgttcgtgaacaggctgtatgggctttaggtaatgttgctggtgactccccaaagtgccgtgatctggtacttggtcatggtgggctataccctttgctgcagcagcttaatgagcatgctaagctttcgatgcttaggaatgctacatggactctctccaacttctgtcgggggaagccacaaccaaactttgatcaggtcaaaccagcattgccagcactacagcaccttattcactctcaggatgaggaggtcctaactgatgcctgctgggcgctctcatacttgtctgatgggactaatgataaaatccaagctgttattgaatctggcgtgttccctcgccttgtggaacttctgatgcatccttcggcctctgtactcattccagctcttcgcacggtgggtaacattgtaactggggatgacatgcagactcagtgtgtcattgacaatcaagcacttccatgccttttgaatcttctgactaccaaccacaagaaaagcatcaagaaagaagcatgctggacgatctcaaacatcacagctggtaacaaggagcagattcagtcccagcaacttcaatgatatcacctggttggtctcttattcaactgctccgttctgtttggtttcttcccaaa

SEQ ID NO: 11433 - DNA, 1221 bp, Zea Mays
gatcgcaacgaatattggtagcggctcccccagctctggaccttctcaaacccttccccgtgggccgtggccgccgtctgcctgtctccttccactcgccactccgatttccctcggtcagacgccgaagccgaaccctgactccaattctctcgtgcgagtgacatctaggtttccagacgccttcggtgagtacagggaaggaagtcgccatggctgacgacgaacaggcggagaagaaggaggaggtccccgagcttgctccttttgacccaaccaagaaaaagaagaagaagaaggtggtaatacaagagccatcagatgaggtggataacttggcagagaagacagagagcttgactgtaaccgagtctagtgagccaagctttgcgggcatgaaaaagaagaagaagaaacatgtggaacttgattcttctcttaccgagaccggagatgttgatgacacaggagacgatcaagttagagaggatgaagaaggagaagggattgtgctcgctggtgccgctgccaccagatacccttgggaaggaactgacagagattataagtatgaagagctgcttggcagagtattcaacattttgcgtgagaacaacccggatcttgctggtgatagaagaagaactgttatgaggccccctcaagtcctcagggaaggaacaaagaagacagtttttgtgaacttcatggacttgtgcaaaacaatgcataggcaaccagaacatgtgatgatgttcttgcttgctgagatgggaacaagtggatccctggatgggcaacaaaggttggttatcaaaggaagatttgcaccaaaaaatttcgaagcgatacttaggagatatatcaatgaatatgtcatatgcaatggttgcaagagtccggataccattctttctaaagagaacaggttgttcttcctccgatgcgagcagtgtggttcatcgaggtctgttgctcccatcaaggctggattcgttgcccaagtgggccgtcgtaaggctggatcttaagctacctactacttgcctgaaatcgcttcccgatgaagacaatgcaaactagtttgctggtccacaaaaatcattgttgcactttcccttgtgcctacacagttcactggatttctgctgttcgctatacttggattggtgctgtgaatttatttcgtgtgatgagaggatttgtctcaaaaaaaaaaaa

SEQ ID NO: 11434 - DNA, 70 bp, Zea Mays
gagaaagtagttataagggcttatatttcactcaagtatctgtttttggcgattcatgccaaagggggag

SEQ ID NO: 11435 - DNA, 913 bp, Zea Mays
ctttcatgcactgatagtgacagatgggaagactttcaagaagccaaggcggccgtatgagaaggagcgcctagatgctgagctgaagctggttggtgagtatggcctgcggtgcaagcgtgagctgtggcgcgtgcagtatgccctgagccgtatcaggaatgcagccagggagttgctcaccctggatgagaagaacccacgccgtatctttgagggcgaggcgctcctccgtcgcatgaacagatatggtcttcttggcgagggacagaacaagcttgattacgtgcttgccctcactgttgagaacttcctccagcgccgcctccagaccatcgtcttcaagaatggcatggccaagtccatccaccatgctcgtgtcctgatcaggcagcgccacatcagggtgggaaggcagctcgtcaacatcccctcgttcatggtcagggtcgaatcagagaagcacatcgacttctccctcaccagccctctgggtggtggtcctgccggaagggtgaagcggaagaaccagaagaaggcctcagggggcggcgacgctgaggaggacgaggagtagagggccacgtagggattctgcgaccgcaattggttgaaatgtgaggtggacactttagttgttgtgcctgagtgtgtttgttcattgtaatgaattcagaaattctactgtggtagacaattttgcacccccactactgacactcctgtttaaatttaaacattggcatcgtgtctagacaggatgaattgtattctggtttggccgtttgggtggctatttgctagtttggtctttaggccaatgtttaagactgaaacaaattggtagccaactttactttattatgctctgctggtctgtttggtgatttttttttacccatgcaaatacacg

SEQ ID NO: 11436 - DNA, 1542 bp, Zea Mays
aacaaaaggggtgatgatgaagatgaggacttctttgttgatgatcaagacgttagtaggctaatgattgttacacaggatactaggttagaaaaggatgacaaaaatcgcacaagtataccacaggcattttcaactgaggaagcttcaagaataagtgatgccttatactgctatgagaaactgcatggtcgatgcactgataatcaaagaagttcccaggctgatcctgcagatgctgattctaaaccaaccagtggttcaaagggaagccatattcgcactgggactaaagttactgaagaagcaggacagcccattccacgtaggcgccaaaataaaggcaacagaaaagcgcacagctcacgtaaacagagattctttgctggtaattttgtgaataatcctgatcagtatggtggtgtgtcagaaagccctccaggcaattcagttggatatttctatggatctactccagaaaatcacagttataaaagttcaaagctgagttcatctcctcatggaattcctactgggagctcgcctgttgggtctgtgcccaaatcttctccacaatctcagcatcttacttttcatcttttagaaaaaaataaactccagccgcaaaggtacaataagttcaaacatcactgccttatggagcgtaagaaattaggcactggccagagtgagcaaatgaactcactgtatcgcttctggtcatactatctgagagataattttaatgaagatatatacaaggattttaagaaactcgcactggaggatgctgcagcgagctacagatatggtctcgagtgtctattcagattttatagttatggtttggagaaaaaattccaacccaatgtatatgaagatttcgagaagcttactttcgaattctaccgtaatggtgatctttatggactcgaaaaatactgggcatttcaccattaccgaaatccagatatcggtcctgtagataaacttccagagctggagaggcttctgagggaggagttccagaccctagaggacttcaaggcaaaggagaaagcccgagcgacgacggagaaaggaactggcatcagtagcagcagtgtggtggtggccgcaagtcatagcaaggctgagactaagcaggtctgagtcccgcatgaaaattttcggtggtcgccccagcaaaaagaggaagtagcgttttctttttctttgcgaagaagtaatgattcgggtagacatgtgcagattttgctatatcccctgccagtgccgtgtgttgtggctgcccagaaattttccctccttttctcattaccttcctggcaccaatgtcaatgtgggagttgtacatagatattttttttcctctcttgttaaatggacatatcatagagaatggagtttaaagcctttgtggtggctcggtgctgttttttagggtgtgggctatgttgatggcatagtcatctttgagaacttgatttttgaataccttctcgaatttaaaatgatgcaacgaatcatatagttaaagcc

SEQ ID NO: 11437 - DNA, 69 bp, Zea Mays
gatctggtaatgtgatattggtgcaaggaagttagttcagactttgtgagcgtgttgcatgtatttggt

SEQ ID NO: 11438 - DNA, 1543 bp, Zea Mays
gctgcggaagagtgtctcgtgctgctgcttccgctgcagtaaaatacggggaagaggaggggagggagacgcggccgctgcctgccgcacatgctttaagtcccactccccacctccccagatctccgccctcctccccaccgcccccattcctcccctcggccgcaaccgtagccgccgcactacggagcaagatcgtcgggtagacggacgggcgggcgggcgggcgcggctctgtatctatctgtcggtgggagaccgcgtgtgtcggttaggcggcgggtggcaaggaagaatggcggcgagcggcagatccgtcgcgtgctgtgccgccgcgctgctcgcggccgcgttgctcctctccgcaccgactgcaacagtgacatggaatgtgacctgcacatattcccaatttcttgctcagaagactccatcctgctgtgtatctctatcatcgttttataatgacacaattgtgaactgcccaacatgctcatgtggctgccagaacccaagtgggtcaaactgtgtgaatgaggattcacctaatctacaagctgcaattgatggccctggcaaatggactggtcagccccttgtacaatgcacttcccacatgtgcccgataagaatccactggcatgtgaagctcaactacaaggattactggagagtgaaaatcactatcacaaacttcaacttccgcatgaattacacgcagtggaacttagtagcccagcatccaaactttgataatatcactcagttgttcagcttcaactacaaaccacttactccatatggtggtggcataaatgatacggcaatgttctggggtgtaaaattctacaatgatctgctgatgcaagccggcaaacttgggaatgtgcaatcagagctgcttctccgcaaggactcccggactttcactttcgaaaagggatgggccttcccacgccgagtttacttcaatggtgataattgtgtcatgccatctcctgaaaattatccatggctgccgaatgcaagccctctaacaaaaccattggcactcccattcttggtattctgggttgccttggctgctctgttggcttatgcatgattagtgggatcaagaggtttagcaagtttcaagttgatgtcagattccatgaggtgcactgcaacaagtcatttgttcattcaattccatggttgcacagaaaagatgaggcgatgccaagaaaaagtcgatatgtctatgtgtttaagttaaagggccaaaatgtatttcttgtttggtatataacagccctacaacactttggtgaacttagttactgcagattaggtaattacagttgcaccttttgtattttatagcaaacccagaatttttcattggattctacgactgcccctcttgtagtaaatgcaaggcttccctgatactcctgtttaaagatttgtggattgggtgagacaatggtgattgagataactaagttctggggtcttgatccattttgctgtaaagattattgatctaaattgctaataa

SEQ ID NO: 11439 - DNA, 70 bp, Zea Mays
tctctcgcctgtatttagccttggacggagtttaacgcccgatttgggctgcattcccaaacaacccgac

SEQ ID NO: 11440 - DNA, 457 bp, Zea Mays
caggtgaacagcttgaatatatagcagtagagctgctcgtcgccggcggcgccatgtacgtggaggtcttcaaccgcggtgtcatcccgctggcatacagcatcaggaagaggaacagccgcaccgggctgccgtccacctactacgacggcatctacctcctcatcacctacttcaccaagccggagtccatggacgccctgcagcttaagctcaacgccgacgacgacgtcatccgctccaccagcttcaaggtccgccagcggaaggccgtctagttagacgggttgcctcctccgccttcaggccctgaacactgttttgttcacataccatactacaagaaatctgctgtacaagaatccacctttgccatgattgttgagttttttttttttgaatatgtttcttgtcttgtggttctcgaaaatggacgtccggccatcgttcgccagag

SEQ ID NO: 11441 - DNA, 1904 bp, Zea Mays
acatggaatgagaggcaaacacgggcccaggaacggcccacgggagagagaaaccctacccttcccttcgcggtggtggcatccgagacccgtccacaaccaccacagacacggtgcaacccccccccccccccccccccccccccctcttaaaagccgcctctcgccgccgcccgcaaaccctcatttttctctctcctgcgccgcgacgtccctcgccttcgccgccgaatccgagactccgatctcgggttcaccgcagcgcacagagcagccccgactcccggcccgatccgcgctctcctctccgtcgcttcaggaatggcacctgagggttctcagttcgatgctaagcactatgattctaagatgcaggagctgctgagcaccggtgagactgaggagttcttcacttcatatgatgaagtttttgagagttttgatgatatgggcctccaagagaatcttctgagaggcatttatgcttatggttttgagaagccatctgcaattcagcagagaggaattgttcccttctgcaagggtcttgatgtcattcagcaagcacaatctggtacaggaaagacagcaaccttctgttctgggatcttgcagcagctggactatggcctggttgaatgccaggccctggtccttgctcccacccgtgagcttgcacagcaaatcgagaaagtcatgcgcgcgcttggtgattaccttggtgttaaggtccatgcatgtgtgggaggaacatccgtccgtgaggaccaaaggattcttggcagtggtgtgcatgttgttgttggtacacctggtcgtgtgtttgatatgctgcgcagacagtccctccgccctgataacatcaagatgtttgttctagatgaagctgatgaaatgctttctcgtggtttcaaggatcagatttacgacatcttccagcttctcccagccaagattcaggttggagtcttctctgctaccatgccccctgaggcccttgagattacccgcaagttcatgaacaagccagtgagaatcctcgtgaagagagatgagctgactcttgagggtatcaagcagttctatgtgaatgtggataaggaagactggaagctggacacactgtgtgacctgtacgagacccttgccatcacccagagtgtcatctttgtcaacacccgccgcaaggtggactggctcactgacaagatgaggagcagggaccacactgtttctgccactcatggtgacatggaccagaacactagagacatcatcatgagggagttccggtctggctcctcccgtgtgctcatcaccaccgacctgcttgctcgtggtattgatgttcagcaggtgtccctggtcatcaactatgatctccccacccagccagagaattacctgcatcgcattggtcgtagtggtcgtttcggtaggaagggtgttgccatcaactttgtgacccgcgacgacgagcggatgctgttcgacatccagaagttctacaacgtgttgattgaggagctgcctgccaacgtcgctgaccttctgtgatcattttgaagaaaaacagaactaaaagaacggtggtgggggtgatctggtaaggcttggttttgccgaaatattgtgggggaggagtgataaggtcggtggggtttctatgttaaagtcgtggtctcgggcaatatgcgatttttctttatgccatgttttgggaaattttgtagctgcctaggcctcgtgctgttgtggtggttcattagtatgaagacgaaggctctgctggctatgggagtcctttttctttttgttagtattttgtttaaaactatgtatgaccgaattatttgtcatccttgactcaattctgctgcaaccagttgtatcaaaaataaaaa

SEQ ID NO: 11442 - DNA, 121 bp, Zea Mays
ccaccaccacatacctgagttcttgtgaagtttatctgagttacctgacgaattagggttcctcttccccatatttggtggggaagaaccctacctcatgtcccggatcccatccggcgac

SEQ ID NO: 11443 - DNA, 73 bp, Zea Mays
tgtatcatatgtgtatgatgaggtttagattttagatgcataattatgcaaagtatagtgctagacatggatg

SEQ ID NO: 11444 - DNA, 76 bp, Zea Mays
cttggcctaccactctgccaccgggttggacgatcgagtgggatgctgccccagcaggagaggagcaggagtagtg

SEQ ID NO: 11445 - DNA, 94 bp, Zea Mays
aaaaaaaaaaaaaaaaaaaaaaaaaaaaaaaattaaagaaaaaaaaaaaaaaaaaaaaaaaaaaaaaaaaaaaaaaaagacatagacaaaaaat

SEQ ID NO: 11446 - DNA, 443 bp, Zea Mays
tgaaaatggtacctgtggcagagaagttccttgatggatgggttatttttgcggaatacgctaaacccagaccaccgccggaggaaacagggatgaattcgcagccccagcagtcatggggagctccatcaggttcctggggtgcacagtagatgaagtgatattgtgagagcccctccctgtcccagccctggggctcgtagcggatcgtgagggatgaatttgtgtgtggtgtgtcgcaggtgtgaatgcctttgttgtccaaatattcctacgtgttggggtggtcgcttgctcgcgtccacgtctttcacatgaattggttactgtggtagttgtagttctggatacggtaccaaaacaaaagtattgctgtcaacaatctgcaacagccgggaaaacagtcgaaaacctttgcaaataatgcctgctgccgtggaaaa

SEQ ID NO: 11447 - DNA, 618 bp, Zea Mays
catggttgtttccttggggtagggtaggatatcaagtgatgaagctgttgagacagcaaaacagttggctgttcaggaaggattactggttggaatctcctctggagcagccgccgctgctgccataaaggttgccaaaagaccagagaatgctggaaagctgatagtggttgtgtttccgagcttcggcgagaggtacctttcatctgtcctctatcagtccataagagaagaatgtgagaacatgcaacctgagccatgagggagccgtcactttaagcgggcatagtaaatgtttctgaaataagacgcgtagccagcatcagtttgctccacttggaatcatttggccatgctcactctatcctttcgctagcctctatgaccggacctaaactggtgtgtgagaaacatccacgactgtcctcccaactgctttcctaaagccaaacgataacactctcaataattgtctatacgattgaagctgatttgattggtaattgtaaacagcttgtctttggatctttgaagtcaaacaaagtcagttggttgaatcagatggatattgtatgccttttgtgtgtgtgtgtgtgtgaaaaaaaaatctgagttgtg

SEQ ID NO: 11448 - DNA, 333 bp, Zea Mays
tgttcagttgtgtactaatatttttatcctattgggagatgtatgcatcgttcggcgggcttcttatgctgctcaggggtgacccttccactgccgctagctttgagcttgatcagaggctctttctgctcatccgcaaggtgtaaaactgtggttgctgaccacttaggtgtttgccttgctcgccacttatttaatttccatccgtgggtgaagctgttatatactgttgtaagtactgttttctgtatcgccatggatttatggtaacgagttcatgtttcttgctaaaaagattgctccagcagattcccctatcttatttgtagaaac

SEQ ID NO: 11449 - DNA, 1259 bp, Zea Mays
gtggggccccccaaaaagaaggatcccctccaaaaataagcgtatgctgctatgtgcagagcacacacggtattctttagtaaaaggcgaaagaatagttcgctctgtgcgcactgcgcagctgcgtgcttcaactaggtagccttcctgctccttttattcatctcactcgatgctcacctcgcgcatgcaagccgtatggtactaatccctccttgcgaccatctcacgctctacgcgctctgccgcgctagcaaacttgggccaggcccactaaccattgccaacccactactggaccaggccgggcctgatgcatcgaagcgctttacagcgcgagcgattgcgagcggaggttttcctggaccggccacatctgccacctagaaaaaaattctcgccatcacgagcagtcgagcaccaccctctgaccggtgaccgctgtgaagtcagtcagcttcagcaccacgagcacgatggccctcgcgctcgccacgaccccactcgcgcatctcgcccttgccccgccctcgatcttcggctcccagtcctcgctgctgctgctcccgcgccgcgcgtcgcccgcccccgtctccctctcccaccgccgcatcatcgcggccgtcgcgaccaaggaacccgagctcggcggcggcggatcgggggccggcgacggtgccggagggagcggcggcggcagcgacccgaggggaggagggcaggaaggagacggggaggaagagaagatggggcagggcctgtccatgtcgcagaaactcaccctcgcctacgccgcgctcgtcggagctggtggtgtaatgggatatatgaagagtggaagccagaaatccttggctgcaggaggcatatcagccctggtcctgtacgtcgtccacactcaactcccagtgagacctgtcctcgcatcatcgatcggtttaggtatatcggccgcgctactgtcagtgatggggtcgcgcttcaagaagtccgggaaggtattccctgccggcgtcgtgtcccttgtatccctggttatggtcggaggctacttccacgggatcttgcgtagctcgcacgcgtgatgcagcctgtggtcttttctgttccgtaatgcaatttggctccccctttgaactgtttctctgtttcacttctcggtggatgttttgtatccgttctcaactttagttcatcttttgtgacagtgggcaataataaccaataagcatgtgagagctgatagaggtgaaaaaaat

SEQ ID NO: 11450 - DNA, 1558 bp, Zea Mays
gcccaattacctctccctctcctccccacgccggccggagaaaccccccacccagcaccagttcccaactcctccccccacacactctatcctcctcgccgcctggggcacagtcacagagtatttcccccccattctccatgcatcgcacgagtgtctcctataaaaccccgcgcaacccccccgctccgacggcacgcacggacgacgcaccgcacactacccggcggtggaactcctcgcccgcgtcgctgctccggtctccgcgctgctagccgccgactgtaataactataacatttcaggtgtgcttctgaagggagatttcgttgaacaggatgaatgcattggcagcaaccagcaggaacttcaagcaggcagctaagctgctgggcctcgactccaagctggagaagagcttgctcattccattcagggagatcaaggttgaatgcacaatcccaaaagatgatggaactttggcatcctatgttggatttagggttcaacatgataatgctaggggacctatgaagggtggaatcagataccaccatgaggttgatcctgatgaagttaatgccttggcacaattgatgacttggaaaacagcagtagctaacataccatatggaggagccaaaggtggaattggatgtagccctggagacctgagcatctctgagcttgagaggcttacccgagtttttactcagaaaatccatgacttgattggcatccatactgacgttccagctccagatatgggcaccaactcacagacaatggcatggatacttgacgaatactcaaagttccatggttactcacctgctgttgtgacaggaaagcctgtggacctcggaggatcattgggaagagacgccgctactggaaggggagttctgtttgctactgaagctttgcttgcagagcatggcaaaggcattgcaggccagcgtttcgtcatacagggattcggtaacgttggttcctgggcagctcagctgataagtgaagccggtggcaaggtgattgctatcagtgacgtcacaggcgccgtcaaaaacgtcgatggcctcgacatcgtgcagctagtgaagcactcggcggagaacaaggggatcaagggcttcaaggggggagacgccatcgctccagactcgttgctcactgaagagtgcgacgtcctcatcccagcagcgcttgggggagtcataaacaaggataatgctaacgacataaaggcaaagtacatcatcgaggctgccaatcaccccacagatccagaggcagacgagatcctgtcaaagaaaggcgtcctcatcctccccgacatactggccaactctggtggcgtcacagtgagctacttcgagtgggtacaaaacatccaggggttcatgtgggacgaagagaaggtaaacgcggagctgcggacgtacatgacgcgcgccttcggggacgtgaagcagatgtgccggagccacagctgcgacctccgcatgggcgccttcacgcttggcgtcaaccgcgtcgcgcgcgccaccagtgattt

SEQ ID NO: 11451 - DNA, 2253 bp, Zea Mays
cgatggggttcagggtggcgtgtacccctcgggattgctgaaggttccatcgataacacagtagttgtggcaagtgagcaagattctgagattgtggttggaaaggagcaagctcgagctaaagtaacacaaaacattgtctttgtaactggcgaagcttctccttatgcaaagtctgggggtctaggagatgtttgtggttcattgccagttgctcttgctgctcgtggtcaccgtgtgatggttgtaatgcccagatatttaaatggtacctccgataagaattatgcaaatgcattttacacagaaaaacacattcggattccatgctttggcggtgaacatgaagttaccttcttccatgagtatagagattcagttgactgggtgtttgttgatcatccctcatatcacagacctggaaatttatatggagataagtttggtgcttttggtgataatcagttcagatacacactcctttgctatgctgcatgtgaggctcctttggtccttgaattgggaggatatatttatggacagaattgcatgtttgttgtcaatgattggcatgccagtctagtgccagtccttcttgctgcaaaatatagaccatatggtgtttataaagactcccgcagcattcttgtaatacataatttagcacatcagggtgtagagcctgcaagcacatatcctgaccttgggttgccacctgaatggtatggagctctggagtgggtattccctgaatgggcgaggaggcatgcccttgacaagggtgaggcagttaattttttgaaaggtgcagttgtgacagcagatcgaatcgtgactgtcagtaagggttattcatgggaggtcacaactgctgaaggtggacagggcctcaatgagctcttaagctccagaaagagtgtattaaacggaattgtaaatggaattgacattaatgattggaaccctgccacagacaaatgtatcccctgtcattattctgttgatgacctctctggaaaggccaaatgtaaaggtgcattgcagaaggagctgggtttacctataaggcctgatgttcctctgattggctttattggaagattggattatcagaaaggcattgatctcattcaacttatcataccagatctcatgcgggaagatgttcaatttgtcatgcttggatctggtgacccagagcttgaagattggatgagatctacagagtcgatcttcaaggataaatttcgtggatgggttggatttagtgttccagtttcccaccgaataactgccggctgcgatatattgttaatgccatccagattcgaaccttgtggtctcaatcagctatatgctatgcagtatggcacagttcctgttgtccatgcaactgggggccttagagataccgtggagaacttcaaccctttcggtgagaatggagagcagggtacagggtgggcattcgcacccctaaccacagaaaacatgttgtggacattgcgaactgcaatatctacatacagggaacacaagtcctcctgggaagggctaatgaagcgaggcatgtcaaaagacttcacgtgggaccatgccgctgaacaatacgaacaaatcttccagtgggccttcatcgatcgaccctatgtcatgtaaaaaaggaccaaagtggtggttccttgaagatcatcagttcatcatcctatagtaagctgaatgatgaaagaaaacccctgtacattacatggaaggcagaccggctattggctccattgctccaatgtctgctttggctgccttgcctcgatggaccggatgcagtgaggaatccagccgaacgacagttttgaaggataggaaggggagctggaagcagtcacgcaggcagcctcgccgtgattcatatggaacaagctggagtcagtttctgctgtgccactcactgtttaccttaagattattacctgtgttgttgtcctttgctcgttagggctgataacataatgactcattagaaaatcatgcctcgtttttattaactgaagtggacacttcgcattcttgcccgtttaccagagatggccactgctgatggtgcattttgacaggagtgcatcacctggacctttggtccaaccgaacaattaatcatcaacaaacaattaatccgcaacagccgactggaccggtggaaccggcctaccagatcgcagaacggatcctgattaatcggtttattgaattcgtgcg

SEQ ID NO: 11452 - DNA, 74 bp, Zea Mays
tttttttgtttcggagcggggcgcgtactattaccactacgtaccacaccaccgggcggctggccttcatgccg

SEQ ID NO: 11453 - DNA, 619 bp, Zea Mays
  misc_feature (1)..(2): n is a, c, g, or t
nncttggcgacattcgcccgtcgcaataggatcaagatttggggaggcgtttcaagaacctgcttcgtttattgctataaaacctttgttcgaggatgagaggtatattgttacatataacccgacaaaggacaaggtctatgctttgctcaaggaccaagcaaagcctgatgacattctcaaggccgcttttcatgcacatgtgctactgcattttatcaatgctacacatgctaaccggaatgcacggaagcgcgcgaactccaatctgtcacaccagtataacccactgaacatggacttcttaccacacatcgaagagtcgtgcaagatcgttatgtcgtcttatggagttttcaagaagaaatcaagagaacagggatggatcatgtctgaatcacttctcaacccaggacgagcaagattgtgtggagtagcaccgcaatgatccaagccttttttattttttttcatgatggagatgatgagttctttcccatacaattggagtccagccctatgtgggtcagcgaaactaactttagtcaacaatcagctcaagtacataaaaatgcaccaaatcgtcatgagcccagaaggacagtacttgaacctggtt

SEQ ID NO: 11454 - DNA, 1056 bp, Zea Mays
tgatcctctcgaccgattttcccccaaaaatagctgccggagctcgcgataattcggttgtcgatggccaggacctctttcaaaatggagcacgacctcgagaaaaggcagtccgaatctgccaggatcagggataagtatcccgacagaattcctgtgattgttgagaaagctggcaaaactgatgtccccgagattgataagaagaagtaccttgtccctgctgatctcactgtcggccagtttgtctatgtggtgaggaagagaatcaagctgagcccagagaaggccatctttgtctttgtgaagaacaccttgccaccaactgcctctttgatgtctgcaatctacgaagagaacaaggacgaggatggcttcctttacatgacctacagtggtgaaaacaccttcggctctgcctagagcaatcgcccctgccactgtaaataaacgagcatgatggggctgctgctattgtaaacctgtgtatatacctcagtctctagtatgctgctgccggattgcttcaatggcttcaatgacacccttagctttcaactgtttggatttctcctgtgacattgaattccttcggtatcgaaacatttgatcatttcactattacttcacttaccttatctcatcagatgcgtgattgctgtttatctgtgctcatcgtgtttgttttaagctgcaactgcaatctgctgacggccaagctgatgctatatttttcttgatggaatcgatagattcccgcagtagataaaggggtgtttggtttaagaaattaatccatccaaaatgaggtgatgcatcgtgagttagttccttaaatttggtaggatgactcatactcagtccttatatcagtactatctaactatgaaatcaaataaaaaagtgaggaataagaacagtactaactacgaaaccaaataaaaaaatgaggaagtccttatatcagtactatctaactatgaaatcaaataaaaaagtgaggaataagaacagtactaactacgaaaccaaataaaaaaaatgaggaataagaaa

SEQ ID NO: 11455 - DNA, 1320 bp, Zea Mays
gtccttttcatcgcttggtggctggtttgctaccctgacggtggcaggatatacagtgttagccatgcgaaaactcgtgaagacagagcttcttgcaccatcggagcccacgaagaagccgtcgccgttttccacgtcggagatctgggcatggtcagctatattcgtcgcgtcgttcggcgtcgcatgtttcaatcccacggcgtttggtaccacggcaagaacatgccttcctttcctgcttgctgctaatgtgctgggatacatggttaccacctggcgtcaagaaagtgctgcatccgatcatctcctgcgcactctgtgcagatttcgcggcgctagcctatgggtacatctcagggtttggacttgatgccgtgctaggtgcttacctcacaaaggtgccctctaatcctggagccggtgacgtactaatgactttccttgggtctgtgatcatatcatttgcattctcgatcttcaagcagagaaagcttgtgaagaggcacgcaacagagattttcacatcaattgccatcgcgtcgacattctctctgtactcaactgctatcatagggcgcctgattgggctagagccatcgttaaccatatcaatactgccaaggtgtattactctggcgctggctttgagcatagtgtctttctttgaaggtgtaaactcttcggtaactgctgtcgtggttgtccttaccgggctcatcggtgcgaactttgtgctagcagccatggagaaacttggtctgaacgaccccatctccagaggagtagggacagcttccagcgctcaaggactgggaacagcagcactggcggccaaggaacctgaagcgctccctttctgcgccatcgcttatagtttcacggggattttcggcacgctgatctgctcggttccggcagtcaggcaaagcctgatattcatagctggttaagagatgatctgaatttgacggtttcattctttagataaaagaagcagcttgcttcctccctccgtgttcagaaggtcaggaagcaacgccccacatgtcaggtcaggatctaatatgtgtaggggcttgaaaaaaaaaggcgaataattctgtaatcaggatgtaaccgaaatactacagttttttttttcttgtgacaaaatactactagaggaaggtagatccgttatttgtttgacagtttgtggtgtcatctttctccctccctagaaacaggagagatatagtatgattgataaaatcaacgtttttcagagataaattatggtatgaagttggataaaaaaatcattcagatctagttgcg

SEQ ID NO: 11456 - DNA, 771 bp, Zea Mays
aaagaaagaaaagaaaagcggggggaaatatgccttccttccttcttgcgtcacagaccacgcgcggatacaccgcacaacagccaggcagcaagcagagcacccaccgccggaagcggccgtcggacagaacgacacgtggggcacggcacagtccgggcccgcacgtcatcgaagacacctgacctgcccatgcgtcttctagagaaaggcaagatcaagatcggaatcaacggtttcggaaggatcggcaggctcgtggccagggtcgccctgcagagcgaggatgtcgagctcgtcgccgtcaacgaccccttcatcaccacggattacatgacgtacatgttcaagtacgacaccgtgcacggccaatggaagcacagcgacatcgccctcaaggactccaagacgcttctcttcggcgagaagccggtcaccgtctttggcatcaggaaccccgaggagatcccgtggggtgaggctggtgctgagtatgtcgtggagtccaccggtgtcttcactgacaaggacaaggctgctgcacatctgaagggtggtgccaagaaggttgttatctctgccccaagcaaagatgcgcccatgtttgttgttggtgtcaatgaggacaagtacacctccgatgttaacattgtttccaatgctagctgcaccacaaactgccttgctccccttgctaaggtcattcatgacaactttggcattattgagggcttgatgacaactgttcatgccatcactgcacgatgcttg

SEQ ID NO: 11457 - DNA, 135 bp, Zea Mays
gttttatcccttgttgtttttgtaggagaagttttattcccttatctttaggttagttacttcatgtggagaacttgaagcttagaaggtttttatatatcttttatggaaaggcttcacccttccaattattgt

SEQ ID NO: 11458 - DNA, 785 bp, Zea Mays
gctgatgctggatctgcccgatttggcatgggcgccgcgtacgggaccgcgaagagcggcgtcggcgtggcgtcgatgggtgtgatgcggccggagctcgtcatgaagtccatcgtgcccgtggtcatggctggtgtgctcggtatctacgggctcatcatcgccgtcatcatcagcacggggatcaaccccaaggccaagccctactacctctttgatggctacgcccacctttcgtccgggcttgcctgtggtctcgctgggcttgcagctggcatggccatcggcattgtcggtgatgctggagtcagggcaaatgcgcaacagccaaagcttttcgttggcatgatcctcatcctcattttcgcagaagcgcttgctctctatggtctaattgttggaattatcctttcgtctcgcgctggtcaatcccgggcggattaagtgcaccaccattctgtgattaccgcaccgtttattatgctattctgagaggattggaactctattcccttgtctagtttattcttgttaccatgtattaatgtaacaatctgtagctgatggaaggtgacttccagtcatgttttggttttggtggtgtcgagcagaggttatttatttttgggttaaggtcggagtcggacggatgctcttgggctaagtggatttaattttatccttgctgaataaagaacacggaattgtagccaaataagaacgtgatatataaatatttctttcccactttgctggatgcctggattttcatcaccatctatact

SEQ ID NO: 11459 - DNA, 918 bp, Zea Mays
tacatctctattaagaattaagatgcttgtagtatgtcatgttttataacatcactggtgacaagactgcaggttctcttcagaagatatatctggacagaatcaagttaaggcttctgtacaacgaaagattcggcaaagtatcgctgatgagtaccccagccttgaacctttgctagatgacttgctcccaaaaaagtcacctatgattgttgttaaatgccaaaatcatcttaatcttgtagtggtgaataatgttcctctatttttcaatatacgtgatggtccttacatgccaaccctgcgtcttcttcatcagtatcctgatatcatgaaaaagttccaagtggatagaggtgctatcaaatttgttctatctggcgcaaacataatgtgtcctgggttgacttcacctggtggtgccttagacgacgaagtcgaggaggaaacaccagtggctataatggctgaaggaaaacaacacgccctggcaattggatatacaaagatgtcagcaaaagacataaggaccatcaacaaaggaattggtgttgacaatatgcactatctaaatgatggcctatggaagatggaacggctcgaatgagtagaattctctgaggggttcataacttgcggcagatcgtattgatggacatatgaaaccagcaggaccctatttgcacagctggtatcgttttaaagatgaagtactaagaagctttatttacctgaggcaacttgagcttactccgaccctttggtgtggagtgcatgtcagaaacaggattatgaatgctgtgttcagtgcttttcacaaattgttgtattttcaccagaacaatttgccctcaattggaagtgaggaaatccataacgatctataagttatttgatcttacagtttgttgtgtgtaa

SEQ ID NO: 11460 - DNA, 433 bp, Zea Mays
tttggacctattagcagtgaatctgacgtcgatcggctaaagcaatcatgtgatctgttctctctgctccaaggaacaggacgtgcaacagaactgctccagctgtggggcctgcatgggcaagtacttctgtaaagtatgcaagttcttcgatgatgatgtctcaaagggccagtaccactgtgacggatgtggaatataaccggcggcgtggagaactttttccactgtgataaatgtgggtgttgctacagcaatgtcttgaaggattcccaccactgcgtcgaaagagcaatgcatcacaactgccccgtctgctttgagtatctgttcgactccacgaaggacatcagcgtgctgcaatgtgggcataccatccatttggagtgcatgaacgagatgagagcacaccatcaccctgtttggtctttgg

SEQ ID NO: 11461 - DNA, 987 bp, Zea Mays
caggatcgcatccatcgccgtttataaaacgacttggctacgcttcacgcacacggcgtctttgggtgagcacaccgcgcagcaacgagaggggcaaacaagcttgctactgtgatttctcgtccgagcagcggcggaggagagagagagagcatggccgaccacaaggaggagcctgtgccggagtctgtgatggacaagatcaccgagaagttccacggcggggactcgtcgtcgtcgtcgtctgactcggacgacgagaagaaggggtcctcgttggcgtcggcggcggaagccatgaaggccaagatctaccgccttttcggccgggagaggcccgtccactccgtcctcggcggcggcaagcctgccgatcttatcctatggaggaacaggaagatctctggcggggtacttgctggtgccacggccatctggctcctattcgaggtcatggagtaccatctcctcaccttggtgtgccactgtctcatcctctcgctggccatcctcttcctgtggtccaatgcctccactttcatcaacaagtccccaccgaacattcctgaggtcaaaatccctgaggatgtggctgttaatgttgccctgtcactgagatatgagatcaacaggggctttgctaccttaagggagattgggcatggccgtgatctgaagaaattcctaattgttattgcaggtctctggcttctttcagttctcgggagctgctgcaacttcctgacactgttctatattgtctttgtggcactgtacactgtaccagttctgtatgagaaatatgaggacaaggttgatgcttttggtgagaaggctatgactgaactgaagaagtattatgccattttcgatgagaagtgcctatcgaagattccaaagggcccccttaaggataagaagcactagattggtagtaaggttggtaccaaaatactccatttgtcggtcatcttattcgatcgaaag

SEQ ID NO: 11462 - DNA, 1196 bp, Zea Mays
accaaacgtgcctagaatctccagggtccagcttgaggcagcattttgcagttgaaaggaaatgggcccttggtcttcaggcaattttcacgttaacaacttacaacaccaggcaccatgactttgagagttcagtagtcgcacgaggagacctttggaggttggagtcatcgcgtggcaatttaacttcagggaatgatagctcaccacttttccttgttcaacttgggcctttactgtttgttcgagactccacgcttcttttgccggttcatctgtcaaagcaacaccttctttggtatggttatgatcgcaagaacggaatgcactccctatgcccagctatctggtcaaagcatagaaaatggatgctgatgtcaatgatgtgcctcaaccctgtagcttgttccttcatggatgtgcaatttccaaatggacaaatgacatatgttgctggtgaggggataacagcaagtggttttatccctttatttggtggattactccaagcacatgcaaagtgtcccggtgatacaagagtgagcttctccttcaagaacaaacaaggtactaggttcagtccaacgtttcagtggcctgacaattctgtttcatttggagtcgcacaagctgtagcatggaagagatctggccttatggtcaggcccagcattcaaatcagtgtttgccccactttcggaggaactgatcctggaatatgcaccgagtttgtccactctttgaaggaggaagtcagcgtaatgtgtggtttctcttgctcaagacatccctcagcattcacagctctctctcttgggcgatccaaatggaatggccaggtcggcagttcgggactagtaatcaccttggagacaccccttgacaacatggcaaggccttctttatccgttcaattgaacgggggtttcgagttctgacatttcccccgtgggctctagaatacaactgtatatactgtatctcatagcgagaagatgatatgccactgtatatattgcacacatgtagctgtgattaagtagatatcttcccaaccggtgaagtgtatagtcctaaaaacagacaaatggcttactgttttggttcactgaataaatttgaaggcttgtatgtcgtacctgtgcgttcgaagtatttgtcttcttcaataaaaattgtagtactcctatgtccgt

SEQ ID NO: 11463 - DNA, 822 bp, Zea Mays
ggtcgtccggagcttcagtcgggaagagaatagcaaggaagataaggaggctctcgccgtctcgcacaggctcgttgttcctcttatccgcggaggaagaaccttggcccgacaccatgctcccaatggccgtccaccccaccaccacgccggccttgtccccgcgcgcccgcgtctcgccgcacaggcctcccatctcctccctggcggacccctcgtcctccccctgccatcgcatcgtcagtttcaaaagcaggaggctgccacttcgctctctccacatcgccgctgccgctgccgccggggcagaggaagaagaggcgcaactaggtggaagtgtgaacgcggtcgacgaggaggaagcggagaataaggtggtggtgcccgagagacaggacccgatgctggtactcaagttcatctggatggagaagaacatcggcatagcactcgaccagctggttcctggctatggcagcatcccgttgagcccgtactacttctggccgcggaaggacgcgtgggaggagcttagagccaagttggaagagaaagagtggatctcgcagaagcagatgatcatccttctcaaccaggccaccgatatcatcaacctctggcagcagggtggtgggaacctgtcgacatgagtccctccccgccctgttctttcaaccgtgcaaagcttgcgttttgttggtttcactacaggctctctctgttgttaatgttaaaagtatggtacatggccttgtagatcggttcaaactgttctcaggttgtcctcctgacaaggaggtggagttccaatctgaattccag

SEQ ID NO: 11464 - DNA, 587 bp, Zea Mays
ctgagaaatctgctggtggtgtattgctaccgaaatctgctgttaagtttgagaggtatctgatgggtgagattctatcggttggtgctgatgttagtgaagttgaggctgggaagaaggttctcttctcagacatcaatgcttacgaggtggaccttgatacggatgagaagcactgcttctgccgggagtcagatttgttagctgtagttgaatgaattttaccatgaaaattacagacttacttgcccatgctccaactgcatggacttatcttgcacctactttgttgtacttgaactcggcttctagatgagtgttagttatcattgtattttggccgcaataaacaggaatcgtgtcaatgcccccatttctttacagcacgctctcataaagcgcttagattttgataggaaagcgtgaacggaacatgaaagctgaaatgcttacattgttcatctggtgttggtgtttctgaacattcttcaagcaccgtcgtaaacatttcaactagagactgcagattttacatttttattgtgctgatgcttgccatgtctcgttcgattgatttggattttttg

SEQ ID NO: 11465 - DNA, 72 bp, Zea Mays
gagggaacagagccgaagctgtgcacaagggagcttcggcataatgacaggaaaaaggaaaccgccttaaag

SEQ ID NO: 11466 - DNA, 303 bp, Zea Mays
tttataaatctccagcctgttgccttcttccaaagctgctctcgcccccataaataaagcagctcctccgggggcggcgaactactcctcgtcgccaaaaccctagccctgcttctttgccatggcgagcagcgctagccaggcgagcctcctgctccagaagcagctcaaggatcttgcgaagaaccccgtggatgggttctccgccgggcttgtagacgacagcaacatcttcgagtggcaggtcaccatcatcggaccgcctgacaccctatagtacatacaaagaaaagaaaccgattg

SEQ ID NO: 11467 - DNA, 1366 bp, Zea Mays
tgccacctagcctgctgccgcggcctggattgggggtggcctgaccgtcgacgtcgacgccaacgggagaaagggcaagggcaagggcgtgtaccagttcgtcgacaagtacggcgcgaacgtcgacggatacagcccaatctacaacgaggatgactggtctcccaccggcgacgtctacgtcggtggaaccactgggcttctgatctgggccgtcaccctcgctgggatcctcggcggcggcgccctcctcgtctacaacaccagcgccctctccggctaaggatatccaatgcatgcgcttcttgcgattcgtcatgtaaaatcagggtgtctgtctataatctagcctccatggatgctcaaccttcgtcatgtaacaataatcagtgctactcttcattacataattttgatgctatatatatataccccatccctccctaataattcgttctatctgcgtagcgaggttaattcaaaaaaaattcgtaaaagatggtgaagctaattaagtgaaatataaaatatgtgacatacatacatacgtacgcacgtgcatacatactcctccggttacaaattcaaccaaatgatgatcagctcctccttaggtcttgtttaggagcaaatgtaacgaagggaatttaaatagtaaaataatattctagcctgctcagggcctgttcgtttttcacggattgaagacctgaaatagttcttgaccggattgtttctctaatttatataagttttgataggttggaatgaatcctggtccaataccagagaaacgaacgagccctcaatctactccgttacttttgtttacaaacaagcccttaagcttccgaaacgaacgacgaaacccgcaactgatggtactgcttctagtgcacggcttgcgactgcttgtcttcgtgctcgtctcagtgataaccaactagctagcacagttgcagtggtaggcggctgtgcaggaagcaagtcagaggaagatcagattgagcgcaagagctgaaacttgaaaatttccaaaacctttttaagtctttagactgtctccattacgtgaaatagagaacgtggaactatagaagacacggtttacagaaagaagtttgaaatagaggatgtgataaaagatctgctagaaatagcctcacgtgtacgtgtacccccgcaggccgcttggcactgagtgactctcccacttttccacaactattacttgataaaatatatttggtccctcaaacaacaaacaaatcatctgatacattcgggggtaagttgtaaacgcaatcttgaaccacatagctatagcttccccccccccccccctggttgtattttccagcaggca

SEQ ID NO: 11468 - DNA, 83 bp, Zea Mays
gcctcataaaacccagctagtgcagggtcaacaaccttcttctctttagccatttagtcagcgcttgtgcaaatgccgaagct

SEQ ID NO: 11469 - DNA, 80 bp, Zea Mays
catgcccggctataacttcgtcaagctcattaatttcaccttcaatatgttcgaaggtctttggtaaatcttcagctgac

SEQ ID NO: 11470 - DNA, 1200 bp, Zea Mays
gtccattccgttccgtaggatcccacgaggtgcggctcgtcatggacaagatccgcgcggctgccaccgccgcgccgccggcggcggtggacctgagcgatctcctgtccgggtacaccaacgacgtggtgtgccgcgcggtgctgggcgcgtcgcaccggaaccaaggccggaacaggctgttcagcgagctgacagagatcaacgtgtccctcctcggcgggttcaacctcgaggactacttccccccgaatatggccatggcggacgtgctcctccggctggtgtccgtcaaggcccggcggctcaaccagaggtggaacgacgtgttcgacgagctcatccaggaacacgtgcagagcaggccctccggcgagagcgaggagagcgaggcggacttcatacacgttctgctctccatacagcaagagtacggcctcactacggacaatctcaaggccatcttggtggacatgttcgaggcaggtatagagacatcttacctgacgctagagtacggcatggcccgagctcatcaacaacaggcacgtcatggagaagctacagacggaggtgaggacgacgatgcgctcgccggacggcaagaagctggacatgctagcggaggaggacctcggcagcatgccctacctcaaggcgaccatcaaggagacgctgcgcctgcacccgccggcgccgttcctcctcccgcactactccaccgccgactccgagatcgacggctacttcgtcccagccgggacgcgcgtcctcgtcaacgcctgggcgctcgggagggaccgcacgacgtgggagaagccggaggagttcatgccggagcggttcgtgcaggaaccgggcgccgtggacgtccacatgaagggcaaggacctcaggttcatcccgttcggctccggccggaggatctgccccgggatgaacttcggattcgcgaccatggagatcatgctggccaatctcatgtaccattttgattgggaggttccgggctctgcagcaggggtgtccatggacgagtcctttgggctgacgcttcgccggaaggagaagcttctccttgttccaaggattgcttcctgataatcctacatctgtaaaacttgtgtcttgctagctgtaccgggaacaagattaaataatgcaaggaataaagtgactctgttcttcgtcaaaaaaata

SEQ ID NO: 11471 - DNA, 75 bp, Zea Mays
tatgtatattttttattgttttttttttttttttttttttttttttttttttttaatttttttttttatttattt

SEQ ID NO: 11472 - DNA, 226 bp, Zea Mays
gttcgaccatgctcttatatataagcaggtgcaacgggcaaaatgatttatatttctcttttttaggcatatatgtacgctgtgctcaaacagtttcggcaagacatcagagcagctggctgtcgtctgatgaggccaggaggaattcagcaatggaatcgaggactgttgcactaacaaacagtacaatgtaagactacgatcggttgatagaagacaccctaca

SEQ ID NO: 11473 - DNA, 2582 bp, Zea Mays
atggctgtcctcgtcgcggaattcatcctcagattcacagtaatgctaatggacttggaggtaatcactggaattctaaaaaataagcttcttagacatgccattatcctaataccaaattggatttacgatgaaagcaacaatgacaaaagatttgacaaatattcagggaaggttgcctctgaaaagcaagggagctccaatgatagagccctaagggaagaactcgccatcttttcaaaagaagtaatacgatttggcaacctctgcaaagatcctatatggcataacttggggcgatattttgacaagtatgcctctgaaaagttagcgacagataatacacctcaggatcattcaaaggggagtatggaagctattgtccagcaattgattaatttggcacaaaacacttctatcattcagttttttcctatcaggttcatgcttcaaagcaactttattgtcattcttatcggattaaccaatagtatcctacaagctgacgaagagcttctttctgatcttgggactgatgttaaagacgaatgcaccaagtttgatctcgtggataatgtcaaggtgaactatgcaggtgcttttgtgatgatgataaattgcaacctttgcttatccatcggtgtgatttgcttaatggatgcatttttcataaacaccatggggatatcctacacatccaatgaggccttggggacgcccccatggccaacacagccactaccatcaccagcgatggagagggtgctcaaggatgacgccgtcgaggagaagggcgagcgcgccaggatggcatcgtttgttggggccatggcaatctcggatttggtgaagaccacattgggcccaaaaggaatggacaagatcctgcaatcaactggcagaggacgtaatgttactgttacaaatgatggggctaccattttgaagtcacttcacattgacaatcctgctgcaaaggtccttgttgctggagaacttttgaaggaggctgagaagttaattaacatgaaaattcatccgatgactattattgcaggttacagaatggctctcgagtgtgccagagattctttgctaaaaaagaccatggacaacaaagaaaatacagataaattcagatctgatctcatgaatattgctatgactactcttagttcaaaaatactttcccaagacaaggagtacttcgctgaacttgcggttgatgctgtcttgaggcttaagggtagcaccaacttggaatctattcaaattctgaagaaacctggaggatctcttaaggattcctttttggacgaagggttcattcttgacaagaaaattggcattgggcagcccaagcgcattgagaatgccaaaattttggttgcaaacactgctatggacacagataaagttaagatatatggagcacgggtccgggtggattcaatgtctaaggttgcagatattgaagctgctgagaagcagaaaatgagagagaaagtccaaaagatcatagcacacgggatcaactgttttgtcaacaggcagttaatctataacttccctgaggaactctttgctgacgctggcatacttgcaattgagcatgctgactttgagggcattgaacggttagctcttgttactggtggtgagatcgcatcaacttttgataatccagagtctgttaagcttgggcaatgcaaggtcattgaagagattatgattggggaggacaggctaatccatttctctggggttgcgatggggcaggcttgcaccattgtcctaaggggggctagtgagcatgtgctcgatgaggctgagaggtccttgcatgatgccttgtgcgtgttgtcccagacggtaaatgatacccgtgtcttgtttggaggcggatggcctgagatggtgatggccaaagaagtggatgaacttgcaaggaagacccctgggaagaaatcccatgctatcgatgctttctcacatgctctgcaagccatcccaacaatcatagctgacaatgctggtttggatagcgctgatttgatctctcagctacgagctgagcaccacaaagagaactccactgctggaattgatgtcatcacaggcactgttggggacatgcaaaagctagggattcaagagtcgttcaaggtgaagcaggccattcttctgtctgcaacagaggctgccgagatgatcctcagggtcgatgagatcataacctgtgccccgcgcagaagagaggataggatgtgatattacacgctgtttctcgatgtagcgggatgctcatcaccctagttttgaggggtattatggtttaggggcgctcaagttggtcagatttcgagtgtttttggcccctaagcgaccggtacttattatttggttgaaacaatcagccttaggtttgtgttctatattctcatgctgtaccgtttggtagcgagttacgtcgtacgatatgcttgttccatcatgtttttctattccttttaacgtaagaatgggcttgtctttgtttccggacgtggttgctacatgtgttgttggttttgagcgtcagg

SEQ ID NO: 11474 - DNA, 143 bp, Zea Mays
cctgatgcggttttgagtacgaccgggcgtggacggaattcggtcctccggattttcaagggccgccgggggcgcaccggacaccgcgcgatgtgctgtgctcttccggccgctggaccctacctccggctgaaccgattcca

SEQ ID NO: 11475 - DNA, 72 bp, Zea Mays
tcctacctcattgtaccactcctctacgtgctaggcatgcactaaagaagttatctgtggctgcgaagtgat

SEQ ID NO: 11476 - DNA, 633 bp, Zea Mays
cgaaacctaggattagaagcatgtatgaattatgggaaaaattatcaacattgcatctgtagttggtcttactggcaatgttggccaagctaattatagcgcagccaaggctggagtgattggtttcacaaaaacagttgccagggagtatgcaagcagaaatatcaatgtgaatgctattgcaccagggttcattgcatctgatatgactgccgaacttggagaagagcttgagaagaaaatcttgtcaaccattccgttagggagatatggccaaccagaggaagttgcagggttggtcgagttcctggcccttaaccccgcagctagctatatgactggacaggtgcttacaattgacggagggatggtaatgtaagatttgagttagcttgatgcacttctacttttgctgagcatttaatgttgaacacccttgttgtgcacgggcgattttggacaacaaattagtgttgtctctttctttgtaatactctctggtaataaatctagcatgtggaatggaagttgaaatctgggttttcgtgtatattctgtgccaacttgtcaatgctatttgactatcctggcccgaatttttttgcttttcagcacatttttcgaaaagcttag

SEQ ID NO: 11477 - DNA, 1828 bp, Zea Mays
cctacccgctccgcgctggcgcacgtgagcggcatgccgtctcagatcgggatcggcaacacccactccgtcactcccctacaaagatgttttctcagtcaagtcgcctccccctactgtaggccgctgctgctcctctcctcccatctcaccacacaccgcagccccagcaagatcgcgcggaggccatggcgaagcccaagccttcctccgccggcgccaagccgaccgcggctgcgccaccggttacagtgcactcggcgctggtcacctacacctccatgctcgcgctcctctccctctgcccgcccttcgtcatcctcctgtggtacacgatggtgcacgcggacggatcggtggtgcggacttacgagcacctcagggatcacggcgtgctcgaggggctcaaggccatctggcccatgcccaccctcgtcgcgtggaagatcatcttcggcttcgggctcttcgaggccgtcctacagctgctgctccctgggaagcgcttcgaagggcccatctcgcctgccgggaacgtgccggtctacaaggcaaatggcttacaagcatatgcagtgaccttgataacttaccttggtttgtggtggttcggtatatttaaccctgcaatagtgtatgatcacttgggggagatatactctgctcttgtttttggaagctttgtgttctgtatttttctctacataaagggccatgtatttccatcttcatctgactctggatcctctgggaatgtgataattgacttctactggggtatggagctgtaccctcggattggcaagtactttgatatcaaagtattcaccaactgtcgtttcggtatgatgtcctgggctgttcttgccgtaacctattgcataaagcagtatgaaatgaatggcagagttgctgattctatgcttgtgaatactgcacttatgttgatctatatcactaagttcttttggtgggaatctggatattggtgtactatggacattgctcatgatagagctggtttctatatctgctggggatgcttggtatgggttccatccatatatacttcccctggaatgtaccttgtaaaccaccctttgaatttgggcccccagctagcactctcaattcttctagctggaatgttgtgcatatacataaactatgattgtgaccgtcagcgccaagaatttcgacggacgaatgggaaatgctcggtctggggcaaggctccatctaagattgttgcctcttatcagactacaaagggagaaactaaaaccagtcttctcttgacttctggatggtggggcttgtcacgtcacttccactatgtcccagagatactatctgcatttttctggactgttccagctcttttcaatcacttcctaccatacttctacgtgatctttctgactatattattgtttgaccgagcaaagagggatgatgaccggtgctcatcaaagtacgggaagtactggaagatttactgcaacaaagtaccatacagagtcattcctggcatttactgagcatctcgagttctggacgactcttgatattaagctcaacagatgccacgatatccagtcttcataccgatttgctactgattgtgtaatgtcgctggtaggcttgggctgtacgcagtattaggtgtaggcaacttggcttttggcatttaccttgtatgtgtcgtgtatctagggctggggcttgctccttcagttgttagacagtagggggtaatctcaggggtgcaatgtactccctccgtcctaaaataaaagcatatctagtatttaaattttaaaaaaaa

SEQ ID NO: 11478 - DNA, 824 bp, Zea Mays
ctggtgtgtcagtggcaactcgcatcaagcggatcgcggggctgcatcaccaccaaggaacttggcactgtgatgcgctcattggggcagaaccctactgaggctgagcttcaggacatgatcaatgaggttgatgctgatggcaatggaaccatcgactttcctgagtttctcaacctgatggcacgcaagatgaaggacaccgactctgaggaggagctcaaggaggccttccgtgtgttcgacaaggaccagaacggcttcatctccgctgctgagcttcgccatgtcatgaccaacctaggcgagaagctgacggacgaggaggtggacgagatgatccgtgaagccgacgtggacggtgatggccagatcaactacgacgagttcgtgaaggtgatgatggccaagtgagatatgcccgccgtttttaagctagttcctctcctgatggtagtaactagtctagttttggagactgactgcttttggttgtgtcttacgcctatccttgcgtcaatggacatatccgtttgttttcaaccaagggattttaccatgtctgtaatttcgctcaaatttggttcttgttgtattacatttgtgttatcttggtacaatgatcatgtctttctctttcaaatttaggtgttcagtttcctggtagaaatacgtggtagtggtatgcaggtattgctatatctggttttgattggtttgtcgttgtttcttgtgctgtgataagttcttgtagagaagtactgtacgtggtatgcagatcaattgattgttggccgtacggcaggacataggtggaagtataa

SEQ ID NO: 11479 - DNA, 747 bp, Zea Mays
  misc_feature (1)..(2): n is a, c, g, or t
nngaattcgctactgttgaagctgctcagaaggctcttgaatttgttggtcatgacctgatgggacggcctctaaggattgacatggctaccgagaggggtgcatacactcctagcagcgggaaggacaacggttctttcaagaagttcgctccaaggtcaggcaacaccgtgtttattaagggctttgacacctctggtggagaggaccagatccgcaccgctcttgaagagcattttggatcatgtggagatatcacccggatttcaattccaaaggattatgacactggtgtaagcaaaggaatggcgtacatggatttcaaggacccagattccttgaataaagcatacgagttgaatggaaccgaccttggtggctacagcttgtatgtcgatgaagccaagccgagacctgataacagcggtggcttcagtggtgacaggggccgtggtggaaggggtacgcctttcagacagaccgctggtacagctagtacaggaaagaagaccacctttggtgatgacgattgaagatccatggctggctattatagtgaaaaacgcaaactatattgtaccgttcagacctattgttatctgaggctgtactgcttttttgcttgataattcgacaattgtttttaccatttttaacatttggtgctatcaaagacatgactttttaagtttttataatatgagtagcggcaagttcaaatgttgttggtctttgaatttctgtgat

SEQ ID NO: 11480 - DNA, 64 bp, Zea Mays
cttgggcaaaatagccatcactgtcgagcattcaatttcaaatgtgtttctagtagaatcgctc

SEQ ID NO: 11481 - DNA, 1097 bp, Zea Mays
ccaaaacgtgcaacagaactgctccagctgtggggcctgcatgggcaagtacttctgtaaagtatgcaagttcttcgatgatgatgtctcaaagggccagtaccactgtgacggatgtggaatatgtagaaccggcggcgtggagaactttttccactgtgataaatgtgggtgttgctacagcaatgtcttgaaggattcccaccactgcgtcgaaagagcaatgcatcacaactgccccgtctgctttgagtatctgttcgactccacgaaggacatcagcgtgctgcaatgtgggcataccatccatttggagtgcatgaacgagatgagagcacaccatcacttctcatgcccagtgtgctcgaggtccgcctgcgacatgtcggccacatggcggaagctcgacgaggaggtcgcggccacgccgatgcctgacatctaccagaagcacatggtgtggatcctgtgcaacgactgcagcgcgacctcgagcgtgcggttccacgtgctggggcacaagtgccccgcgtgcagctcgtacaacacccgggagacgagggctgcgtgccccaggatctgaggcgaaccagaggccatgtcacaaaatgccagggagatgccgtccaacgatcatctgtctgcaggacgttgctgcgcttaaggttaaaggctagcgcgagaccaggcctggtagtccagtcttgagtttggtgctggagcatttgtaatgttccggtaaaatgtaatgcgtccatgagtgctgtccaggcagtaagcacacctgtggatcggggccggcgcaaggtccctaggcaagctgcaggattagtggggctattcatgtttagggcgcgaatgcaacgaaattacccgtgggccgtgggctcggtatgtaacagaaccgattatttctattacaataataacatgcagttctattgggccgagcctaatcaggcaccacgaatgtgaataattgcacatggcgcatatatggcgggcagtagatacatataaaatggagaaaatccgtttattgccatcaaaacttatactgatcactacaataccatctaaaatgatgtgctcccttc

SEQ ID NO: 11482 - DNA, 1158 bp, Zea Mays
tggagtcgccgtggcgccgtgacattggctcgctgaccgtagcctgccgctcgcatcccgctataaaagctccccacgctgcttcgccatgccccaggcccaccgctagcatccgcagttcccccgcgcccgagacgcaaccccgcgccaggagtaagtttgttcttttatcgatatggcgagggaggagaatgtctacatggccaagctggctgagcaggccgaaagaaggaggagtcccgtaagaacgaagagcatgtgaaccttatcaaggaataccgtgcgaagatcgaggctgaactgagcaatatctgtgatggcatcctgaagctgcttgactcccacctagtgccttcttctactgctgctgaatcaaaggtcttctacctcaagatgaagggtgactatcacaggtatcttgcggaatttaagactggtcctgagaggaaggaatctgctgagagcacgatgatggcctacaaggctgctcaggcgtttgatgaagctatctcccagttagacacccttggggaggagtcatacaaagatagcactctgatcatgcagctccttagggacaacttgaccctttggacctctgacctcacggaggatggtgctgatgagggcaaagaagccccgaaaggtgaggctggtgacggacagtaatcttgggagagcgcatattgttcgagcccattgttttagatgctctatgctgtcgaagctgaagctgtgccgtgctattattgtagctgatttcctgttccctcacttctttttttatattagtaggctggtagtgttcgaattagttccccattgctttgtgttgccgctagttggcattaagtccgtgtggactggtattattcactggatttgagaagcatgtcagtggttgctctagcgttttattgagttttgaagtcatctccctcatttcggtttcaatcatttagcagattgtgcatatggttgtgtaaaacacagttttgcacaattgcacaatttacgtagtgtggtttgaaataagagtgagatttgggctggatgtgcggttggctgtttgaatctgctctttagggcctgtttggtagggaggttttgaatactacagtttttagaataccacagttttcaactggaagtgacaca

SEQ ID NO: 11483 - DNA, 611 bp, Zea Mays
accagcaccccgtcaagccccaatcccacgccacctataataaagccgtcagcacactgaaacccctgcaaaccctagtgcttccccccgatccatttcagccgccgccgcgcgtagcaagcaggagcagcaaggatgccggctggccacgggctgcgctcgcggacgcgcgacctgttcgcgcgccccttccgcaagaagggctacatcccgctcaccacctacctccgcacctacaagatcggcgactacgtcgacgtcaaggtgaacggcgccgtccacaaggggatgccgcacaagttctaccacggccgcaccggtcgcgtctggaacgtcaccaagcgcgccatcggcgtcgagataaacaagcaggtgaatggtcgcatcatcaggaagcgtatccatgtccgcgtggagcatgtgcagccatcccgctgcacagaagagttccgcctgaggaaggtgaagaatgaccagctgaaggcggatgcaaaggagcgcggcgaggtcatcagcaccaagaggcagccgttgggccccaagcctgtcttcatggttgaggggactaccatcgagaccgtcactcccatcccgtacgatgtggggcggcg

SEQ ID NO: 11484 - DNA, 867 bp, Zea Mays
gtgaggaggtgaggccgccgagccattcgcttcagccttcaggcccatcagcttatccattctctccctcacgagtcacgaatgaatagtacacggcgctccctccctcctcgagagcgtgtatgcgcagctgcagctccgcaaggcagatgttgctgactcgtctgtccagcgtttcttgctcgtcaacagcgcagcagttgcatgcgggcgtcggcaagttcgccgccgccgcatgctggagctggaagaagaagcgcgaggagctcccctgcttcagggccagactggccggcaagccgccgcgcgcctcaccggcgaagggcggcattgtcccggccagcgacgatgacgacggcgttagcctcggcaccgtgaagctgccgggcaacatcgacaccgctcggttggagtccttgctcttccagtgggggaacagcctctgccaaggcgccaacctgccacttccggtgcctctcaaggtggacaaggttgagggcgggatcaggctagggttcgtcgcggtcgaggacggcgcgacgcggacgctggtgtacatcgattgcctggtctctccggccccggatggctctggtccggtgttccgagcgatcaggaacggtcctatgaaggacaaggagccacctggggagcccaggatcatgagaagcctccttcaggctctcgaaaagtctattcagatcgctcgtgtttgaccgtgtaaacgccacacgatcaagcgctgcatctctgtaactattaattaagagccctctaaaccctgctattctagttaaaaaaatgggctttgcaaaacgtacagattaagctctttatacttcctctcctgatccaaatcaaagtgct

SEQ ID NO: 11485 - DNA, 1183 bp, Zea Mays
gtagcagtgtgctctgacgtgcaaatactgtgttttgacggctgagataaaagggtagagacaagacgggtgccagacaaattcagcaaacaagcaaaaggcacgaccaccaccgccggccgggaagcaagctcaaaccctaatcgccgtccgccggcgacgccagcacgatggcccgctacgaccgcgccatcaccgttttctcccccgacggccacctcttccaggtggagtacgctctcgaggccgtccgcaagggcaacgccgccgtgggcgtccgcggcacggacaccgtcgtcctcggcgtcgagaagaagtccacacccaagctccaggactccaggtccgtgcgcaagatcgcgtgcctagacactcacatagctctggcgtgcgcggggctgaaggcggacgcgcgcgtgctcatcaaccgcgcgcgggtcgagtgccagagccaccgactcaccgtcgaggaccccgtcaccgtcgagtacatcacccgctacatcgctgggctgcagcagaagtatacgcagagtggtggagtccgccccttcggcctttccaccctcattgtcggcttcgacccctacaccgacaagccagcgctgtaccagaccgatccatccggtaccttctctgcttggaaggccaatgccacgggaaggaactccaactctatgcgtgagttcctggagaagaactacaaggagacctccggcaaggagaccatcaaacttgctatccgtgcacttctagaggttgttgaaagtggtgggaagaacatcgaggttgcagtgatgacaaagaaggacggtctccgggaactcgaggagtctgagattgatgagtacgttgccgagatcgaggcagagaaggctgcagctgaggctgcaaagaagggtgccccgaagaacgcctaatttcccgtcttgtgctatggctcccttcaacactgtgtgtgtcccgtttttatgttccatagcaccatcttaactgttctagaaggatgctagatctttaggtgaaactacgcttatatgcctgtgggttaaatggtgtacaatgagctcgtctacatgccttcgtcggaggttttcagtttcgtgtattctgtcatctggacagcgacagttcaaatattgattttacctgattccttgtcatgactcatggcttctctggg

SEQ ID NO: 11486 - DNA, 57 bp, Zea Mays
aagctaacagaaattttgaatcggcttaccattctaaatctgacgcgctatccgcga

SEQ ID NO: 11487 - DNA, 1170 bp, Zea Mays
atgccacagcacgacagctctgctactccacccgttgagtaccacgacagctctgctacgttcgaaacgaaaaaagggacaggaaaagacagcggaaaaatcctggacggtaggtgtccaactccagcgcaccattatccgcttgcttttttgtctcttggccgcaacgtgaagtgcagcagcagccagcagcgggggctggagcactcaccagtcaccactcagcagcgatcgcagcaccgcggcgagataatgagcagcctgtcctccggcatctctgcctcgccatctgcagcgcccagcaccgctcggcgccgccatgacgcagcgccgcagcagctgagggtgaaggcggcggcgcggccacagctgctgcacgccggccgccggcgttcgagtgtcgggaggaggccgggcggcggcgcggtggtggtgagggccgggcctgggccgctgtcggagatcgagccggacctggaggaggacgccatcgacgtgtaccgcaccaacggcatcagcccggaggacttcgagtacgggaagtatgacggacaccacacctatttcgaaggccaagacaagaagggcttctgggaggatgtctccgagtggtaccaagaagctgagcctcctcagggctttcaagcactcatctcctgggcatttcctcctgcgatcatcctcggcatggctttcaatgtgccgggggagtacctgtacatcggggcggccgtcttcatcgtggtgttctgcgtcatcgagatgggcaagcccgacaagccgcacaacttcgagccggagatctacatgatggagaggtcggcccgcgacaagctcatcgccgactacaactccatggacatctgggacttcaacgagaagtacggcgagctctgggacttcaccgtcaacaccagggacgacatcgtcaagtcgacctagatgcattgcgtacaccgctcgctgcccttcagattgttgcctcacagcaaaaaaaaccctgtgaaaggaagctgtagctgctaggaaaatctcttgaataaaaaggaaagccatccttcctgtaagactggagagcctgaaaatctgttctatcctcgtgccatataatacacgacatgttctgcagactgttgcttcaactttctgcatgaattgcctttaaaaaaa

SEQ ID NO: 11488 - DNA, 95 bp, Zea Mays
tctcaatacattgtgcttgtttgtattgtggcgagtagaagaacctgtgacttaggatcctggtgaccagcagatagaagtagctgagcaggagc

SEQ ID NO: 11489 - DNA, 1053 bp, Zea Mays
ctggctgggagcctgggatgaactcatgtgcctcaccagggatttcccccctgagggaaccatgtggatgctcatgggaggaggagggtccttctctgctggtgggcctggaaagggaatgcattctcgattgtatctccgtgtcttgaccaacttccaacagattgaatcattctctgctttcaatagcgtctataacaattcgggcctttttggaatttatgcagtcactagcccagacttttcatcgaaggctgtggatttggcagcaggggaactcctggagattgcgacacctggaaaagttacacaagaacaacttgatcgtgctaaagaggcaaccaaatctgcagttctgatgaacttggaatcaaggtctatagcatctgaagatattggaagacaggttcttacttatggggaaaggaagcccatcgagtatttcctgaaaacagttgaggagatcactttgaatgacattttgtcaaccgcaaaggagatgatgtctacaccactcacaatggcatcgtggggcgacgttattcatgttcctagctacgagtctgttagccgcaagtttcactcgaagtgagaggatccagcatcggacttgcatgacctgttccaacaactgatgtgaagcctgcaacggccctcagctgggacagttactccccccacagaataaaaaagcatgtggtttctagcgccccccctaattactccctctgcatgtatacgccaaacatgttttttttttgtggtaagaatcatcaagccccttggcgactcgtttctgagtttcgcagcggcgctagattttattttatgtggacaagcgagctttcggggtgcgctcgtgcagaaatattttgccaacgtattttgcagtttagaccagaagcagaaaggaccagcgtatcacttttcctgttgttggatgcatgagttcatgacgtccacatttttgcaattttggctgttaccgtttccatcgattctggtgtgcgcgcgcgctcgcgcacttgttattattgttgtgataaggctggc

SEQ ID NO: 11490 - DNA, 76 bp, Zea Mays
tcttcccttcttatcctgtgtttctaacccagatgggctatacccctatagtgttagaagagagcactatagactt

SEQ ID NO: 11491 - DNA, 83 bp, Zea Mays
caaagtgataactgcagacatatgattaagataaccaatgtggggctccacagaccacaatcgaaaaaatgattgtttgataa

SEQ ID NO: 11492 - DNA, 86 bp, Zea Mays
ctagctgggttttacgagggtatggagaagacaaacacatagaagatcaccaatgaaatgctagctgggttgtctgaagattatgg

SEQ ID NO: 11493 - DNA, 906 bp, Zea Mays
atgtgggtgaaccttaaagctgtcaagagactagtagaggctgaggcacttaagatggaaattattccaaaccccaaggaagttgatggtgtgaaagtccttcaacttgaaactgcagctggtgcagctattcgtttctttgacaaagcgattggaattaatgttccccgctcaagatttctcccggtgaaggctacatctgatttattgcttgtgcagtctgatctttacaccttggttgatggctttgtcatccgcaatccatccagagcgaatccagctaacccttcgattgagcttggacctgagttcaagaaggttgccaatttccttgctcggttcaagtccatccccagcatcgtcgagcttgacagcttgaaggtttctggtgatgtctggtttggttctggaattacgctcaagggcaaggtgacaatcaccgccaagtctggagtgaagttggaggttccagatggagctgtatttgaaaacaaggatgtcaatggccctgaggatctttaagctatgcttgccgtcaccagtttttcccaaggatttgtcaataggagcagccaacccaaatcactcccactgagctctaccttttgtaattctcgtgccattccgctcccgctgtgagggtcctgtgagcccgctagagaatatgactgtaatcttctttggtgcgtctgcccttctgtttttgtgcgccagggacgtatattttgctgaaatgatactaccatagctttgcgtgccggaggtgctatgtggtgtttctgtgcgtttggttgcaatgataggacgggatgagatgagaccctcaaattaggttgtttggttctgggtcaaagattgagacaagaatatcctagtattgtttcatgttgtcctttaaaattggag

SEQ ID NO: 11494 - DNA, 62 bp, Zea Mays
cttggagcatttgagtcatttgactttgtttttgatgcacacttaatgtttgttattttttg

SEQ ID NO: 11495 - DNA, 65 bp, Zea Mays
attttttggacagcagcacagtagtcacttattttactcataactcacaagatattcatccaaaa

SEQ ID NO: 11496 - DNA, 2168 bp, Zea Mays
aaaatcttctgcgcggagaagcatttactgtttgttgcatctggacgttttggagttacaccaacattcttagtaaatgctgaccaaattgagataaagattgcgcaaggtgcaaagcctggtgaaggaggtcaacttcctgggaaaaaagtcagtgcatacattgctcgtctgaggaactccaaacctggagttcctctaatctccccgcctccacaccatgacatttattctatcgaggatcttgcacagttgatttatgacctccatcagataaatcctaaagctaaagtatctgtaaagcttgtgtctgaagctggaattggaactgtagcttctggagtttcaaaggcgaatgcagacataattcagatatcaggtcatgatggtggtactggagctagcccaatcagctccatcaaacatgctgggggtccgtgggaacttggtcttacagaaacaaatcagacacttatacaaaatggattgagagagagggtagtacttagggtggacggtggattcaggagtggtcaagatgttcttattgctgctgctatgggagctgatgaatatggctttggttctgtagccatgatagctactggatgtgtcatggcacggatttgtcacacgaataattgtccagttggagtggctagtcagagagaagagcttcgtgcaaggtttcctggtgttcctggtgatcttgttaactacttcctctttgttgccgaggaggttcgagctgcattagcccagttgggttatgagaagttggatgacatcattgggcgaacagatttgcttaaaccaaagcacatctcattggtgaaaacgcagcacattgatcttggatacctcctatcaaatgctggattgcctgaatggagcagctcccaaattaggagccaggacgtccacactaatggccctgttcttgatgagacaatccttgcagatcctgagatagctgatgctattgagaatgagaaggaagtttccaaggcatttcaaatctataatgttgacagagctgtctgtggtcgggtagcaggtgtgattgccaagaagtatggagacacaggttttgctggccagctcaacatcacgttcaatggaagtgcagggcagtcctttggttgtttcctgactcctggaatgaacattcggctagttggggaggccaatgattatgttggaaagggtatggctggtggagaactggtggtagttcctgtagacaaaacaggatttgttcctgaggatgctactatagttggaaacacttgtctgtatggagctacaggtggtcaggtatttgtgagaggcaaggcaggagaaagatttgctgttagaaactctctatgtcaggcagtggttgagggcaccggagatcattgctgtgagtacatgactggtggctgcgtagtcgtacttggcaaagctgggaggaatgttgcagctggaatgactggtggtcttgcctacattctagatgaggatgatacacttgtcccaaaggtcaacaaggaaatcgtcaaaatgcagagagtgaatgctccagctgggcagatgcagctaaagggcttgattgaggcctatgttgataaaacgggcagcgagaaaggtattgcgattttgagggaatgggaggcctatttgccgctcttctggcaactggtaccgcccagtgaagaagactcgcctgaggcttgtgcagagtttgagagagtacttgccaagcaagcaaccacccaattgtctgcgaagtgatcgaatcagactacaggaaggtggtaggtgttttctatttgacacaaagtgatctcatcttatcacttcaagaaaatcgaagaccataaccggcgctctgaggcaccgaagtgcccgtctgaagactgcaactttgtggaggctctgcccaggccatctttttgagttgagctaacagaaccgagggttcttctcgacgctcgtgcacctaggtaacccctgtaaattggtttgctgacgctaggctgcaaggggcctgccctgtttgaactgctgtactgtacatgattcttggccgttgccctgtgtaattatgttttggttagctcgtaaatttatacgcatccaatggaggcatacaatgcaaaaaaataattaagatacaacaataa

SEQ ID NO: 11497 - DNA, 241 bp, Zea Mays
  misc_feature (240)..(241): n is a, c, g, or t
gtcaaagtaaccatgggcttgctgccctcgccgccgcgcaaaaaacaccccgcgggccgtgtccccacccgtacccgaattccatttcttcctcccctttttcctttccacgccttcccaccactcccagacagaccccctttcccctccctcctcggcctcctcgaccactccgacgcccacagcgcctccggcgagctccacctctccaccggcggcagcgaggggcgagggggctann

SEQ ID NO: 11498 - DNA, 2514 bp, Zea Mays
ctgaacatcaatttggcctcgatctgcacactcccggacgtagtgggaagagtagtcaagcaactagaagagatgtgaggaatatcgcaattgttgctcatgttgatcatgggaaaacaactttggtggattcaatgttaaggcaagccaaggttttccgagataatcaagttgtgcaggaaagaataatggactccaatgacctagaacgggaaagagggatcacgattctgagcaagaatacatcaataacctataagggcactaaaatcaatataattgatactcctggacattcagattttggtggggaggttgagcgtgttctgaacatggtggaaggagttcttctagtggttgattctgtagaggggcctatgccacagacaaggtttgttctgaagaaagctctagaatttggacatgctgttgttgtagttgtaaacaagatcgacagacctactgctcgtcctgagtttgtggtgaattcaacatttgaactatttattgaattaaatgcaactgatgaacagtgtgatttccaaacagtctatgcaagtggaattaaaggaaaggccagtctatctcctgacaatttagctgatgacctaggacccctttttgaggcaattcttagatgcataccagagccacgcgttgagaaagatggtgccctgcaaatgcttgtatctaatactgaatatgatgagcacaaaggaagaattgcaattggacggctgcatgcaggagaacttcagcgtggcatggaggtcaaggtttgtacaccagacgatgcttgcagggttggtaaagtgagtgagctttttgtttatcagaacttcagccgtgcccccgttgaatctgttagtgctggtgacatttgtgctgtatgtggaatcgatgatatcatgatcggggaaactatagctgataaagttacaggaacaccattgcccactatcaaagtggaggagccaacagtcagaatgtctttctccatcaatacatcaccttttgttggacgggaggggaaatatgttactagccgaaatctccgtgacaggttgtatcgcgagctcgaaaggaatttggctatgaaagtagaagacggggaaactgctgatacatttcttgttagtggcagaggcacactacatctcacaatattgatagaaaatatgcggagagaaggatatgaatttatgattggacctccaaaggtcataaacaagacagtcgatggaaaactactagagccttatgagatagctgctgttgaagtcccagaggagtccatgggatcagttgttgagcttttagggaaaaggcgtggacagatggttgacatggaagctaacgggacggagggaacaacattgctgaaatacaagattcctaccagaggccttattggacttcggaatgcaattcttacagcttctcgtggcagagctatattgaatacaatctttgacagctatggcccatgggctggagatcttagctcacgtgatcagggatccttggttgcttttgaagatggaagcactacttcttatgcacttcttaatgcacaagaaagaggtatgttgtttgtccaaccagggcaggatgtttacaaaggtcaaattgttggtatccatcagagacctggtgatttagcaattaatgtgtgcaagaaaaaggctgctacaaatgttcgttccaacaaagaaactacagtggttcttgatgaacctttaagctacagtttggatgactgcatagagtttatccaagaagatgagatagtggaggttactcctgcaagcatccgtatgtgcaagaacccaaaagtttcgaagaaaaagtaacataatcgcatccatttgtcgtcaatgcatcttctacacatagaagctgcatgctccgttgccaggtctcgtatgagtgacggctgcacggcgtcctcaagtcagtaatcaggatatttttggtggtctacagacaaagactaaaggtcgccagattaagatagaggattatatggcagttttgtgatgaataaatcagccgatacctggagtagtattatttggccacggataaggcgggcactgtttctcatctacttctccctgttctttttatttgtcgtgttttagttcaaaaatgaactagacgacaaatatttgagaacgaagttagtattacacatatattgtgtaggtcatacgtaggactataggcattgtacacgattctttcgacgctagtaaagactggaagaaagctttagcaaatggattagcacacaactgctgctacagactcttatttatttgtaattcaagccagtctataagttgcaacaaactcctgtgcaattttgaactgaagattatagggaagaacctaccattacacgaatgggcccatagatttagaggtactgtaatggttacattagggctagtttggtagtccaaatactggaggggttaaaatcccctccttagggctagtttggaaact

SEQ ID NO: 11499 - DNA, 291 bp, Zea Mays
tgaacagcgaaacctcaaaaacacctgcatttccattatataaagtcttgtcaccatctataacagcatgtcgccacctccccgcctgaaaaatcctaacaatttgcccgcgtgtgtttcatctacgtcgaacccgggggagggggggtcacctacgagcagactccccccaacaaggggccaacaaaattaacagtgtagtgtcgatagctgagaaccgacgaacaagcaactttgcatcgagcgaccgcgcgcgcacagttacaaaagaacgagaagaatgaacggatc

SEQ ID NO: 11500 - DNA, 116 bp, Zea Mays
ataacacaggtgtcctaagatgagctcaacgagaacagaaatctcgtgtggaacacaagggtaaaagctcgtttgattctgatttccagtacgaatacgaatcgtgaaagcgtggc

SEQ ID NO: 11501 - DNA, 74 bp, Zea Mays
gcgggatagtgaattataagtagatatgacataatgggtcagaggacacttgccttcaccaaacagatgctcag

SEQ ID NO: 11502 - DNA, 493 bp, Zea Mays
gtagaagggagcgtggtgagagggttcttgaggaaagattggcggccgacaatgctggtgacacagaggcctcgcctcgtggccatggccatggcaccgcggaagactaagaactttctcgcgacccatcagcgcctcttataggagccatggccgcccatggctttgctccctccagcgtttatagctctgcacttttgtcttctggagatggaactattcagttcacagcgaaccaataatatgatgttcttagtttctcttttattttatttttcgcttctttgtccgcgaagatttattggttaaattgtgtactagtagtcaattgttataatacagtgaaaaggagaggagagggtggtggcatttgcagccgattatttgttactggtcaaaattctgtactagtcatatactctactcatatatagaaacaagaatggctttgtcagtattaggtgttcagataataatatttttccttttagtg

SEQ ID NO: 11503 - DNA, 1404 bp, Zea Mays
tttgaggcaagtggcgagggcggcagtgccgggtggccgcagcagccgcgaaccgtagcagcagccaaaggccggtccactttatttactgctcgtctagacgtctagtgcagcctgcagcgcagaaaaaccagcggcgcagtgacaaaagcccacagcttcttctccctactcctccagtcctccgtcatccgtttcgctctctgccgccgccaccgcacaagaagctagctcctgcctgtaccgccccgtcatggcgatgctatcccgcgcagcctcctccgcggcccggcgcccgctgctgccgccgcctaggcttctggcggtgagggcgatggcgtcgtcgctcttcggccacgtcgagccggcgcccaaggaccccatcctcggcgtcaccgaggctttcctcgccgacccctcgtccgacaaagtgaacgtcggcgtcggcgcctaccgggacgacaacggccagcccgtcgtgctcagctgcgtgcgcgaggccgagcgccggatcgcgggcaacctcaacatggagtaccttccgatgggaggcagcgtcaagatgattgaagagtcactgaagctggcgtacggagaagattctgacttcatcaaagataagaggatagcagcggtgcaggcgctttcaggcactggtgcctgccggctctttgctgatttccaaaagcgttttttgccggattcgcagatctacataccaacaccaacgtggtccaaccatcacaatatttggagggatgctcaagtgccacagaagacattcacatactaccatccagagtcaagagggcttgatttctcaggattgatgaatgaaatcaagaatgctccagatggttcattctttttgcttcatgcatgtgctcataatcccaccggtgtagatcctacggaggaacaatggagagaaatatcccatcagttcaaggtgaaaaaacattttccattctttgacatggcataccaagggtttgccagtggtgatccagagagagatgccaaggcaatccgaattttccttgaagatggacaccaaattggatgtgctcagtcatacgcaaagaacatgggactttatggacaaagagcaggatgcctgagtattttgtgtgaggatgagatgcaagcagttgctgtcaagagccaactgcaacagatcgcaagaccaatgtacagcaacccacctgttcatggtgcactggttgtttctataatcctcagtgatccagaattgaagagtttgtggttaaaagaagtcaagggtatggctgatcgtatcattggaatgcggaaggcacttaaggaaaatcttgaaaagctaggttcacctttgtcatgggatcatatcactaatcagcaaaagatgtccttgaaacatgtcct

SEQ ID NO: 11504 - DNA, 82 bp, Zea Mays
aggaacatcaggcaggcagctgtttctattttgacatctgtggaactgagcctgattcaccagtgaaacaaggcaagccccg

SEQ ID NO: 11505 - DNA, 1084 bp, Zea Mays
cccccttgtcaattcgaaattgcaaacggatgatttgtttgtgtcaattatggacttgccttcagattaggaagtggccatcttgagaactatactagtgactacaccctacaggtgttggtaggttattgcgctgtgtacatcttcatgcagaccttcatgatcccagggacaatattcatgtcactgcttgctggtgctctatttgggcaactgcgtggccttgcactggtggtctttgctgccactgcaggtgcttcttcgtgctatttcctgtcaaagatgattgggaagccactggtgttcacactgtggccagataagctcagcttcttccagagacaggttgctaaaagaagagagaagttgttgaattacatgcttttcctcagggtgaccccaacattgccaaataccttcatcaacttagcttcacccatagtagatgtcccctaccatatattcttactgggaactctcattggtcttatcccagctgcttatgtcactgtcagggctggaattgctcttggagagttaacttcgctgagtgacctttacgacacccagtcgatagcactgctattcctgatcggtgttgtttcagtcacaccagcattgctgggcaaggatgaggcacaagagaaaccaccagaaatggcggtaggcgcgtcatgatcaccaaagcacctagcggtgtccacgtcacctgtatatatgtcaacatccagcatgcagtggcttcattagttcggatcaacgggcccttgtggctggatgataaaaacggttcgcatggccacacagcttggcgggacctcggcctaaactccctccactgctggcctagagaggcgcctgtgttgccatcatcagaacatgattcggtagccattcaccacattattaatgaatgaacctgggaagcagaattgcctgtagacgagctgctctgatgtgtaaacgagtagcgctgttcggataggacaggcatttagtccaatccctgtatatattaaccagattcattcaatccatattcagtggttcaaagataatgccctgttcagctgctgtgttcttg

SEQ ID NO: 11506 - DNA, 350 bp, Zea Mays
gtcggcccaatcacacggcgggcggcccagcccaccagacccgcttccccaccagcccacccgtgggttcggaagcttcttcgtccgtcccctcctctcccgtgctcaccacctcccccattttcgccgccccctccgatctcgccgttctcgtctccttccgttggattagggctcttcatctgttcgccgcacttcgtcagtcgcccatggcggatgaggaggtcactgatccaaaggcgctcctagaggatcgttcaaaggctaagtgtgtgtcgcagtggtatgattatcagaaatgtgttaaaaggattgaggacgatgagactgggcacaagcactgtaccggt

SEQ ID NO: 11507 - DNA, 460 bp, Zea Mays
agtgaacacttggatcgtgcatttaattttattggcttgatctttgccaggtggacatgagcttagcaagagcacgggaaatgctggcggacgtgttgcctgtggtatcattgggctccaaggctaaagcagttaacctccgaggcaaacaccatagaaggtcgaagcgagcacctcaggatgttgctgttccatttcccctgtattggcaacacaatttgagtactccaaataagcgcctgatccatgatcagagagcactattcatgccattttgtatatgaacaatgttgcgcacctgcttaagtgtctgttccaacaaatgcttaagaagacactactggaggtgtactatggagtactaccagcagcatctaaacttgacgaaaccaattaaccatctatggtgacacgggatattacaacatcaggcggggggatggggcgtaggaaaaaaaaa

SEQ ID NO: 11508 - DNA, 270 bp, Zea Mays
atggctgagaatctggcgcccgagaagcgccactccttcgtgcacaacgggcagaaggtgttcgagtgggaccagacgctggaggaggtcaacatgtacatcgagctcccgaagggtgtgccaaccaagctatttcactgcagcatccaggctagccacgtcgaggtcggcatccgcggcaacccgccatacctcaaccatgacctgacacacccagtgaagactgactcgtcgttctggacaatagtattgttgactctttctggccgt

SEQ ID NO: 11509 - DNA, 69 bp, Zea Mays
ctccgcccgggctcgcgccccgggttttgcggcgcccgccgcgccctcctactcatcggggcatgtcgc

SEQ ID NO: 11510 - DNA, 76 bp, Zea Mays
cttggacaatgcttctgcaaatgaagttgttgtgaaagagattattctagagctcaataagcacaatcctttaatc

SEQ ID NO: 11511 - DNA, 1447 bp, Zea Mays
gagagtgagggagaaagaaatggagcggcgggacgaggaggggaatccgggaatccaaagcagacggccagacgccgtgccgagccgagcagtccaactcccgggcagaggcagaggcagaggcggagggcggggcgagagagccgtgcggctgtccaactccccttccctatccggtagcagctgctcctatatgacccccgcaccccagcaaaaaccttcccctttttccccttcacagccccgtactactatccccgctaccgctagccgccgcgctgctcatctggtggcggctcgcctccctccccccatccgccgccgccggctcctcctctagctccctccttaccccgagctttaagctcgtgctacctgcctacctatccgtagggagagagagagagaggggagaaggttcggtcggtcggtcgggggctctcggatctcgccgctgcctccccgtttcttcgttgggatctcgctcgcttcgcgccatggccgccgtcgcgacgccaccggcccccgcgcccgccgcgccggcaccggcaccggcaccggctgctgctccggctcccgtcaccgtcgcccctgccgcggaccaaaccacggatctgctgcagaagttgtcgctggattcgcagcccaaggcggcgggtgcgacagagcctgctgctgctgccgccaaggagggtgctgtgacaagccagccgctgagtgtggccatcccgccggagcggtctatcacgccggtgcttcaggactttatggatcccaacctgttctatctaccagcgtattactatggaggctacgacagttccatgagcgagtgggatgattatccaagatatctaaattcagatggagtggagattgccccagcagtgtatggagatatttatggatatgggtatgctccttacggggcatactctccggccacttccccagttccaacggttgatggtcagatgtttggcgcacagcattaccagtatccaaccacgtattttcagcctcctacaccaattccttctaccactcaaagcaacctccagtcttccaacaatcctgaaaagccagcagctaaagcagatcctgccaaggcaaccgctaatggtgttccaaatggtactggtcacactcacagttacagtggaactgtaccaagccaacaaagttcagcactgacgcctgatggaacttatagggcgcccttgctaggtggagttccttctgctggttacctagacacgacatattatgggtatgacagcacaggggcacaatttgcatggtatgatggctctgcttatgcaaatggacagcaaagaacaaccacaactaatcgttttccatcctcgtcattcagtggtaatggttcatctgcaatatatcagaacaagagctccaccacgcagcagatgtttaaactcggctgggg

SEQ ID NO: 11512 - DNA, 118 bp, Zea Mays
cggcggcgccggcctcgactcaagtacagcacagaacgattgctggtcgggttatatatgcatgtattacctgcagcagttcagctccttcctcctttgctgctggcgtccgtcgagg

SEQ ID NO: 11513 - DNA, 1610 bp, Zea Mays
taagtcggcgaagatgagggagatcctgcacatccagggagggcaatgtggcaaccagattggcgccaagttctgggaggtggtgtgcgatgaacatggcattgaccctaccgggcggtacactggcaattccgaccttcagttggagcgtgttaatgtctactacaatgaagcctcctgcggacgctttgttccccgcgctgttctcatggatcttgagcctgggacaatggacagtgtccggaccggaccctatgggcagatcttccgccctgacaactttgtgtttgggcaatctggtgctggtaacaattgggctaagggccactacaccgagggtgctgagctcattgactctgttctggatgttgtgaggaaggaagctgagaactgtgactgcttgcaaggattccaagtatgccactcccttggtggtggtactggatctggtatgggtacgctgttgatctcaaagatcagggaagagtaccctgaccgcatgatgcttacattctcagttttcccctcaccgaaagtatctgataccgtggttgagccatacaatgccactctttctgtccaccagttggtcgagaatgctgatgagtgcatggttctcgataacgaagccctctatgacatctgcttcaggactcttaagctgaccacccctagctttggtgatctgaaccatttgatctctgcaaccatgagtggagtcacctgctgcctaaggttccctggtcagctgaactccgacctcaggaagctggcagtgaacctgatccccttcccccgtctccacttcttcatggtcggcttcgcgccgctgacgtcccgtggctcccagcagtaccgggccctcacagtccccgagctcacgcagcagatgtgggatgccaagaacatgatgtgtgccgctgaccctcgccatgggcgttacctcaccgcctcggccatgttccgcgggaagatgagcaccaaggaggttgacgagcagatgatcaacgtccagaacaagaactcgtcctacttcgtggagtggatccccaacaacgtcaagtccagcgtgtgcgacatcccgcccaggggcctgtccatggcgtccaccttcatcggcaactcgacctccatccaggagatgttccggagggtgagcgagcagttcactgccatgttcaggaggaaggctttcttgcactggtacacgggcgagggcatggacgagatggagttcaccgaggccgagagcaacatgaacgacctcgtgtcggagtaccagcagtaccaggacgcgactgccgacgaggaggagtacgaggacgaggaggaggtgcaggccgatgacatgtgaggggagggctgttatcgtgtgaagccttgtggtccctagggcaagcggacctcgatgagttcggtgttccctttcgtgttgttgccatctttctactgctagcgtacccaccctcgtggcccattccgtcgctgttgacgtatgtatttttcttgtgctatggaaccttgcttttggtacggtactatcctgctagtatgcttggcgtttgaggttcctggcgtgaaaaaaaagaaccaagggagtaataaaaagc

SEQ ID NO: 11514 - DNA, 696 bp, Zea Mays
gaagagatccgtgtggccaaggtcttcctctcctatatattgactcgccgccacacagatagggttttctctccacgcagcgcgctcctcgatccccaacaggcaacagcccagccgctgtcgccctcgttccgtagtacggcgccgccagatcgtcagtcaccatgatcatctccaagaagaaccgccgcgagatctgcaaatacctcttccatgagggggtcttgtacgccaagaaggactacaacctggccaagcaccccaagcttgatgtgcccaacttggaggtgattaagctcatgcagagcttcaagtcgaaggagtatgtgagggaaaccttctcatggcagtactactactggtacctcaccaacgatggcattgagcacctccgcagcttcctcaacctgccatcagaggttgtgcctaataccctcaagaagtcttccaagcccccgtctcgccccttcggctctggcccacctggtgaccgccccaggggccctcctcgttatgaaggtgacaggcctaggtttggtgatagggatggttacagaggaggtccacgtggcgctccaggtgactttggtggtgataagggtggtgctcctgcagatttccaaccatcttttaggggtagcagacctggctttggccgcggtggcggcggtgctttcggtgctgcaaaaaaaaaaa

SEQ ID NO: 11515 - DNA, 60 bp, Zea Mays
gaacaaccgactcagaactggtacggacaagggggaatccgactgtttaattaaaacaaa

SEQ ID NO: 11516 - DNA, 661 bp, Zea Mays
ttcagctcttcccagcgcgcgccaggagaagaggggtttgaagaggaagcccatggcgctcatcaagaagctgcgcaaggcgaaaaaggatgctcctgtcggcgagaagccagagccagtgaagacccatctccgcaacatgatcattgtccccgagatgattgggagcattgttggtgtctacaatggcaagaccttcaaccaggttgagatcaagcctgagatgattggccactatcttgcagagttctccatttcctacaagccggtcaagcacgggaggcccggtattggtgccactcactcctcgcggtttatccctctgaaatgagttgttacccagatctgtagcgtcccaagggtgtccagtggcattgccctttcagctttgctgcttgtttcgaacaagttacatacccaagacattttgttctgtttccagcactagatttcaaagctaagcattgcataactatgctgttttgttggaagtatgtgagtataatcttatctaatatgtgatgttacgttctttgttgtttccttgattttgggttgcttatttctgaaattctgaagatgaggcttacaactctggtgtttgctgttagtggtttcattggatttaaatttgaagatgtcaatttattgggcgctcgtt

SEQ ID NO: 11517 - DNA, 62 bp, Zea Mays
ttgttaataacttgctgttgtcgagtagtggacaatggtgcttgctgttgtattaccttatc

SEQ ID NO: 11518 - DNA, 686 bp, Zea Mays
cacacaccaacacataccaagctctctctactctctcaagatgtagctctagtagtagttagtcttggtgggagctctgctaggagtctggagtagtcttcaagagtctgaattatctacatgagcataagaaatatcaacagaaagcaggccctaaaagataccaaacctatagttgactcgaaagcaatgtctttggaaaatgaaagcgcactacagacggtgcacgtaagaagaggtggaagaaaatgtcaatcctatgggagctatcttactggaaagacttagaggtccaccacaacatcgatgtcattcacgtgaaaaagaatgtttgtgggagtttgcttgggacactcatgagtgatagatggaaaaccaaggaccatgcaaaagcacgagctaaccttgaagaattggacataaggcccgagctctatcctgacagtaccagtgcccaaccacctttatccagaatatattgccagaaaaaacccgaatggcaatcatgaacctctacttatttaatgtaatctctcagaaggtcaagaacaggtactgcaagatgaagactactacgacgagtttgatgagatctaggcgtcgtctcctagtcaactagggcttgtggaggatcatcgtcgtcatatggtgtaatatatttagttattttgtaaagaaactccgat

SEQ ID NO: 11519 - DNA, 229 bp, Zea Mays
ctcaccgccataactctgccagtaaactcatctacaataagcacttccttgctacgaacaatgtaattgacatctttaaggaagagctccttagccttgattgcatttagaatatacgaagcccactgttcacgaggatcgtacagatcatctatgtccagtatttcttcagcatcagcataaccttcttctgtaagtaaaacgtttctctgcttttcatccacctgaa

SEQ ID NO: 11520 - DNA, 2073 bp, Zea Mays
agttcttgtcgacggagagtaatgagatatagaataaggtaccctatagaataaagaatctttctctgaaaagtctgacgtacgtaaataagatataataaaaaaaatacaaagagaagcgctggactggagatgctcctatatgcggcaatgcctgtgcttataaatagccacctcggtcggcaaggacatgaacggcggacgcagtgtgcatgcatacaagagcaacaagatactggcgcagaggagcaatgcccggcatggatgccttcgctgctgtgtcactactcgccacactctttctggttcgtgcggcagctgcccatcctccggcggcggctgcggacgccatgacgccgacggactattggcgagcggtgcttcctgagaccccgatgccccgagccatactcgacctattgaccacatctacagttggtgagggctcaaggaaggtcaccacgtcaaatgggtaccaaggccatgacttaagaacggtcagcacatcatatgcatctcaagatggggacaactcatggaaggccaccatgtcatatgggttccaaagtggtgagggctcgaggaaggtcaccacatcatatccgtaccgagggcaggacttaaggatggtcagcacatcatatgtatctcaagatgaggacaactcatggaaggtcaccacatcatatccgtaccgaggccaggacttaaggatggtcagcacatcatatgtatctcaagatgaggacaactcatggaaggtctcgatgccatctaggttccaagttggtgagggctcaaggaagctcaccacaccattcgaatcacaaagggaggactcaaggaaggccaccgcatcatatggaatccaagatgatgaggacacaaggaaggccactacatcatatggaatccatggggaggacccaagaaaggccaccacgtcatatggttcccaggatgagaagggatcaaggaaggtcataatgtcatatgggtctaatggtgaggatgatccaagaaaggccaccacatcatatggaatacaagataaagagtatcccaggaaggccaccacatcttatggagttcaaggggacatccatcaccatgaccatgctgccgttcacatccacagcagcggcaacaagctagtagcagatgttttcttcttccacgacgtcctacgcccagggtccgtaatcacgccgatcatcccaccgaccatcaccctaccacctctgctgcctctccgcgaggccgacgcgctcccgttctccaccgggcgcttcgccgacatcctcgccatgttcgcgccgacgacatccgacgccatgggcgaagagatacggtcgacgctcgacacctgcgagaacacgcgcccgctccctggcgagaaggccgcctgcgccacctccctcgagtctctcgccaggatacccgccgtcctcctcgggacacgcaacgtccgcgctttctccggcgacatgcccaccgatcctgccggcacgtcggcgaagcgggggcggtataacgtaacggccgtgcagaagctctccgagtcactgacggcggcggcgtgccatgacctgacgtacccctacgttgtgttctactgccacacgaccaacccagcggccacgtacctggtgaagctggcagcccaggatggcgggacgccggacatggaggcgttggtcgtgtgccacctcgacacgtcgttgtggagtcccagacacccattcttggtggcgcacagtctcaagccaggggacgacgcagtcgtgtgccattttctctctaagctcagcatcgtctgggtccccgctggcgagcaggggtggcgtgcgtgaagtgaagcctaatagcgttaagtacccgtgctcagagctctatctgtaacctgtatggacctaatgtggctctgtaatgctaaataaaacctgcgtcaatcatgtatcgtgatattttatttgttttagcaaaatggtgtccaaaactatagtccaaagtgaaggaattcatgttgtgagcactatatttggcacctgaacatggttggacggttcgacc

SEQ ID NO: 11521 - DNA, 2298 bp, Zea Mays
aggcacataaacatatttgtttaagtagcatatgatacatcactccaaagtgcagttcagctgcttgacaagcaggtacagtacagtaaaatacagactgaatacagaataggtacaattccacaatgctttagaaatccccactacacactatccaggaggggacttcgacatatactgtatcagaatccagatgtccaatatcatgacgtctatttacaaaaccatgctgtctgttacatgatgctatagtatcatatttgcactacaccgccaagtggtaggctctcttaccacgttacacaagagctctgattcagccacagctgaatcagagcgaatgccaatgtgtagtttatgggtagaccggagcaatctactagagctctgatgataaaccagaggacattgaggccctgctggtgagagcaggcctcatcgtcaccaaagcagattcatttgcaccagctctcaaagcaatccgaccagcttccaggaacctggcgacagcatcctctgcgtagcggtttgcttccccgacagtcatggtcctgccaatatctgggtacgtgttcagtacgtgatcaccgttgagctgtgaagcaagttgaatcaactccacttgaaattccgagagagacgaatcttccttgggaccaaatggtcgcaatgacttcgtcacctctgggagctggacagtcagttcttggtgttttccggattttgaagtagctctcaaaggtcccagcccatgcatctctctttgtcagaaagttagaatgtaaattgaatagcttctttactgttgcagggatggacgaatgctcatattgcgaggtatcctgtggaccatttggttcatggatcactgcagaaatgaaaagtgagatgagaaaggtgggaacacgcaccccaagccgttcgaacttgaagtagtatggatcaggcccaactattccatcaggctggggcactccaacgaccggcgtaggtacatggtcatagaatccaccatgctcatcatatgtgataatcagggccgtctcgttccactgcggactggctctcagtgtttcatacacctctttgacgaacctctgtccccttgccacatcatgcgagggatgatcatcgtttgctgggaacatctcgcaatcaaagtacctttgttcaatcaccacataatttggcagcttccccaacttggcgtgcaacttgaacttgaggctgtactggtggaacttaatgaggtgctttaggcggcggaggctctggtagaagagcgtggccgggatgttctggtagtagatgccaaaagacaggccattctcctcgaggctgtcaaagatggtcttctgcgggaaaccatggatgaggtccttgcgggcgttaaaggtgaggccgtgggaggtcgccgagtggacgaacaggcggttgggctgcgtggaggtgggcacggaggcgaaccagcggtcgaacacggcgaagtcgtcggcgagggaggcgtagatggggacggcgtcgggcttgaagccgctcatgacgttctgcggcatgccgaggcccatgccgcgcgcgttctgggcgaatccggacattgggggcggcaccgcggaggtgtcggcggagccgaagatctgctcccggatgtcctcgaagccgtggccggggtcggagtctacgtagccggcctcgtcggtgacgaagatctccggggatgcggggtcggaggcgttgaggcggttcgactcgcggcccgtgaggccgtcgatgtcggggcgggtgcggcggagccagccgaggatgtggtcgaagctgcggttctccatcaccaccaccaccaccgtcttgaccggggaatggatctcgtgcttccgccgccggcgcttcagcccgcggtggtgcgcgtccaggcagtgcccggagacgaccagcgccagcaggaggagcgccgcgaggaggcgcgccccggggccgcggcgggccacggcagccatcgcgacggaccgggaactaggtcttcgccttcgacggcgggcggtgcgcttgcaggtagggtaggtgcgcttgctgttcagttgaattggtgagctctctgttttttttccttcctttctttttcaatttaagcagttgctttgcttctgcgtacgggcggcggcggtgactttttttaatcgcttccaattttaccccgtgagaaggtagttagggaaagcagacaggtgggtcccacttaggcgccgcccgtggctccacacgtcattgggagggagttcggttcgtggagagtacggt

SEQ ID NO: 11522 - DNA, 106 bp, Zea Mays
gctactttctccccctttttggatatagtaagataccaatttgaaaaactcttttttgaaaataaggtggtggtgcggtccttttgctttgggctaatactttctc

SEQ ID NO: 11523 - DNA, 2147 bp, Zea Mays
caactctccaaaccactctgcattgtctacataatgtcagaacaaggaaggaatgttgtcttggatgagtttggaacccccaaagtggtcaatgatggagttaccattgcccgcgctattgagcttgctgatcccatggagaatgctggtgcttccttgattcgtgaagttgctagcaagacgaatgactcggctggtgatggaaccacaactgcctctgttctcgctagggagatcatcaaattgggcatgttgagcattacttcaggggcaaatccagtgtccgttaagaagggcattgataagactgttcagaaattggtggaggaacttgagaagaaatcaaggccggtcaagggtagtggggatattaaagctgttgctgccatatcagctggaaatgatgaatttgttgggactatgatcgccgaagctattgacaaggttggccctgatggtgtcctctcaattgagtcgtcatcgtcgtttgagaccacagttgaagttgaagaagggatggagcttgacagaggatatatctcccctcagtttgtcactaaccttgaaaaatctattgttgagttcgaaaatgctcggattcttgtcactgatcagaagatatcatcgataaaagaaattattcctctgttggagcagacaacacagttaagagcaccacttcttataattgcagaggatgtaagtggcgaggcgctggcaacattagtcataaacaagcttagaggaattttaaatgtggctgcaatcaaagctcctggttttggtgagaggcgtaaagctcttcttcaggacattgccattgttacaggtgctgaatatcaatccaaagatcttggtctactagttgaggatacaacagtggagcagcttggcatagctcggaaagttacaatctcaagttcctcgacgaccattatagcagatgctgctagcaaagacgatatccaggccagaatcgcgcagctgaagagagagctttctcagacggactcgacgtatgactctgagaagttggcagagagaattgcaaagctttctggtggagttgctgtggttaaggttggagcatcgaccgaggcagagctagaggaccgcaagctccgcatagaggacgcgaagaatgcgacttttgcagcaatagaggaaggtattgttccaggaggcggtgcagcatatgttcatctatcgacattcgtaccggctatcaaggagacgttggatgatcctgaggagcgcctaggtgctgatatcattcagaaggctttggtggcacctgcagcgctgatagcccataatgctggggtggaaggtgaggtgattgtggataaaatccgggaaagcgagtgggagttcggttacaacgccatggcggacaagcacgagaacctggtggaggctggtgtgatcgaccctgccaaagtgactaggtgcgccctgcagaacgctgcctccgtggctggaatggtgctgactacccaagcaatcgttgtggagaagcccaagaaggctccagcagcagctgctgcagcggcaccatagggttctttcaccatgtaataatactttctagtgaaaaacaattttactaggcatggaacaggcacgttagagtgacgaggagaaaaaactatttttgtcatgcgtgggccggaataaattgagtcaggaattgcatggattttgggccaggacgatttgcaaattggttggattagagtgtggatggctgattggacattgtatcctatctgcattctgttcactcagttggctaattcacatttctctccagtccttccctcccttttgtgacgatgcagttttttatcgtctggtaaaatggcaaggcaacaaattcatggtgctgcttctatctccccgtctccatcccgcaccacaggtactatttgctctttcatccgctacgatctggcagcggtttccaatggtacatgacaacaccggcagagcatcgacggatcgcttgtggttgaagggcgaaaaggctttgcttgagttgctgctaggaccttggcaagagtagacaggcaagctgacagaggaggtgaagttggcagcagaagaaccagacacccagttggagttggatcagatgtagcacagca

SEQ ID NO: 11524 - DNA, 1240 bp, Zea Mays
cataaatattactccctcgttttttacaaggattggtcatggtaaaaggggagatgtcacaatactaccaacccttgtcatcaacaacaagcaatatagaggtaagctggacaaagttgctgtcctgaaagcgatctgttcaggatttgaggagacaactgaacctgctatttgtttgagcgaagagattcaaacaaatgagtgtttggagaacaatgggggttgctggctggacaaagctaataatgttactgcatgcaaggataccttccgcgggcgtgtttgtgagtgccctattgtgagaggtgtaaaatttgttggtgatggatatacccattgtgaagcttccggtgttggtaggtgtgagatcagtaatggagggtgctggcaggaaactaaagatgggaaaacaatctctgcctgctcaaacgaaatatctgaaggttgtaaatgtccaatgggtttcaagggtgatggagaaaaaagttgtgaagacattgatgaatgccaagagaaactttattgtcagtgcaagggttgcagctgcaagaatacgtggggaagctatgaatgcagctgtggtgatgacaatatgctatacatgagagagcatgacacttgcatcagcaaagagggaactgccactactgttggctggagcttcctctgggttattttctttggacttgtttttgccggggttggagcatacgctgtgtacaaatacaggctgcggagttacatggattcagagatccgtgccatcatggctcagtacatgcctctggataaccaagaaggagcaaaccagcatcaggtcgtgcacgccaatgatatctgaagctgcactccttttctgaagcagaaatagagggggcgtgcaacatttcacttgtgctgctgcatcattgggtcatgggttttacaggtataggtcaactaggctcaaagatacacaggttatgcgagatcaagatctactgtaccatgaattaagatttaagagagagacgttgtgcgcctcttgttacgacacttgatgaacagcatagggaatgataccatcatagttttagtagtccttcgttgccttcagtttgtcttcaaagagttcttgttgcctcttcacatacatgtaaacactgtaaataccgttacctgaataaagcttcagcctgctaggctacaagcagggttcactgtacgtgtccgtacatgtgatttattacagatttctttc

SEQ ID NO: 11525 - DNA, 1659 bp, Zea Mays
ccttataaaagccatgactgccgccactcgactcagtaggttaaagcgacgcccgccgccgcaagccgtccgccttgcccctcgaaggcttggtcctcctccttgtatcccgacctcccccgcgacagacccgtttccccgctaggctagagttatcgttcctctgcagcgatggcgatcaagcggaccaaggcggagaagaagatcgcgtacgacaagaagctgtgcagcctgctcgatgagtacaccaaggtgctcatcgccctcgccgacaacgtcggctccaagcagctccaagacatccgccggggcctcaggggcgactcggtggtgctcatgggcaagaacacgctcatcaggcgctgcatcaaggtctacgccgagaagaccggcaaccacacctttgacccgctcatggacctgctcgtcggcaacgttggcctcatcttcaccaagggagacctcaaggaggtgcgcgaggaggtcgccaagtacaaggttggggctcctgctcgtgttggtctggttgctcctgttgatgttgtcgtgccccctggcaacactgggctggatccctcccagacctctttcttccaggtgcttaacatccccaccaagattaacaagggtactgtggaaattatcacccctgtggagctgatcaagaagggtgagaaggtgggctcgtccgagtctgctctgctcgccaagctgggcatccgccccttctcgtacggtctccaggtcaccagcgtctacgaggatgggtctgtgttcagccctgaggtgcttgacctttctgaggaggacctaatcgagaagttcgccactggtgtctccatggtcgcttctctttccctggcactatcgtacccaacccttgctgctgtgccccacatgtttatcaatgggtacaagaacgtgcttgctgttgctgtggagactgactactcgtacccacacgccgacaagatcaaggagtacctcaaggacccgagcaagtttgctgttgctgctcctgtagctgctgcggactctagtgctgctgctgcccccaaggaggaagagaaggctccagagcctgccgaggagtcggacgaggaaatgggcttcagcctgttcgacgactaagccgctcttatcgtccatccgccgcaagttttgcttctgcttattattttagtgcattatgttttagtagacaaaccatgttggtgtaattgacaatgttatctccttaaatgttgaaagtgcccgtgttgtgtcacttgttattggtttcttgagctagtttggttctcttctcttgtgaaaaagatgtctcccgtaaagacacctcttcaagtgatgtcatctaccacaagacatcttttaaagcaatgggttagacatagattagttaatcatgtaaccaaaggcctattccatgtggaaaggattgatgaagaagatgcaacatgcgaggatgaacgttgagattcgtaattttttttaatttagtgcactttgtatcaaattttgtatgaatttatattttatttatgaatatatattacctataccatatctggagcgtgcaatctattttttaaatggtatcaaataaaaggactaagcgcactgtagaaaagtattcagaggacacgaaaatggcacacc

SEQ ID NO: 11526 - DNA, 899 bp, Zea Mays
gctgcttgtgttcggatctgatctgaaaatcatagctgctttgggtatggaggcgctgtttgggagcaataaccatggcggccacaaggccgctgatttggcctcgcttataattacccaggttgccttggaggtgccaaggttacttgggctccttgccatgattctgcataatgaaatctttacatctggtggagaccagaatttgattactaggattctgggcaaaagcgaagatgaaactaatcctgagaacaaagatgatggagagtccgatgatgataatgatgatgaaggagacgatgatgatgctgaaaacgaggaggaagatgatggtggtgatgagggatcagatgacaatgagaatgaggaagatgacgatggagatgatgatgatcctgcagccaatggcgaagggggaagcgatgacgacgaagatgatggtggagaggatgaagaggatgatgacgacgacgacgatgatggggacgatggcaatgaggaagaggaggaagaatctgaagaggatgatgatgatgatgaagtcccccaaccacctactaaaaagaggaaatgatcaacggctgcgacgagtggttgcttacacgcaggaatgctgcctgttcgtccctgcgcagcagtttactgtttagtgggtagagttttttagcttggtcgtggacaattcatagcctagtttggaaacaaaaaagaaacatttaattgtgcatgtactattaaaccattcctttaatcatgtatctcagattgctatcatggtttctaaattgtgtttgcctaagttttgtattgcaatttaacaatgttcttgtgcaacctgatggtcgtggtacgttatgcctggttgcaaggatagatcagaatttctggatgaatct

SEQ ID NO: 11527 - DNA, 83 bp, Zea Mays
ttttttttttcttttttttttcttttttttttcttttttttttcttttttttcttttttttttttcttttttttttcctcttt

SEQ ID NO: 11528 - DNA, 80 bp, Zea Mays
atattatgttctggtctataaatctataactctgtcttacttttcaataaaagtatgttattgtaactgcttccgcactt

SEQ ID NO: 11529 - DNA, 683 bp, Zea Mays
aaacatcataactgggcaaagacgtcaaagctggttcagtttttgacaacattttgatttgcgatgacccagactatgcaagacatgttgtagatgaaacttttgctgcaaataaggaggctgaaaaggaggcctttgaaggagctgaaagaaagaggaaggctagagaagaagaggaagcacggagggcacgggaggaaggggagagacgaaggcgggagagggatagggaccgcggcagggaccgatacaaggatagatataagcgtcataggcactacgactaccatgacgagctatagatcctgtattcttttgaaatctgcacgatattggatgtctgtctacggagagcgcacgtgcaaaacttgtatgttgtactcacggatgaagctgaacctgtgattttggcgatgggtagagattggccatcgcgtctgtaactaaatttccacgttgcgatgcaatatgagctgtagtactgtcctcgcactactatttaccgtttgtgctgcatatgtgatataaaccttcaagaaacacacacacgaagggtctgaatgagcacggcctttgttgtttgcttcttataaaaaagaactgttttatctgtgtatacttgccctactttttgctatttccaagcagctggacagaaactgactactgtaccagaaccagaa

SEQ ID NO: 11530 - DNA, 1491 bp, Zea Mays
tccttatccgatgctcttatcctgcgttctgtggcctctgctcagctgctcgtagatggcgacaaactcacccgccctcacaaagcgcccttcacgacacgcacccacccaccagacagacagaggagaggagaaagggcaaaaggcaacaccgcccgcgacgaccacgatggcagcctcgctccaagtccaagccgcggccaccttgatgcaaccggccaagatcggcggccgggcgccgtccgcctcgctgccgtcgtcccgcccgtcgtcgcaactcgccagggcgttcggcgtcgacgccggcgccgccaggatcacgtgctccctccagtccgacgtcagggacgtcgccagcaagtgcgtcgacgccgccaagctcgccggcttcgcgctcgccacctcggcgctcctcggcgcgagcgcggagggcacgcccaagaggctgacctacgacgagatccagagcaagacgtacctggaggtgaagggcacgggcacggcgaaccagtgcccgaccatcgacggcggcgtggactcgttcccgttcaagcccggcaagtaccagatgaagaagctgtgcctggagccgacgtccttcaccgtcaaggcggagggcatcgccaagaacgcgccgcccgagttccagaagaccaagctcatgacccgcctcacctacacgctggacgagatcgagggcccgctcgaggtcgcctccgacggcaccctcaagttcgaggagaaggacggcatcgactacgccgccgtcaccgtgcagctcccgggcggcgagcgcgtgcccttcctcttcaccgtcaagcagctcgtcgccaccggcaagccggacagcttcggcgggcccttcctcgtgcccagctaccgcggctcctccttcctcgaccccaagggccgcggcggctccaccggatacgacaacgccgtcgcgctccccgccggaggcagaggcgacgaggaggagctccagaaggagaacatcaagaacgccgcctcgtccacgggcaacatcacgctgagcgtcaccaagagcaacccggacaccggcgaggtcattggcgtattcgagagcgtgcagccgtcggacaccgacctcggggctaaggcgcccaaggatgtcaagatccagggggtctggtacgcgcagctcgagtgattcgttttaactgttagaggcgtcggaccgtcatggagaacttttgagagaggaggaggaatcgtgtatgtaactattaatgcaaattcgggctgttggtttttaatttcagtttgggtttcttctttctttcttgtgtactccagtggactcccgtgtgcaaacacgaagagtggctgtttgacaccagagattaattgttacttcctccgtctcagattataatatattttgatctttttagatacacttttactatatacttaaacagaagtatatattcagatgcacataaatatggtaatggatcacgatctaaa

SEQ ID NO: 11531 - DNA, 725 bp, Zea Mays
cccatcccacgcctcgccgtgtccaggctttaagccacacgcacttgagctccaccgccactaccaccagtaccacaccactccgcgctagctgaggacggtacagcggcacagaggtgcgacgtacgacgacgacgacgcaggcgccacacatggcatcccagctctccgccgccgtgccccggttccacggcctccggggctacgccgcgcccaggtccgcggtggcagcgctgccgtccgtgagggtgggcaggaagaggtcgtcgtcgcagggcatccgctgcgactacatcggctccgccaccaacctgatcatggtgacgacgacgacgctgatgctgttcgcggggcggttcgggctggcgccgtccgcgaaccgcaaggcgacggcggggctgaagctggaggcgcgcgactccggcctgcagacgggtgaccccgccgggttcaccctcgccgacacgctggcctgcggcgccgtcggccacatcctcggcgtcggcatcgtgctcgggctcaagaacaccggcgccctcgaccagatcatcggctagatccctacgtcgccgttgttaagatcagactcagcagcctcgatcgcgccgccggccggcaggtgcaggtggtgactttgtaacgtgtgtgcgtgcgtacgtgtacattgcatccatcttggttccaatggacatatagctcctgttgctcctctaaaaaaaacaaca

SEQ ID NO: 11532 - DNA, 101 bp, Zea Mays
ttctcgctgattccgccaagcccgttcccttggctgtggtttcgcagaataagtagacagggacagtgggaatctcgttaatccattcatgcgcgtcacta

SEQ ID NO: 11533 - DNA, 148 bp, Zea Mays
tcaaaattgaacctatgcatggtaaatgattataaagaacattattgggtaacaaaagtgaatcaagggcacaacttgccttcaatgagcttctgctcagcaacttctatcttctggtcaccaggatcctcaataataggttcttcta

SEQ ID NO: 11534 - DNA, 537 bp, Zea Mays
gaagaagtacaccgagttcgataacaggttcaagaagtccaaggtgctgcaggacctgctcgagaagagcaggaagaacaaagagaagaacgagaggatgatccaggacaagtactgtctgcggggcgccgagtggggcgtcggggactgctccacggagggcatgtcagaccaggagagggaggacttcatttcggagctcaagaagagagctggagcagagtagcgagctgaggacgtcattcagtttcaacagacgaagtatgggcacacttcgccactgtagcagtccagggaatggccattttactcgtcataccctgattaccaagggaaatacgcaaacaatgtagaccagcccataggccactgggagtgcgagaatgttcaccaacatcatgcgagctcagaatttgcaatacatatgtacccattgtaaaatgcatttagcacgagcaaattaccagctacactgattcttaagatccctaaattcctcttatttttttaacactgatgtaacctataaagctgccg

SEQ ID NO: 11535 - DNA, 562 bp, Zea Mays
cacatgggcactccaaaggctgaagtagtcgcgtgcgttttaggccaggaatccaacgtgcttcaccccaaaaatccatttgctccaacattgcattttaactaccgttactttgagacagatgcacccaaagatgcacctggtgcaccaagacagtggtggtttggcggtggtactgacttgactccctcatacatcattgaagaggacgtgaagcattttcattctgttcaaaagcaagcatgtgataaatttgatccaagttttcacccaagattcaaaaaatggtgtgatgattatttctatattaagcaccgtaacgagcggcgtgggcttggtggaatattttttgatgaccttaatgattacgatcaagaaatgcttctcaacttcgctacaagtgaaaccatttgctagaatgattggatggaattatttgtattcaggtctacgaccgtggtacaacattcggcctaaagactggaggaagaatcgagagcatactcgtgtcccttccactcacagcacggtggcagtatgatcatctcaacactagcatgga

SEQ ID NO: 11536 - DNA, 779 bp, Zea Mays
agctcctgctgggctgcgcctgcgcaggctgagggggaccacagaagcattagctgggtgaacccactcaaagggggcagggaattgtgtgctagtttgaatggctgctacaaagcttcaggccctttggaaccacccggctggccccaaaaccattcatttctgggcgccaacattcaaatggggcatcagcattgccaacatagccgactttgctaaaccacctgaaaagatatcttaccctcagcaagttgctgttgcatgcactggactcatttggtcaaggtacagcttggttatcacaccgagaaactggaaccttttcagtgttaacgttgcaatggcgggtacaggcctgtatcagctttcacggaagatcaggcaagattacttatccgatgagaaagatgctgcttcacaactggaagcatagataatgacaacaggcaaagaataacggattggaaagcctgcatcctaggagtctactcttgattttttttttctgggcaagcaaagaataacggatgggtcatgtttgttttcctgttattctgaaatcgtgagcaggctaatgtgaaaatcttccgccaaaaaagaaaaccaatgaagtgatgttttgagcattttttttgtgggaacaagtcatgaaagtacatggtttatctgttgttcttttgttccttcaaccgctttatttgggaaaacgctaaattgttgccaagctgattgaccataatccagcctttgctcgattcattggtaaaaatctaaaaaaa

SEQ ID NO: 11537 - DNA, 1208 bp, Zea Mays
aaaatatggtatactctgcgaaatgctgaatacaggctttcttttgaaagaaatctagaactgcctgaagaaggtgtagaatgcctaaaaagtgatgtcactgaagataatcatcataacatcaatttgggaagacctgtcactatttttagattatccgaagaagacatgcctcaggaccctggaaaaaccgatgaagcatcatcttatgaaaatatgggagaagagcttggtgacttaacaccacaggcagaggagtatattattcagatgcaatctcatttgaatgccatgaaaaaggagttacatgatctcaggagaaagaattctgccttacagatgcagcagtttgttggggaggaaaaaaacgacttgctggactatttgaggtcattaacaccagagaaggttgctgaactatcagaatcgacgtctcccggtgtgcaagaaactattcattctgtggttcatggtttgcttgctactctttcccccaaggtacattcaaaggcccctccaccgctagataacatttctggtggtgttctaaaccttgggggcgaggatgatgatcgtgcagaacttgtggagaatgcttccctcccatttcagcccctaatatctgttccccgtgattatcttgcacgtttgctgttctggtgcatgctgctgggtcactacattcggggtctggagtaccggttagagcttgctcggcttctgcgaatatccagcgtgggttctttctctggtggagatgatcatgttgtttgagggtaccacgtctactgatattcctcaccgggaagaatggaaaggaaagccctggtcaagaaatgggccatatggcagagctgcagaggtgtccgttacactgctgagctatatagttgtagttcctgtatattcagaaaacagtcactcggttgtaaagctagtgttacatatgcacgtgaaccattttctttttcttcctttgatgttgtgccgtataaaaagaatttggtggttcgttggtgtttatctcgtggtagcataataggcatccttgtattctagttgtatgtttctggtggttgtgactgctgtccagtgtccatttagcttttttgtctattcttgattcgagtaaagcttaacttctcattttggaggtcgcaagctcatactttcattgaattatgggtccttttgattgggctttggat

SEQ ID NO: 11538 - DNA, 515 bp, Zea Mays
ctttccctccctcatctcacgaaaccctactgcggcttcaggactcgacctcttgcgccgccgccatgaccttcaagcgccgcaacggcggccgcaacaagcatggccgcggtcacgtcaagtacatccggtgctcaaactgcgccaagtgctgccccaaggacaaggcgatcaagaggtttcaggtgaggaacatcgtggaacaggcggccatcagggacgtccaggaagcatgcgtctatgatggtaaaatctctctattcctctagatctgtttcgttagtaataaatctttaatgcaacctgttgttttgacgagggtaaacgtgttctatggctcaggctacgtcctcccgaagctgtacgccaaggtgcaccactgcgtctcgtgcgcgatccacgctcacatcgtccgcgtccgatcccgtgagaagcgcagggaccgcaagccgccggagcgcttcaggcgcaggtctgatctgacatgccacatatctgggacttctacgttgccc

SEQ ID NO: 11539 - DNA, 102 bp, Zea Mays
ccttggtgcaatggtcagtgtcacgggtaacagtgtttcgtgccgatattgatttagttggagcgcggggtcctttttgcaagatgtgcgtgtgcgggcgcg

SEQ ID NO: 11540 - DNA, 1706 bp, Zea Mays
ccttaatcccgcccgccaccctccgcggcggcccatcgtcgttagctcggggattaatctgccccacgcggcctgggtggggacttacttcctgcggaactactacaacctgctgcaacaaacccccgatgtcgtccaccagttctacagcgaagccagcaccatggtccgcgtcgacgacctcaccggcacgaccgcggctgccaacaacatgatggacatacactcactcatcatgtctttgaacttcacccaaattgagatcaagactgccaattttgtgaactcatggggcgatggggtgctagttatggtctctggtctagtgcagaccaaggagtacagccaccaaaggaaatttatccagatgttcttccttgcccctcaagagaagggttactttgtcctcaacgattactttcacttcgttgaccaagaacatgtgcagcctgcgccagtgattgctcaggaagactacgagagcaatttggcacccaacacagttgttgagaccgctcctgagtacgttcacgaggaagaagctcaacaaatagcacctgaagtacatgatgtggtcgaaaactatacttattctgagccacaacagcaagtagtgtcggacaactggggagaggagcctcttcctgaagaaccgccttctttctcaaatgaaatggcagtcgctcctgaggagccagtgcaagctccacctgtgccacttcctcacgtggatgagcctgtttgtgaaccagtaaagaagacttatgcttccatcctaaaaaccgcaaaggctcctgcattcccagtagcccagcaagtacctgtgagtaagacttctcaccctacaacagagtcaaaccaaacccagcattcagttatggcttcatcaatgggaaccgagaaaccgaggtctgatgtctttggtgagggtgcttcccatgatgacgaagagagcaaatctgtgtatgtcggcaacgtgccatcatctgtaagtgaggctgatcttgaaaacgagttcaagaaatttggccggcttattcctgacggtgttgctatcagaagccgaaaggagactggcggctattatgctttcgtggaattcgaggaactcagcggtgtacacaatgcgttaaaggcttcaccaattgaaataaatgggcggcagatatatgttgaggagaggaagccaaatagcggaataagaggtggaaggaggggaggacgtggccgtttcagtggtggaggccggggatattcgagaggtggaggcgatgagtacaatagtaaccgtgggaggtcaaacggttacggtcgtgctcctcaccaagagaggggcatacttgggagccacaccccaaggaactgattcagtccagcagcaaacataaggttttgatccgtgtcgtcaaagcgagagagagagagatcctaaacaatctgcctatcagctactaggccgcgtttgggttttggggcttgttttgtcgatgaatgtgtgtgcgcgcgtcatcgacctatgtgacacttaaaacttttgctagtctgacgctatctctttacattaagatcggctgttctattaaccttgctgctattgttgctcgtgcatttctggcggtggtatttgatgttttgcctctgcatggaaaaggtttcagctttacatatgttacattgcagtcccccccaaaacttcttccgccagg

SEQ ID NO: 11541 - DNA, 1290 bp, Zea Mays
cccagaccaggcttgccgcgcgccgtgcctagcggtagcgacatggtagcgtgccctgcctcggttagtggaatgcctacatttgcccttcctgttcacgatggtggggtaggttttgactatcggatgcatatggctgtggctgacaaatggattgaccttctcaagcaaagtgatgaaacttggaagatgggtgatattgtgcacacactgacaaataggaggtggttagagaagtgtgtaacttatgctgaaagtcatgatcaagcattagtcggcgacaagactattgcgttttggttgatggacaaggatatgtatgatttcatggccctcgatagaccttcaactcctaccattgatcgtgggatagcattacataagatgattagacttatcacaatgggtttaggaggagagggctatcttaatttcatgggaaatgagtttggacatcctgaatggatagattttccaagaggtccgcaaagacttccaagtggtaagtttattccagggaataacaacagttatgacaaatgtcgtcgaagatttgacctgggtgatgcagactatcttaggtatcatggtatgcaagagtttgatcaggcaatgcaacatcttgagcaaaaatatgaattcatgacatctgatcaccagtatatttcccggaaacatgaggaggataaggtgattgtgttcgaaaagggagatttggtatttgtgttcaacttccactgcaacaacagctattttgactaccgtattggttgtcgaaagcctggggtgtataaggtggtcttggactccgacgctggactatttggtggatttagcaggatccatcacgcagccgagcacttcaccgccgactgttcgcatgataataggccatattcattctcggtttatacaccaagcagaacatgtgtcgtctatgctccagtggagtgatagcggggtactcgttgctgcgcggcatgtgtggggctgtcgatgtgaggaaaaaccttcttccaaaaccggcagatgcatgcatgcatgctacaataaggttctgatactttaatcgatgctggaaagcccatgcatctcgctgcgttgtcctctctatatatttaagaccttcaaggtgtcaattaaacatagagttttcgtttttcgctttcctaatgcttgatggctgattgtttgcacttgtttcattccgttgggcactgatggtcttagagttagacaatcggctgcagcgcataggtttcaagctggggggttgcatgtccgactaca

SEQ ID NO: 11542 - DNA, 729 bp, Zea Mays
cttttaaagcgcgcacggacacgggacactccgtctctctgaccttatccccttgcggcaaaaccttgcgcgcaacaatggccgcctccctcccgaccaccgccgcgcgcctcgcggccccggccttcgcctacatcgacgtgaagaacaaggactacggaggtgacaagtacgtgaacggcgagataatcccctgcacgtacccgacgtaccagccgaaggagcggaggacgtccaagtacgagagcaggcggtacgagaggcggagagatgggccaccggcggccagcaggaaaccgaggcagcaggcaccagctcagactcagaccgagtccgcgtcttcgtgacgaggcattttgtccacgtacctacctacctagaagtagaacaagagaggaggacgcctaaaattctgtcgccttgggcaccgcgtactggactggacaggcgggtcgggatccatcatccatcgtcagccagaaaaattgtcgctgtccaagcagcctgggcagcttgtgtgtgtgtgtgctgataagcctgatatcttgagctagctgtggcagaaactgaaaaccctactcttccccccgactccttagtgagctgtgtgatgccgactggtgtagagctgtatcgctgattgcgtgaaaccgaaatgctgtggctttatttagactgaagttggcacttcgagccatcggatcactccaagcactttgttcaaaaaaa

SEQ ID NO: 11543 - DNA, 533 bp, Zea Mays
cgccctccaggctccagttgaagtgtgcccagatccttcttgaagctggtgctgcagtggacgctcttgacaagaacaagaacaccccgttgcattacgctgctggctacggccgcaaggagtgtgtggatcttcttttgaagcacggtgctgctgtaacgctccaaaacctggacgggaagacacctatcgatgtcgccaagctgaataaccaggacgaggttctgaagttgctcgagaaggacgccttcctttgaataccatgcctttcgtatacacttggactcttggtgtcatgttttttttttcataccggttgtttttgtctggatagccacatgtcatggtccttaaatctgttatgcctaaatgctattagcatgtgggtgttcgaactggcctgtaatggtctaccgttcgtgacttgtgttttcccactccatttctgatacttaagcacatatgaaaaagttgtttccggatcaaattcaatggtggtgtatcatggttatctgtcttatgcttaagagaca

SEQ ID NO: 11544 - DNA, 83 bp, Zea Mays
atcacacattgctcaaataataacataacaggggaataatagtctattacatcatatgtctgagacatccacatagtatttac

SEQ ID NO: 11545 - DNA, 183 bp, Zea Mays
tggcaaaaactagcgaagaggggaggtgctgctattgaccgaagtcaggatattgctaaattgcaagaattttacaagctttatagagaaaagcataaagtggatgagttgattgaagatgaaatgaagttgagggaatctgccgtgttcagcggtaaccttgattcaccgcaagatggttga

SEQ ID NO: 11546 - DNA, 82 bp, Zea Mays
cacgtggcccgttagcacggcacgaagcacgagtttttagcacgacacgagcacggcacgacacgagttaatccgggcccgg

SEQ ID NO: 11547 - DNA, 62 bp, Zea Mays
agtaaccactcgctcacgtttagcaaatttttgtgagcattactcgtttgtttcttccattg

SEQ ID NO: 11548 - DNA, 78 bp, Zea Mays
tgttttccaggttatagttttgtgctgctgatgatggtgttaagtgccggtgggctcggccttcttataagtctaagt

SEQ ID NO: 11549 - DNA, 53 bp, Zea Mays
acaagtttgctcctagcatgtacacagttattctacagacagaagaagcacag

SEQ ID NO: 11550 - DNA, 124 bp, Zea Mays
tgtccccccgtaccaacaaggggtagtacaggaatattgacatgttgtccatcgactacgcctttcggcctgttcttaggccctgactcaccctccgtggacgaaccttgtggaggaaaccttg

SEQ ID NO: 11551 - DNA, 625 bp, Zea Mays
atgccatcaaaccttcttttcttcattaatcgtttcaaccagccgaagaatggacgttgttttaccatcctagagttgtgcgattcgatcacttatcgagttcggtttcgctgccaaagaaagagctgatgtgaggctttattatggtgatacaagtctgaaatctatgtcataccaggaaaggcttagtaactgggagtcaactggaattaaaataataccagtcttatcacaaccagatgacagctggaaaggtgaacgaggatatgttcaggatgctttcttcagaaacaagaacatagtaaatccatcttctacaggagccatactttgtggaccgaatgaaatgcaggaggaactcaccttatcccttgtagcagatggtgtctcacgagacaaaatcttaacgaactactgaaagcgatctccggtctctgatgtattttatgaccagttaggcctcaacgtgtaaactttattgcttaggcctggctgtgatgttccagtgatatatgaataaactactgaacttgagacgaggatgtaatgttcagtgatatattatatgaataaactactgaatttgaggcgaggacaatactgtggtcaagtttcggtttggttc

SEQ ID NO: 11552 - DNA, 85 bp, Zea Mays
ggccggagaagcgcgtcatctaccctagggcatccaacaccgcattgccgacgacgtcagggcaaggccgccaccggcttccagt

SEQ ID NO: 11553 - DNA, 983 bp, Zea Mays
tcgcggccgaggaggcggtgtgccgcatctgcatgagatcttccatggacgacattgatgacgacggtgatgacgacgacgatttggatatgagggatcccactcctgagcgagacgagctcgatgaagagattgttgagtctgatcttgagctcgaaggagaaattgtacagtctgaccatgatgacccaccacagaagatgggaaatccttcagtggaggtgactgaggaaaaccgtgatgcttcccaagaagcaaaaggcaaggctatggaagcaatttctgaaggaaaacttgaagatgctattgaacaccttaccaacgcaatagtgctgaatccactctcagcaatcatgtatggtactagagcatctgtgtttataaaaatgaagaaaccagctgctgccattcgtgatgccaatgctgctctagagatcaacccagactctgcaaaaggctataaaactcgtggaatggcatatgccatgcttggcaaatgggaggaagctgctcatgatctgcacacagcatctaacatggattacgacgaggagatcaatgctgtgctcaagaaggtggagcctaatgctcacaagatagtggaacatcgcaggaagtatgagaggttgagaaaagagagggaggaaaagagagcgcagcgtgatcggcttcgtcaacgtgcagaggcgcaggctgcttacgacaaggccaagaggaaggagcaatcgtcaagtcgctcatcaggaggtgcatctcccagaggctttcctggagggatgcctggtggtggtttccctagagggatgcccggtggaggtttccccgggggtggcatgcctgggggtttccctgggggtggcatgcctggaggtttccctggtggtgttcccggtaatgttgatatgagtaaaatcctgaatgaccctgacctgatggcagcattcagtgacccagaggtcatggcggctttacaagatggtatg

SEQ ID NO: 11554 - DNA, 1213 bp, Zea Mays
ggatgatgatggtggtggatacaggatacatgtacggcggcgacagcagccatacaaaaaaaaagagctcaaatgcagagcctaattaccaacatgtcacccagcagcgtcagactgactaatcaacatgcttaccgatccatcagattacaatgcgaatgcaaatgtttgttcctacatgagatacacggtgctggaaggggtgttccgttccggcctcagatgcacttcacgttgagtgcccgttgttcacgttgttcacgggctggctgctctcctcgcttccgcctttgtcggcagcggtgttctctagtggagcggcgtctggctcggctccaggcgcggcatcagtggcggcagcatctgccttggtcccgggtgctggatcagcggcggcagcatctgatttgatttcaggcgctggggcgagaacagcagcaggctcggcaactgattcggtctcaggcactggggcaggaacagcagcaggctcggcaggagcaggggctgagttctcagttgggttgcttactggagctggagccacagcttcaggctcatctggcttggcatcttctttcttctcctccgattgcgcaagaggagctacaacagcttcagctggtttctcagtttctttctcatcttcttccattggcgccggagcaggagtatcgtccgccttgtctgcagccttctcagcgtcatcagtttcagtaggagcttccttcgcctcttcagcaggcttcatctccacgtcagtctcctttgtgccatcttcacttggggcgtcctggccggtttcagcatctttggcttcttcagtttcaggggcttccttctttccctgcctacccttcctaccactggagttcctgctgcgtttcgggatcttctcgccctctgggctatcaaaaaccttgactttctcgctaatgcgagcagaacgccttggggtatcacctgtttgcaaagcattttagatggagaagacaaaatttctaaagccatccacatttctattagagccagagatttgaagaaataacaaggagtggtagtcaaaggtatctaccagttccccaatcaaaatctgaagcagcagggcctccagggtgtgcctttaggtattggcttagttgcctcttgttcttaatttcctcgccagttggcgaaacaaaaacaatctcggatcttccccctctcttcttgg

SEQ ID NO: 11555 - DNA, 73 bp, Zea Mays
gaaaaataaaaaaagaaaagaaaaaaaaaaaaaaaaaaaaaaaaaaaaaaaaaagaaaaaaaaagtaaaaaag

SEQ ID NO: 11556 - DNA, 170 bp, Zea Mays
caaaacactctctctagtcactaggtgtttggagtgaatttgggacttggagaggctttgattcttttgaattgtgtctaggagtgaatgcactagctcctgtattgaatgtgaagtgctggaaacttggatgcttggagtggtggtggttggggggtatttatagccct

SEQ ID NO: 11557 - DNA, 1338 bp, Zea Mays
aatgtggaaagagtcatgccaccggtgcaacggtggactggaccggaacagccactccaccaatgtcttccacgtcgcatgccatgcatcgacaggatgcacgctctgatctctatataaggggcggcaacccttgtgacacctgacatcacctcagtatttgtcagaagctcaaatactgatctcactgatccagtatggctatggcaaaggcaggcgcgccgagggtctcggcggcccagctggtgactctcgggctatcactcctctgcgctgtcgccggcccggccgccgcgcagaactgcggctgccagccaaacgtatgctgcagcaagtttggctactgcggcacgaccgacgagtactgcggcgacgggtgccagtcgggcccgtgccgctcgggcggcggcggcagcagtggcggcggtggtgcgaacgtggctagcgtcgtcaccggctccttcttcaacggcatcaagagccaggccgggagcgggtgcgagggcaagaacttctacacccggagcgcgttcctgagcgccgtcaaggcgtacccaggcttcgcccatggcgggtcgcaggtgcagggcaagcgcgagatcgccgccttcttcgcgcacgccacgcacgagaccgggcatttctgctacatcagcgagatcaacaagagcaacgcctactgcgacccgaccaagaggcagtggccgtgcgccgcggggcagaagtactacgggcgcggcccgctgcagatctcgtggaactacaactacgggcccgcggggagggccatcggcttcgacgggctcggggaccccggcagggtggcgcgggacgccgtggtggcgttcaaggcggcgctctggttctggatgaacagcgtgcacggggtggtgccgcaggggttcggcgccaccaccagggccatcaacggcgccctcgagtgcggcgggaacaaccccgcccagatgaacgcgcgcgtcggctactacaggcagtactgccgccagctcggcgtcgaccccgggcccaacctcacctgctaggctaggcggcatcggcggacggcgggggccttcaggccttgtgctcggcgtcgcatcgcaccctcgcgcgcgaaaccgagcaatagtgacaataaaacgccggggctagctgagcctgtttgttcgacttcgacctgaataatgaagcagctgtgatatgcatgttgtttcgacacaacgtgtacgcttgcagagcgcttgtactttacgattgcattgtatgcagcaagggtttaaaggctgaatcaataaacggtgtgtaggcgatcactgtttcaccgcacacgaaaaagaa

SEQ ID NO: 11558 - DNA, 407 bp, Zea Mays
acttcaccagttcacccactaggactaggagcaggagaggggagagaaaacctcgccgtcaatgtcagcgttcgttcccaagggcgctagggtttaaccccccaactgttcggtctctctctctccccgaatccaattcagcgtcatctagtccgggagcctgcgacatggggtacctccaggaggcccgggagaatcacgtcaagaagaaggtcgaggaagctttgcggagcaaaatgaaacaaaaggctcttcaggaatgtgatttctattgttcaaaatatgctgagtgtgcacggggaagaacattttctgtggtatggcaatgccgcaaacaagcaaaagagttgaatgagtgccttcatcaataaataataggagatgtgtgtatcattgcattaaggaga

SEQ ID NO: 11559 - DNA, 69 bp, Zea Mays
gcgtaagtggcggtgcagtttttcgcacgtagtaaccggagcgccggttacatgacgtgtgggcctggg

SEQ ID NO: 11560 - DNA, 527 bp, Zea Mays
tctgggttttccttcctagtactggtttccttatttagacgacagttaaacaaatcgaggatgcgttcaaagaatttactacgagggaggatattgctattgtgctcatcagtcagtatattgccaacatgataaggtttctggtggatagctacaacaagcccgtccctgctattctggagatcccatccaaggaccatccatatgatccagcgcacgactctgtgctctctcgagtgaaatatctgttctctgcagaatcggtggcgtctgataggcgatgaaggcatccttgcgtagcagtacccttcgatgcatctattttgttatggtattgaaaagaagatggcacgtaccattgggtgcgagcgagccagcatgaataataatgagcttgcaaacaatgattggttgaactaaaccaacacaattttttttcataaatggttcgaatgatattttggtgcttgtgtttgattggttattagggaataaaatgcgattgttatgacgaattgattgcccag

SEQ ID NO: 11561 - DNA, 484 bp, Zea Mays
cttcatgagttgtcctggcgcccgattccgtctggtctgcggtacacctgcccccgcggtgtttcgatccatgggagcatttgttggggatgggtctcggtgcagtgtttgtgaaccagctggtaaagtttgatgagaagctcaaggaggacctcgacaagatgcttgagcgcgccaggctagccaacgagcagcgctacattgacgatgatgaatagatgcccagatttatttgccagcgacctgtattttttttgcaacatgttgtcagtacacatggccaggactgatgatcccccatcgtcttagttctctcagctttccgcatttcaactgtgatcttgtaataagatgtcggatctcatggattaccaatgtaatacaccaattatgggttcttgatctgatggttggctttctctgataaaattactcaattaaaatgattgtgtttttgcaatgtcaacttttctcgtacactcta

SEQ ID NO: 11562 - DNA, 786 bp, Zea Mays
ggttcaaacgaatcgtgaagaaacgtgaagaaacatttgaatcgtgatacgttaccacccctaattgaagtgatggaggctacttcaatgcaataatgaccttcccccagaactatcccaacagcccgccatcagtaagatttacttctgggatgtggcatccgaatgtttatccggatgggcgtgtttgcatttctattcttcatccacctggtgaagatcccagtggttatgagcttgcaagcgaacggtggacaccagtgcacacggttgaaagtatagttctgagcatcatttcaatgctctctagtccgaatgacgagtctccagcaaatattgaagctgccaaggattggagagagaagcgggatgagttcaagaagaaggttaggcaatgtgtccgcaggtctcaggaaatgctgtgaaggaggaacatgggggagttgaatgagtctgcaatcggtgtgctgcaattcacaaccaattatctcatgtcagcattcttttgctttcccctgtatattttttcaaccgatgtcactcgtatagtggtgttgggtctctttagacaaactcgggacggttgcttatcctaaaaattcgattgtactgcgtggcatgaaatgatcgattcgaagaatattttgaacatgctgccacctaatcaaaaaatttcatgtttaacatcataaggaataactgttgcttattctaatgattcgattgcattgcgtgattctaaacatgctgtcaccttttgacgatgaacatcttaataaagaagtg

SEQ ID NO: 11563 - DNA, 737 bp, Zea Mays
ctcgcgaggttatctatgacaaattgacgggaagaagccgtggattcgggtttgtgaccatgtcttcggtcgaagaggttgaggtgcttgatggaagaagtttgagggtgaactctgggccgccaccacccagagatcggtcatcaccgtcaccgcaaagacccaggggtgatgccaacagggtctacgtgggtaacctttcctggggagttgacaattcagctctcgcaaacctgttcagtgagcaaggtgaggtactggaagcaaggatcatctatgacagggagagtggaaggtcaagggggtttggttttgtcacgtacggttccgccgaagaggttgagaatgcaatatctaatctcgatggcgctgacttggacggcagacagatccgtgttacggtagcagagtcgaagccacctaggcagcaatactgaaattcctcttgagatttttgtaggtgtaccggtagcccaaactctggattatagtgacgccagtcctggatttggtctcgagattcattgaagttaaaaagccctcatgtatatggctcactatttatatacatgtaatattggattcccgtgttcagtgtccttttgtatcaatttggctgcatagtgtcttgtggcacttcaaaggacatagattgttgacgggcaaccaaacctcaagaaagtatcttgtattgtttcttgtctcgtgtggtttgttcactatatttacttttgcaa

SEQ ID NO: 11564 - DNA, 506 bp, Zea Mays
ttcgaaacaagttctttcagaagttattggtaaggagattgagaagtctacctccagcatcttcccacttcaaaacgtcttcatccgcaaggtgaagatactcaaggcccccaagttcgatcttgggaaactcatggaggttcatggcgactacaaagaggatgttggtgtgaagcttgagaggcctgtcgagggagatgaggctgggcaggaggttgctgctgccgagtagtttgtttgctacttctgtatctaggcgagtctggacatgaggttgcttatgacgtgaacttatagagttgtcttggctacgtgttttcatctggccctaagattttgtcttgaaacaagtttaaaattaagattactcgtggcgatcttctgtgttcgagtactgatgtactaagttcctttgcatcctcatttttgtttggtcatcgataatttactttctcattcatatgagatgctgttctctgcttatttattgttagctgacactggcg

SEQ ID NO: 11565 - DNA, 60 bp, Zea Mays
ctcggccgcaacctcgctttgctctccgtgtcgctgctcgccgagtccttcccctgtctg

SEQ ID NO: 11566 - DNA, 3191 bp, Zea Mays
acctaaaagagaggtgaacaagaaggtcctcaaggtgcctggaatagaacaaaagatccttgatgccacaagcaacgagccgtggggtccacatggatctctactggcagacattgctcaagcgacgaataactatcatgagtaccagatgatcatgcacattgtgtggaagagggtcagtgacactggtaaaaattggcgtcatgtttacaagggattgattgttttggattacctggtggcgcatggcactgaacgagttattgatgacatcagagaacatgcttatcagatatcagcactagctgatttccagtacattgattcttctgggagagatcaaggtagcaatgtacgaaggaaatctcagagccttgtcagtttagttaatgataaagaaaggatacaggaagttagagagaaagcactctctaccaaggacaagtacaggagtgcgtttgcccccagtggcaggagcccaggtggatatggtggtggttatgataatgaccgctatgaaggcagctatggcagtagatatgacaacagaaatggaaatgggaggggagactatggatacagggacgatgacagatatggtggacctggaggtacacccaatcgggaaggagatcgttattccagagattctaatgaacgctatggcagagattatagagaagatgaatacaaaggaagtcatagcaaccatgaatatgctgaaggagcaggtcgcaggagctatggtcaggaaagagattcatatggggatggtgaagcttattcatcccgtggtcgtggcagcaatgctgatgatcctactcaggatgataggcctatagagcgaaagctttctaaccagcaaatttcttcaccaccaccgaactacgaagatgtcacaagagatggccaggacaatcttcacgatgacagaaatggaggaagtgttcctgctgctgtatcaagggtgccctctccttcagttcctgcaacaactgttcctgcagtacaggtgaatggggttcatgacagcactgttgaagatgtacctgcaccaccaactgctcatgccgagcctaatggatttgatgagtttgatccacgtggatctgtaccagattcttcccctcctgtaaaccctgcatcagtagcgaatagcttggagatggatttgtttggatcagatcctattagttcgttggctttggtgtctgtgcctcaaccaacgactacatcaaatgttgaagcaccggcaaattcaggttttgaaacaaatagttttgtgggcatgcctcctgcttcaactggatttggcgagattgatgcttcaaatccttttggggatcctacacctttcaaggcagttcttgatgaaagtccagcactacctcagacacatgctgcaccagctggttctttccaacccactggacctggtacggatgtgaaccctttccagcctgcttcagccgcaagctttggttttggagacactcttggtgatctcacttttgcaccaaatgctgcacctgagctgcaagatatgtttgcaaacacagcctccttgccttcagaggtagcaccagcaaacccatctgtggttctccaacagccagttcctactaatttctcctctcaggtatctcagccagttgctggcacattgcatgctgctcctacagcatttgctccttctcaggctcctcccacatcatttgctcattctcaggcacctcaggctgcccctgcattttcttattcacaagggcctcatcctggtgctgccatccagtctcaatttccccagactgtcgccccatcatttcctccttcgcaggtgcctcaatctgtaacacccaatctgccaccaggccaatcgaacttttttttgcaatcagcatcagggtctggtattgacagcctgtctggggttcctacccagaatggagcaccatcctacattcccccacagaattctcagttcactgctccggcaaatcaacaaccattgcagccaagcttcatcccacaaactagcacaccagcactccagccggccttgatctctaggggggcatcccagccccttggtgtgccaaattcagtgcctactagtggcagcttcccgttgcagtcaagttcatcagctcccccagaaacaatcgtttctgctttgcaagtcaatcaaactgagccagtgaagaagtttgagcccagatctaaactgtggtctgatactttgagccgaggtctagtcaatctggacatttctggaccaaaagcgaatcctcatgctgatattggagttgactttgattcaatcaatcgcaaggagaaaaggcaggaaaagaaaatcaaccaagcacctgtggtgtctacagtcaccatgggcaaggccatgggagctggttccggcattggtcgggctggtgtaggtgcaatggcacctcctcctaaccaaatgggtgccgggaggggtatgggtcctggtgccggtgccggttatggtggtggaatgggaatgaaccggccaatgggcatggggatgggaatgaatcaacaacagatgaggatggggatgaaccaacaaccgatgggaatggggatggggatgaaccaacaaccgatgggaggaatgaacatggggatggggatgaaccaggggatgccgatgcgtcctccaatggggatgggtcctggtggaatgcccggtgctggctacaatcagatgggcgcggcgtacggtggccagcagccatacggtggatacaggtgaggaggggctatgcagtcccccacaccacagatttatgggggcgaggtgttgaagaaacggttttggaggcatctgtattttgctcacctggttttgctttgggtatgatttcttgtttcttttgggggtggaggtgagaagggtataattttcgtcactattcttttacagtctatgttggatactgtacctactttactaaatagcaaaaagcaaacatatgaacaagggcggtgctacaactactgcgttgtgttggatgtaaagccttgatatattatctctttcccatgtagttgtggctataggcggcttcttttcagtgaacatattgtctgttccagcgttcttgctggatggatagtaaatggctgtaccatttggttgaattatcatggtttttgctttgatgtta

SEQ ID NO: 11567 - DNA, 960 bp, Zea Mays
ataagaggctgatttgggccagagggttgtgcacggaattcaacattgagaagctgcagcttgttgaagctgagaaaaagaagattagacaagagtatgaacgcaaagagaagcaggttgaagtacggaagaaaattgagtactctatgcagttgaatgcttctcgcatcaaagttcttcaagctcaggatgatctagtaaacaaaatgaaagacgatgcgatgaaggaactcctccttgtcagccacaaccaccatgaatacaagaaccttttgaaagatctaattgttcagggcttgctccgtttgaaagagccagctgtattgctccgttgccgcaaggaagatcaccatcatgtggaatcagtactgcattcagcaaagcacgagtatgcatcaaaagcagatgtccatgaaccagagatatttgttgaccatgatgtgtacctaccacctgccccaagccatcatgatgctcacggccagttttgctctggaggtattgtcttggcttctcgagatggaaagattgtgtttgagagtacacttgacgccagactggaagttgttttccgcaagaaattgccagagatccggaagcttctttttggccagactgcagcttaattgactcaatccgcagatgatggtatggctcgcttctacctagtggtttttgccaaattgatcgtttacggtattcatccccaatgtacaaactaccttatttgttcattactgtcgccgagcaccgactgtttgtacttcgttcgctccgaggaataagaataaagcactgctagacttcccattgcgaagctgaataaatattgtaaagccatttgtcgtgctgaacttcccgttccgttcctgtcctgtcctgttgatgtgtatatctagttaatgtcggatacggttcttgtgggaaaaataaaaaataaaagttcttgtaaagttcgcc

SEQ ID NO: 11568 - DNA, 90 bp, Zea Mays
tacaaatcctacccccttaaaaataatctcgtcctcgagattagtaaagaaagagatgtaaaaagctttatttatagtttagcttttaac

SEQ ID NO: 11569 - DNA, 681 bp, Zea Mays
ctgtttgaattgactgtacttcctgttattgacaaccaatgcaacagatcttcgagacgacaagcagttctttgtggaccatcctggtgctgtccctatcactactgctcagggagaggagctaagaaagcaaataggcgctccatactacatcgaatgcagctcgaagacccaactaaacgtgaagggcgtcttcgatgcggcgataaaggttgtgctgcagccgcctaaggcgaagaagaagaaaaaggtgcagaggggggcgtgctccattttgtgatctaatcatcggtagatgaagaaacaagggcgaaggtgccatggctttatcatcgtcgcgtcttgcttcagtggaacagcatgaatggtccccaccccctctaggtttactggcggctcggctgcagcgagttctcatctctttgtcgaggcattgagcgatatgtttgtttcattttcctccttcctgccttgtgattatctggtgtgtgtgtgtgtgtgactgacgaagtcgcggcgattaggtaactcgcttagaaggtatttcccgtgtttgagcaaaagaaagtatccctgttatctctgttccataagttagacatgatgtaatcgtactaagtttatttttacttatttcacttgaatggaaaagtatgcttcccatttatatgctcgttgtca

SEQ ID NO: 11570 - DNA, 3708 bp, Zea Mays
ccgaactccgtccgtccgacgcacacacgccggtaaatttcctccccagttgattccagcggcactgcacttgtgctgcctgcgttcttctcccctgagagctgcggaaagatccaagcgcaaggccacctaaccagaaccaaacaaggccgcctccggatcgccgagcaaattccatattattttcctcccgtttcttgtttttctcctctcgcttatccgtctcccagaaggagagggagagggagagccgaaccggggtgatcgttgccgtccctgtcacccccacaccccgctgtcgtggtgtcctatgcgactcgtttgttgccgtcggtcgcctggttgattaatccaaggccaaggatctcccctccacgaggacctccggagaggccagggtggctgcttgttgagtccagtgtgtcagtgtgtgccacttctctcacaaacactgcgagcttgtccctatcctgcaagaaacagcggaccaaagcatccgctccatttctccgctagttcgtgcgtcgatccaaacgccaatcttggatttctgccgcaaggactgtgcttcttgtagcaaaagcccccaaagatttgatccaagccagctcggaatcggatccctgcgaggaccaggcggcctgccatggcgtcccgctcctactccaacctcctcgacctggcaaccggagcagcggaccaggcgccggcggtcgcggcgcttggcgcgctccggcggcggctgccgcgcgtggtcaccacccccgggctcatcgacgactcgccggcgtcgccgtccacgccgccgcggccgcgcaccatcatcgtggccaaccagctcccgatccggtcccaccgcccggagtcgccggaggagccctggaccttcgagtgggacgaggactccctcctccgccacctccaccactcgtcgtcccccctgatggagttcatctacatcggctgcctgcgcgacgacatcccgcaggccgagcaggacgccgtcgcgcaggcgctcctcgagacccacaactgcgtgccggccttcctgcccacggacatcgccgagcgctactaccacggcttctgcaagcagcacctgtggcccctcttccactacatgctgccgctgtcccccgacctcggcggccgcttcgaccgcgcgctgtggcaggcctacgtctcggccaacaagatcttcgcggacaaggtgctggaggtgatcaacccggacgacgacttcgtgtgggtgcacgactaccacctcatggtgctcccaaccttcctgcgcaagcgcttcaaccgcatcaagctcggcttcttcctgcactcgccgttcccctcgtccgagatctacaagacgctccccgtgcgcgaggagcttctgcgcgccctgctcaactccgacctcatcggcttccacaccttcgactacgcgcgccacttcctctcctgctgcggccggatgctcgggctctcgtacgagtccaagcgggggcacatttgcctcgagtactacggccgtacggtgagcatcaagatcctgcctgtgggggtgcacatggagcagctcaagacggtgctcgggttgccggagaccgaggccaaggtgtccgagctgatggagatgtactctggaaaggggagagtggtcatgctaggcgtcgacgacatggacatcttcaaggggatcagcctcaagctccttgccatggaggagcttctgcggcagcaccccgagtggcgggggaagctggtgctggtgcaggtggccaacccggcgcgagggagggggaaggacgtcgccgaggtgcagaccgagacgtacgccatggtgcggcgcatcaacgaggtgtacggtgagccggggtacgagccggtggtcctgatcgatgagcctctgcagttctacgagcgcgtggcctactacgtcatagccgaggtgtgcctggtgaccgcggtcagggacggcatgaacctgattccctatgagtacatcgtctcccggcaggggaacgagaagctggacaggatgctgcggcaggggaagccagaggagaagaagagcatgctggtggtgtccgagttcatcgggtgctcgccgtctctgagcggcgccatcagggtgaacccgtggaacatcgaggccgtggctgacgccatggagaccgcccttgtgctgcctgagaacgagaagaggctgcgccacgataagcacttccgctacgtgagcacccacgacgtcgggtactgggctaacagcttcctcctggaccttgagaggacctgcaagtatcattctcagaagaggtgctggggcattggcttcggcctgcggttcagagtggtctcgctcgacctgaccttcaggaagctttccttggagaacatccttatggcataccggagagccaagacacgggcaattctgctggactacgatggcacgctgatgccacaggcgattaacaagagcccgtcaactgaatctgtgcggatcctcaacagcctgtgccgagacaaggacaatgtggtgtacctatgcagcgggtatgaccggcgcacccttcatgagtggttcccttgtgagaaccttggcatagccgcggagcatggctacttcctgaggtgtaagagggacgcggaatggaagacctgtgtcgctgccacagactgcagctggaagcagatcgcggagccggtgatgtgcctgtacagggagacgacggacggctcaaccatcgaggacagggagacggtgctcgtgtggaactacgaggacgcggaccccgacttcgggtcgtgccaggccaaggagctcgtcgaccaccttgagagcgtgctcgcgaacgagcctgtgtcggtgaagaccacgcctcactcagttgaagtgaaaccgcagggcgtgagcaagggcttggtggcccggcgcatgcttgtgtcgatgaaggagcggggccagtgcccggacttcgtcctgtgcatcggcgacgacaagtccgacgaggacatgttccagctgatcgccaccgctgcctgcggggactcgctggcgtccaaggcggaggtgttcgcgtgcaccgtcggccgcaagcccagcaaggccaagtactacctcgacgacgcggcggaggtggtgaggctgatgcaggggctctcctacgtctccgaggagctggcgctggcgaaccagcgggatgaagacgaggactcctctctggacgacgtgtgggagtaggaaggagcgttcccttcccgtgctgctcctgcggtaatgtctgtttgtgttggctcggctggagctttcgccgagtagtttaggtgtgtaaatgaggtatgctttccagcgtaatgtattgccagtggtctagtctcgagagctggcttgaatctagtgatgctctagtactttggtttgtggtgctatttacctgatccgtggaaggcagtactatgagctatacaagatgcagacctgaaatctcattcatctgaagaccatgacctttctcctaggcgtgtgtatacgtctttggattttggaactaaccatcatgtgccagtattagaggagctcgtttttacgtgatgatcagtttttttggaactagcgcgaacaaaagctgcaagttcccaagttgcaggctttgcgaaggtctttgggcagagtgaaactttaggctgtgtccagcagtccgctaccgaaaa

SEQ ID NO: 11571 - DNA, 3281 bp, Zea Mays
caagcaaagatggcccacgcgcggccacacccacgtcagcccatccgattcctcgccgccgccgccatgcttctcctttcctccgccatcttcaccaccgcacgcctcccactcgccgtctccgctcgcctcccaaaccctaccaacaccacccgcctcatcttcgccggcctacctgcctcctccccggtccgcgccttctgccccagggcgcgcccctccccctccacttgcgccgccttctcctccaccatggccgcctccgacaaccccctcctcgtcgccgacttcgacttcccgcccttcgaccgcgtcgagcccagccacgtccgccccggcatccacgaactgctaacacgactcgagggcgagcttgaagagctcgagaagggcatcgagcccacgtgggcgaagctggtcgagccgctagaacgcatcaccgacaggctcgaggtgatctggggcatggtcgatcacctcaagtccgtcaaggactccgctgatctccgcgccgccgtagaggaagtgcagcccgtaaaagtcagtttccaactaaggctaggacagagcaagcctatctatgaagctttcaaggccatcaggaactcttctaattgggacagtctcagcgatgctcgcaagcgtatagttgaagctcaaataaaggaagctgttctcagtggagttgcacttgaggatgaacaaaggaagaaatttaaccaaatcgaacaagagcttgaaaaactgacacaaaagtttagtgaaaatgtgctggatgccacaaagaaattcgagaagttaattactgataagaaagaaattgagggtttacctgctacagcccttggtttagcagcgcagactgctgtgtcaaagggccatgaaaatgctacagctgaaaatggaccttgggttatcacgttggatgcaccaagctatattcctgttatgcaacatgctcgaaacagagagctccgggaagaagtttatcgtgcttatctgacccgcgcctcaagcagtgaacttgataacaccaatatcatctgccaaattctaaagttaaggctagagaaggctaaacttcttggctacaagaactatgctgaggtaagcatggctcagaaaatggcaactgttgagcgagtagaagagcttctcgagaagctgcgtgctgcttcctgggatcatgctgtcaaagatatggaagatctgaaagtctttgcgaaagattctggttctcctgaagctaatgatttgactcactgggaccttaccttctggagtgaacgactgagagagtctaaatatgatatcaatgaggaagagctgcgcccttattttgcactacccaaggttatggatggcctcttcactctggcacataagctttttggagttactgttgaacctgcagatgggctggctccgatctggcacagtgatgtcaaattttattgtgtcaaagactcttccagtagccctgttgcttacttttacttcgatccttattcaagaccatctgaaaagcgtggaggggcttggatgaatgtagtcttttctcgaagtcgcgtgctagctcgcaatggtttggctgctaggctgcctgttgcccatatagtgtgcaatcagactccaccagttggcgagaagcccagtctcatgaccttccgtgaggttgaaactgtgttccatgaatttgggcacgcccttcagcacatgcttactaaacaagatgaaggctttgttgctggcattcgtggagttgaatgggatgctgtagagttaccctcccagttcatggagaactggtgctatcacaagaatactcttttgagcattgcaaaacattatgaaaccggtgaaactcttccagaggaaatttatgcgaagcttgtagctgcaaagaatttccgtgctggcaccttgagcctgcgtcagatacgatttgccagtgtagatatggagcttcatacaagttatgaccccaatggctcagtgtccatatatgatgtggaccaaagagttgcagaacggacacaagttcttgctcctctgccggaggacagattcctgtgcagctttagccatatttttgcaggtggctatgctgctggatactacagttacaagtgggctgaagtactgtcagctgatgcattctcagcttttgaagacgctggtttggatgatgagaaggcaatcgaggaaactggcagacgattcagagacactgttcttgcgcttggaggtggaaagtctccgcttgaggtgttcgtttcattccgaggacgggagccttcgcctgaaccacttcttagacaaaacggcttgcttcctgttgctgcctagtgccccaaagatttctctaagctgcagctgcccgttcaggatctgatgagtctgagagggagatcattcatcatcagcaaggttgctgcccatcccagttccagcaggaggcggcgtcctcgtggcctcgttgccgcggccggcagtgacgacgacgaatgcgcttcagctggtggtgagtccgagtcgtcgtcgtcgggcgggaaagacgatggcggcggcggcttgtcccgagaggatctggaacgcctggtcgggagtgacgaagatgccaagttcaatgggttggatcttgcaaacctcatcaggaagaagtacggtagatcgtacgatgtgacgctgataaagaaagagttcatggggaggaatctgctggccatgaatgtgatgtggaagtacagggagcaaagatcgttcccgctgagcgaggaggagtacctgctgcggctggacgatgtcgccaacacgctcaagtgctggggagccgtggcgcacgtgcgcaacacgctggagaagctcaaggagaggccgcgcatcggcaaggccgtcagcatcttcatcgacatggaccagaccggaggccgctccaacgaatggatttacaagtagcttcccactccatcgatcatgtatatgcatccatcgcccccatgaacaaacacattcatcaggtgtatggagaatgaatgtgggtaccaatttcatctccaacaatcaagcacatcgcaaagatcataccatcacatgatcttattgattcttagatcgcacctaagcatgtctcttgatattctcacatatgacaccatgcatgtatacaacgagctccttcatcaatactagttaagtattgcaatacgtccaagccgcatcaccaccatggctcatattgctcacactagtgtattatggactaatcatctctttatctg

SEQ ID NO: 11572 - DNA, 441 bp, Zea Mays
gaaccgaaacccgatacatccaggcgtacagccctccgcctcgtgaaggcaaagcacgcgcaaagccaccacagcgtcttcatcttcgtctccagtccaagcaagcgaagagcacccctcgagatctctccctccccgcgccgccatggacgcagttgactcggtagtcgacccgctccgggagttcgccaaggacagcatccgcctcgtcaagcgctgccacaagccggaccgcaaggagttcaccaaggtcgccgcgcggactgcgatcggcttcgtcgtcatgggattcgtcggcttctttgtcaagctcatcttcatccctatcaacaacatcatcgtcggctccggctgatccgtaaacctcaggatagtggagcagcagttcgtgcgtgcggcctccaagcgtagagtatactagatgattgttataaaagaatt

SEQ ID NO: 11573 - DNA, 80 bp, Zea Mays
ttagtggagcggcgaagtgactgcggtcactgcggccttgtcggctgaggagcgtgcgtcaggataaagtgtcaggcgat

SEQ ID NO: 11574 - DNA, 1200 bp, Zea Mays
tcttgattttgggagtgaattatacttagaatgctcagggaagagttgcagttgcttcaagagcctggctcatatgttggtgaggtggtgaaggtcatggggaaatcaaaggttctggtgaaggtacaccccgaaggcaaatatgttgttgatatagataagagcattgatatcacaaagatcacaccttcaacaagagtcgctcttcgtaatgatagctatatgctccatctgatcctaccaagcaaagttgatccattggtcaatctcatgaaagttgagaaggttcctgattctacatatgatatgattggaggccttgaccagcaaattaaagagatcaaagaggtcattgagcttccaatcaaacatccggaactatttgagagccttggaattgcccaaccaaagggtgtcctcctttatggacctccaggcacaggaaagacattgctggcacgtgcggttgctcatcacactgactgcaccttcatcagggtgtctggttctgaattggttcagaagtatattggtgaaggttcccggatggttcgggaactctttgttatggccagggaacatgcgccatccattatatttatggatgaaattgactctatcggatctgctagaatggagtctggaactggcaacggtgatagtgaagtgcagcgtaccatgcttgaacttctaaaccagcttgatggttttgaagcttcaaacaaaattaaggttttgatggcaacaaacagaatagacattttggatcaagcccttttgaggcctggccgcatagacaggaagattgagtttccaaatcctaacgaggactcacgtttcgatattctgaagatccattcaaggaaaatgaacttgatgcgtggtatcgatctgaaaaagatcgcagaaaagatgaatggggcctcaggagctgagctcaaggccgtctgtacagaggctggaatgtttgctctccgtgagagaagggtgcacgttacacaggaggacttcgagatggcagtggccaaggtgatgaagaaagacacggagaagaacatgtccctgcgcaagctctggaagtgaggctcatgccttgatgtacccaccgccacctttcacggcctctccctgaacggtagggcctcaaagtgccttattttttgttatcactacaacccacacatatccaatgcatacgct

SEQ ID NO: 11575 - DNA, 1250 bp, Zea Mays
aaaaaaaaatagagtagactcgccagccaggcagccaccctcaccctggtctggtctcctctccaagcgggcagcgctcctccaaactgaaccctatcctagcacgagtgcacgtcggtggcagcaggagatggtggggacggcggaaggcggcgcggagagggcggtgcggcggtgggtggacgccgccggcgggcgcctggtcctggacggcgggctggccacggagctcgaggccaacggcgccgacctcaacgacccgctctggagcgccaagtgcctcctctcctccccgcacctcatccgcaaggtccatatggactacctagaagctggggcgaacattataatcacagcatcgtatcaggccactatccaagggtttgaatcaaagggcttttcaaaagaacaaagtgaaaacttgttaacaaagagtgttcagattgcactggaagcccgtgagatgttcttgaaggaacatttggagaaatccactcctatacagcatcctattctggttgcagcagctctagggagttatggggcttatcttgctgatggctctgagtacagtggggattatggtgaagctggtacgaaagagttcctgaaggactttcatcggcggaggcttcaggttcttgctgaagcaggcccggatttgattgcttttgaaacgatccccaacaaattggaagctcaggcatatgttgaactccttgaggaatgtaacatcaatatcccttcatggctttccttcaactcaaaagatggagtgcatgttgtgagtggtgattcgttaattgaatgcgctactattgctgacaagtgtgcaaaggttggtgcagtcgggataaattgcacacctccaagatttattcatggactgatactctccattcgaaaggtcacagacaagcctattctgatatatcccaacagtggtgaaagatatgatggtgaaaaaaaggagtgggtggaatccactggtgtgtcagatggtgattttgtttcgtacgtaaatgaatggtgcaaagatggggctgcgcttatcgggggctgctgcaggacaactccaaacactatcagggccatacacagaactcttaaccaaggctgccacaagcatcagttacctgtagcatagatctgtgctccactcctgatgctctcctcccagcagtaccttgagctgtatccccgagattccttaaccagcgcgaaccaatatactgttgcgtgttctcctg

SEQ ID NO: 11576 - DNA, 1178 bp, Zea Mays
gaggatctctgcctacgacgtcctcaaccatccttggatcaaggaagacggtgaagcgcctgacacgccactggacaacgctgtcatgaacaggctcaagcagttcacggcaatgaaccagttcaagaaggccgcgctgagggtcattgccgggtgcctgtcagaggaggagatcaggggcctgaaggagatgttcaagggcatggactccgacaacagcggcaccatcaccgtggacgagctgcggcgagggctggccaagcagggcaccaagctcagcgaggccgaagtggagcagctgatggcggccgcagacgcggacgggaacgggacgatcgactacgaggagttcatcacggcgacgatgcacatgaacaggatggacagggaagaacacctctacaccgcgttccagtacttcgacaaggacggcagcgggtgcatctccaaggaggagctggagcaggcgctcaaggagaaggggctcctggacggcagggacatcaaggacatcatctcggaggtcgacgccgacaacgacgggaggatcgactacagcgagttcgtggcgatgatgaggaaagggaccgccgagccgaaccccaagaagcggcgcgacgtcgtgttgtagcctgtgtaggagcatgcgtagaggtagctgctgatatatggtatggtatatcggatggtaaaatggaacggcgtccagcagttgatgccattgccacgacggtggttgcttgcacgctggtcgagcagcacaaggcgcgcgcggtggtggcagggagatgcgcgcactcggctgcgaatacgtggagatgctggagcatggaggggacagagactctttgacaatgtacgtagctactatgggatgatggaatggaaggatgcacgcatacctgatcgaccgaccgaggacctgtgctggagcctctgaacacacagcagcagcagctgctgctgctgtgtcttggatccgtaggtatgcttactgatggttcgagaattcgtatgcgtaaaacgtgcaatggccatggactgtgtatatatcctcagatgtgtaagtgtaagtaacgtcgtaaagggaagaagaaaaatataatatgatgagacagttttttttttccttccctttgtagcataaccattggttcgcggtgatcacagaggtagag

SEQ ID NO: 11577 - DNA, 980 bp, Zea Mays
caccaaaccgcggacacgccacgaaagcacgaaccagggactcgcccgccattcgccaacccccacgaacccacggccctctccgacccgatcgccatcaccccacgcactcgcacccttcagggctaccccataaaaacgcccacgacggcgactggcctttcgattcgcccagggcaatattccccccggaccaaactagatcagcgaaacccactccgctctcccgagatcggacacatggcggcggcggcagtgacgtccaacggcggcgcagtggccgcgaacgggccggcgcccggcaggctggcctccgtgtacagcgaggtgcagacgagccggctcctgcacacgctgcccctcccctccgtcctccgctccaacttctcggtcgtcgacggccccgccagctccgccgcgggtaaccccgatgagatcgccaagctcttccccaacctgttcggccagccctcggcgtcgctggtgccttcggccgagcccgcggcgaccaggccgctaaaggtcggtgtcgtgctctctggtggacaggcgcccggcgggcacaatgtcatctgcggcatctttgattaccttcaggagcgtgcaaaaggtagcaccttgcttggattcaagggaggccctgctgggatcatgaagtgcaaatatgtggaactcacttcagactttgtgtatccctacagaaaccagggcggattcgatatgatctgcagtggaagggacaagattgaaacaccggagcagttcaagcaagctgaagacacagccaacaagcttgatttggatggacttgttgtcattggtggtgatgattcaaacaccaatgcctgccttcttggtgaatactttaggtcaaggaacctgaagactcttgttattggttgcccaaagactatcgatggagatctgaaaatgtaaggaggtaccaacaagctttggatttgatactgcttgcagggtat

SEQ ID NO: 11578 - DNA, 216 bp, Zea Mays
atgaccaagatgtacatccacaaaaggcaagacatcatctgtgacgtgttcagactgcaggctaagaaggacctaacggaggttacccacaaggtctacttcgatgtcgagattgacagcaagcccgcaggtcggattgtcatggggctttttgggaagactgttcctaagacagcagagaacttccgagctctttgcacaggtatgttttatgct

SEQ ID NO: 11579 - DNA, 57 bp, Zea Mays
cgcccgaagccttctggcggagagcacgtctgcctgggcgtcacgccaaaagacact

SEQ ID NO: 11580 - DNA, 1462 bp, Zea Mays
ggaagggctctcatcgtcccctccactccactcgtttctttcgcttcccgcggcgaaagccctcgaagcagataaggcctaccggctgccgccgtgcccgtgctcgcgctcgaccaccgccggccatggtcggcgtcgccctcgcgccggcagtgtcccgcgtgccttgccgtcccggcgcttccttccacgcctcgcgcccctcctcttcggcgcggctcccggccaggccgcgggcgcgggcgcgggcgccgccggagaggctcgtggttgtcgcgcggtactcgtcctcgtacgaggtcgagggcgaggaggaggaggaagatgaggaagggctcgggggtggcggaggctgggggaggagggaccgcgggcccgaccccgactacgacccggcccttgacatcgaacgcatcgagtcctcgaccgtaaggctattggacgaacagaaaagaatggttggtgtagtatctgtcagcgaggcagttcagattgcagacgataatgatcttatactggcaatattatcaatggatggggaccccccagtacttcgactctttgatgagagagattacaaaaaacataggtatgaacaacagaagaagaaaaagattcagcagaaaagatctgtcgcgaaacgcatgggcttgaaggagctgaaaatgggatacaacattgacatccatgattacagcgtgaggcttaaagctgcaaaaaagtttcttaaagctggcgacaaggttaagataattgtgaacctgaaaggacgggaaaacttgtacaaaaaagaagctatcgaactccttagaagattccaaaatgacgttggcgagctggcgaccgaagaaagtaagaatttcgcggagaggaatatatatctggttcttgttcccaataagatagctatacagaaagaacaggatgaattgaacaaaaagggtgctgtgagagaagagaaagaccaatcagacagtgatgaaccagaagagaacgaccaaccagacagcgatgtacccctgacagaactgctggaggaaagtatggaacccgaggcagaagtctcagcaaacgtttgatttgaactgtagaggccaaggtgcctgagattgaaacaagtatcacgcaggtacagttgctgtagaattgcagctctcgtaaatacaaggcaggctggttcttttgtgcaacaattatatctgttaaactccatctccacaagctatccgataggcgccaaggcgtctgacaagtaaacaaggcttgatgatgtatgtcctccaagtctccaacccctcagcattgaaggatgatgatacctaggaactggaaatcaccacccctcgcataaatggattgagacaggttggatccggtaccaataataaagtaattgttaggacagacatttttctagtatcgtccagcacggtggacttttttattttttagaaaccgggaa

SEQ ID NO: 11581 - DNA, 74 bp, Zea Mays
cgtatgtaggcttgctgatcaaggactatcttaactggccacatgccctagatatgggacagggtaaggtttgc

SEQ ID NO: 11582 - DNA, 886 bp, Zea Mays
gcaaggacgcaacgatctgagtggaatgtatgtagccaaccgtgcttcagacaagattactcaactgacagacaatgtgtatgtctgtcgctctggatctgctgctgatacacaagtcatttcggattatgtacgctatttcctccaccaacacacaatccagcttggacaaccagctaccgttaaagttgcagccaacttgattaggttgctagcttatcagaacaagaacatgttgcaagctggcatgattgttggaggatgggacaagtacgagggaggccaaattttctcagtccctcttggtggaacgatcttgaagcaaccatttgcaattggaggttcaggttccagttacctatatgctcttcttgatcatgaatggaaagagggaatgagtcaggaagaggcagagaaatttgtggtgaaggtagtttcccttgctatggcccgtgatggtgctagtggaggggttgtccgtacagttacaataaatgcggatggcgtgaagaggaacttttaccctggcgacaagctacccctgtggcacgacgagctggaaccccagaactcgttgcttgatattcttgctgctgggaaccctgatcccatggtgcagtgaactcgccctccacttactttgtgaacttttcactgtatctgacttgttcttgattatttctccttgaactatgtcagaccagagtaatttacgaattgttgttatcgcaccttaataaattcatgtttagctgggtgattggcgttttgagttaatggttactggtaagcgtgctactgctgtagttaagcctgtggcaagtattcaaattttcagtaatgaatcccccgtagcagccagcaccattctatctgctacaacaga

SEQ ID NO: 11583 - DNA, 1559 bp, Zea Mays
tagaaacacagatcgagtttggttactccctagtcacacagtcaacggatttcactgagcttgcaaaccaggagccgtggctctcatctatgaagttggttgtgaaacctgacatgctctttgggaaacgtgggaagagtgggcttgtggccctcaacctagatcttgcccaagttcgccaatttgtcaaggagcggttgggagttgaggtcgagatgggtggctgcaaagctccaattacaaccttcatagttgaaccatttgtgccacatgaccaagagtactacctttcgattgtatctgaaaggcttggcaacaccattagtttctcagaatgtggaggtattgagatcgaggagaactgggacaaggttaagactatctttcttcccacagagaagcaaatgacacctgacgcatgtgctccattgattgccaccctgccattggaggtccgcacaaagataggtggtttcattagagctgtattttctgttttccaagacttggatttctcatttcttgagatgaacccattcaccttggtaaatggtgaaccgtatcctctggatatgagaggagaactagatgacacagctgctttcaaaaacttcaataagtggggcaatattgtgtttcccctaccatttggaagagttctcagtccctccgaaagttttatccatgaactggatgagaagacaagtgcttctctgaaattcacggtactgaacccaaaaggacgcatctggacaatggttgcaggtggtggtgctagtgtcatatacgcagacactgttggtgatttgggatatgcttcggagctaggaaattatgcagagtacagtggagctcccaaggaggaggaggttctgcagtatgctagagtgcttttggattgcgctacctctgatcctgatggccgtaagagagcccttctaatcggaggaggaatcgctaacttcacagatgttgcttctacatttagtggcatcattcgggctttaagagagaaggagtccaaattaaaggctgcaaggatgaacatttatgtccggagaggtggtccgaactaccaaactggactcgccaaaatgcgcaccctaggcgccgaacttggcgttccaattgaggtctatggaccagaggcgaccatgactgggatctgcaaagaagccattgattgcatcatggccgcgtaaatcacaaatgtggttgttccatttgaagtcacatccgttttgtactagacgttccttgtacgtgattgctctggtaaaacagagaacgatcattgtcatgagtaaactcggcctttgtaacacagttacgcaagtaataattaagatcttggtttggtgctctgccacccttctagggtgggccggtgaggtgaatgtacaaataacaatgcactttgtgatccaccagattgcagtgctctggtatttctagggtcttgtactgcctgtgctgttttgtgttgtttgtttctcactgcgtttgctgtttatccttggttgagagttgtgactgtagaatttgcaggcaaatcaaga

SEQ ID NO: 11584 - DNA, 1384 bp, Zea Mays
cggccaccgaccaagccgcggcggcgcgaccccgaccttgacatggcagtgccgctgctgacgcagaagatcgtgaagaagcgggtcaagcagttcaagaggccacacctcgaccgctacaagtgcctcaagccaagctggcgtaggcccaagggtatcgactcccgcgtcaggcggaagttcaagggatgcaccttgatgcccaacattggatacggctctgacaagaagacgaggcactaccttcccaacaagttcaagaagtttgtcgttcacaacgtctctgagctggagctgctgttgatgcacaacaggacatactgtgccgagattgcccacaacgtgtccacccggaagcgcaaggagatcgtcgaacgtgctgcgcaactggacatcgtggtcaccaacaagcttgccaggctccgcagccaggaggacgagtgaaatggccattatttccggttgtgatccgctggtgtgcaagatgttgctgagatccgagattcattctctgccatttttttatgcttatgttagacttttccaatggacaaaattctgttataagcggaagagtgatggcgaggaccatctagtttttgaccggacatcatgaagtatatgcagccttgtgcatgtaatggatctgatggtaatgaatctgtggctccgaagctacatgcatttttctgaggcgcaaatgttggcctgttcaaatgtagcctaatttattagttttcactaaccctagattctttctcttgatcaaaaagaaattctgtcctctcgagctccatcttagtgatcggtccgctagttcacgcaaattcgaagaagttatcacggacgagccacatgcagagaaacttgcacgtgtggttctggccgggctttccttcggtatctaataaccttgcagaatcggtatctaataaccttttctgctcgccgctggcgcatctctcctaactcttgcccttgcccatttattctggaataattttttaggagtactatttactttacttacaaacaatccagcgaaaattcagtttgggacgaatagaacagactatatcgagccaagagtattttcattactattgaaaatgatggataggtaaatccacaatcaatcatgtcctttaagtcgcatgttgctttctaccacatcgttttaaacgaagttttaccataacattcctctaatttcattgcaaaatggtatcaagaattgatccaatatggatggaatcatgaatagtcattgcttttgtatactaattcaaacctgttatctatggagaaaattggataaaagaaataagtatttatcggggaacactatgcaaagatacaatttatttaaacccatattctataa

SEQ ID NO: 11585 - DNA, 88 bp, Zea Mays
ccacccaggttaattaaggattggatgcgtatgtaggcctgcatgatcaaggactatcttaactggccacatgccctggatatgggac

SEQ ID NO: 11586 - DNA, 365 bp, Zea Mays
atgacctcgtactgtgtagttgctgttgaatcagtcgggcgacaaatccccatagctttcctggacagagttaaggaagacttcaccaaaaagtatggaggcgggaaagcagctactgctgcagcgaacagcttgaagagggagtttggaccaaagcttaaagagcacatgcagtactgtgtggaccaccctgaggaggttagcaagcttgccaaggtgaaggcccaagtctccgaagtcaaaggagttatgatggaaaacattgagaaggttcttgaccgtggtgagaagattgagctgctagttgacaaaactgaaaatctgcgttctcaggctgcttgcttgagaatatatgtggttcctat

SEQ ID NO: 11587 - DNA, 75 bp, Zea Mays
gcaatttgtcgagcgcttaggaaatatcgcactgctagcttcgtcttcacccgattcttgggatttcttgctgac

SEQ ID NO: 11588 - DNA, 820 bp, Zea Mays
agaaaagtggctagcaatccggctttagctggtggacctttggtgcaagcccggaactttgcagtcatgaccggtgcaaacgcaggcatatcttgtgtcatgagaaggatacgagggaaagaggatatccagggcagcatggcagctgctttcggttctggtgctcttttctccatagtgagcggaatgggaactcctaatccagtagcaaatgcagttacaactggtgttgcttttgcagtatttcaaggtggctttttcatgatcgggcagaaattctcaaagccaccaagtgaagatacatactactctcggacaagaagcatgctgcacaaactgggtcttgaaaagtatgagaagaatttcaagaggggtctcctcaatgatcaaacgttaccactccttacggacagtgctctgagagatgtgaagattcctcctggacccagacttctcatactcgaccaaattaaaagggaccccgagctggttcaagcaaagtagcagtcacaattgtcgacagctggttctttctgggttgcatagggtttgaaagcgatgccgtctctagtttcttaataaactttctaggcaagcaagcaagaatttagttgtgctgtagttaattgttttttggccgatcagtttgcatcgatcctattaaattctgaacaacaggtatttatacgcatcttattcaaatttaaactggcattctctacattatgcaaatatgttggaaacaaggttgatggattaatttggcgtgaccggctgtcgtgtatacttgagtgaatcaacgaggaaataaatattgctt

SEQ ID NO: 11589 - DNA, 1361 bp, Zea Mays
  misc_feature (1)..(2): n is a, c, g, or t
nnatcgttgagaagtattccaactccaacattgaaattcatactttcaatcagagccagtatcctcgcattgttaccgaggacttcttgccacttccaagcaaagggaaatctgggaaggatggctggtatcctccaggccatggtgatgtgttcccctctttgaataacagtggaaaactcgacatcttattggctcagggcaaggagtatgtcttcgttgctaactcagacaacttgggtgctatagtcgacatcaagatcctgaaccatctgatcaataaccagaatgaatactgcatggaggttactccaaaaacattggctgatgttaaaggcggtactctcatctcttacgaaggaagagttcagcttttggagattgcccaagtacctgatgagcatgtgaatgagtttaaatcaatcgagaagtttaagatattcaacactaacaacttgtgggtgaaccttaaagctgtcaagagactagtagaggctgaggcacttaagatggaaattattccaaaccccaaggaagttgatggtgtgaaagtccttcaacttgaaactgcagctggtgcagctattcgtttctttgacaaagcgattggaattaatgttccccgctcaagatttctcccggtgaaggctacatctgatttattgcttgtgcagtctgatctttacaccttggttgatggctttgtcatccgcaatccatccagagcgaatccagctaacccttcgattgagcttggacctgagttcaagaaggttgccaatttccttgctcggttcaagtccatccccagcatcgtcgagcttgacagcttgaaggtttctggtgatgtctggtttggttctggaattacgctcaagggcaaggtgacaatcaccgccaagtctggagtgaagttggaggttccagatggagctgtatttgaaaacaaggatgtcaatggccctgaggatctttaagctatgcttgccgtcaccagtttttcccaaggatttgtcaataggagcagccaacccaaatcactcccactgagctctaccttttgtaattctcgtgccattccgctcccgctgtgagggtcctgtgagcccgctagagaatatgactgtaatcttctttggtgcgtctgcccttctgtttttgtgcgccagggacgtatattttgctgaaatgatactaccatagctttgcgtgccggaggtgctatgtggtgtttctgtgcgtttggttgcaatgataggacgggatgagatgagaccctcaaattaggttgtttggttctgggtcaaagattgagacaagaatatcctagtattgtttcatgttgtcctttaaaattggag

SEQ ID NO: 11590 - DNA, 81 bp, Zea Mays
atgtccggtgcaccagtcacgtcaccaaagccgttgggttccgaccgttagagctctgtcttctgggcccgcctggatgtc

SEQ ID NO: 11591 - DNA, 1906 bp, Zea Mays
tttaaggcgtcgcctcatcatacgccttatcgcttaaaaggttagttaaccatccaggttctgtcaagatgtctgatagccatgagactgacaggaacattgagatttggaaaattaagaaactgatcaaggcattggaatcagccagaggcaatggcacaagcatgatctctctaatcatgcctccacgtgatcaggttgctcgagtggctaagatgttaggtgatgaatatggtactgcttcgaacatcaagagtagagttaatcgtcaatctgtgttggctgccatcacctcagctcagcagaggttgaagctctacaacaaagtgcctcctaacggattggttctgtacactggaactattgttactgaagacggaaaggaaaagaaagttactattgattttgagccattcaagcctatcaatgtgtcactctacctttgtgacaacaagttccacactgaggctttaaatgagctcttggaatctgatgacaagtttgggttcattgttatggatggtaatggtactctttttggcacactaagtggcaatacccgtgaagtgcttcacaaattcactgttgacctcccaaagaagcatggtagaggagggcagtctgctctgcgttttgctcggcttcggatggagaaacgccataactatgtccgcaaaacagctgaacttgctacccagtttttcatcaatccagctactagtcagcctaatgttgcaggattgattcttgccggttctgcagattttaagactgagctgagccaatctgacatgtttgatcagcgactccaagccaagatacttaatgtggttgatgtttcgtatggtggcgagaacggtttcaaccaagctattgaattatctgctgagattctagcaaatgtgaaattcattcaagaaaagaagttaattggcaagtattttgaagagatcagtcaggatactgggaaatatgtctttggtgttgatgacactctgaaggctcttgaaatgggtgctgtcgagaccctgattgtgtgggaaaatctggatatcaacagatatgtgatcaagaacagtactactggggaaattattataaaacatctgaacaaagagcaggaagctgaccagagcaatttccgtgacccatctaccaatactgatctcgaagttcaggaaaaaatgtctctcctggaatggtttgccaatgaatacaagaagtttggttgctcgctggagtttgtgaccaacaagtctcaggagggatcccagttctgtagaggatttggtggcattggtggcatgttgcgctaccagctggatatccgttcttttgatgagctttctgatgatgacgatgtgtatgaagactctgactagcaatcagccaatctcatgccagggctggcccatggaaggacgcaacagctcgacctcgccatacctacgcaggagcacacgaaaagcaactatccaaggattaatgggcatgggccagcgtcatcctcttcaagaggagcttaagactaagatgattttgagtcacaatcatgggagtaacgtgacaagaagataccctactatatcacaattattccagtaatgcgtcgagaagataccgttgtttaagtgcacaaaccaatacagtgacgtgccaagaagttaccgtattttaaggatgtttaattttcagtattcgtcggggtagtactgtgtcagaaacttatttgtacctaaaaaggccaaatattgccgttgccttggtgctttatgctatgttatcgtcttttgtgagtctgtgtgctaaggttgttgcttaatgctttgtgactcgcaagctgctactcttgcagtttttgcaacgacgaagctatgatatggagtacaattctgtgtcatcatat

SEQ ID NO: 11592 - DNA, 83 bp, Zea Mays
attcattttagctccaaattgactcattccagttgcaataattttgttttcatattgttcatcatctagtgcctctgtttagc

SEQ ID NO: 11593 - DNA, 76 bp, Zea Mays
ggtaacactaggttagtgttggttaggtgacgtccacttgatgagtattcttcgatcgagcacttgcttgatttaa

SEQ ID NO: 11594 - DNA, 62 bp, Zea Mays
cgcccaggcagacgtgccctccgccagaaggcttagggcgcaacttgcgttcaaaaactcga

SEQ ID NO: 11595 - DNA, 991 bp, Zea Mays
ctacgactttttcgtccagtcctgctcacgatattcacatgcgccgtttcctctgtacacccgcgccgcgcccctttccctttctcgcttctgcccctctgcggctctgctgcctgcggcctgcccctttttttattcccaaaaaaactcccatctcgcggcggaaagagagagaggagaggtgcgagctggtaagatggatcggttggaggagcggaacattaagaagggggagagggagatggaggaggcgcgcaaggaagaggagcggaaggaggaggcgggggacaggaatacccaggagccgcagcaaggtcaaggcctcagcctctcactcgccaacggcagcgacagcggcaggtctggaatgttgccgatgtcgaacccttcagctaatcccacacagcttacaattttctatggtggatcagtatgtgtgtatgactcggtgccaccagaaaaggctcaggcaatcatgcttatagctgcggctgcagcagctgcggcagccaccaaaggcagtgctgccactgcttttaatcctccaatgagcacttctgtagcagctggacaagctcaggttgttgctgaccctagctcaataagcaagcttcaggctgatctccccattgccaggaggcactctctccagcgcttccttgagaaacgtcgtgacagggtcgtgagcaaagctccgtacagccccgccaagtcgttcgatggcatggagtcagcgggaatggagatgactgcggacggcaagcagggcgcaaggcccagtatcttgaaaggttggggagccgcgaagtctgaagtctgaacggtgaaaggctggctgacgctgtggggaggaagggacagggacgtgctgttggttttattatattggttgtattctgaagtggattcctcaataccgcataccgtactgctacgcctgttgactttgttacattgattgatcgttgttcacttaaacagaaaaaaaaaa

SEQ ID NO: 11596 - DNA, 73 bp, Zea Mays
cacaggatcgaatgtcacatctttactatataatcgtagttttgtacaaaataaataaataattacattatat

SEQ ID NO: 11597 - DNA, 1064 bp, Zea Mays
aaccagaatcgccgcaagccaatctgtctccgccaggcgccaagccaaccctcaccaccacccgtccaccgtgcatcaccgcccacagcctttattcgccaccgcagcaccccctgctcggccgcccgcccccgagttcccactcggccacttcccacatctctctctctctggctctctgctcgccacgcgccgtaccagcgccgcgcgccacatggctccctcgttcactagcctcctctcggccgcgaactccgccgccgccgcgaccgcctcgcggctcccctcggccgccgccggacgggcatccacttttgtgcgcttcccgcatcacccgacgggctgggctggggcctccgtcgcggcgccgcgtacggcgcgcaagcgggcacccggcgtcgcctacgccaccgcagctaccgagaagagcatctacgactacaccgttaaggacattgatggaaaagatgttcctcttaaaaagttcaagaataaggtgttgctgattgttaacgttgcttctcaatgtgggttgacaacagcaaattacactgaactatctcatatctatgagaagtacaagactcaagggtttgagatccttgcatttccttgcaatcaatttggtgcacaagaacctggatcaaatactcagattaagcagtttgcatgtacaagattcaaagctgaatttccgatttttgacaaggttgatgtcaatggacctaatacagctcccatctataaatttctgaagtccagtgcaggaggatttttgggtgatctcgtgaaatggaattttgagaagttcttagtggataagaatggcaaagtcattgagagatatccaccaacaacttcacctttccagattgagaaggacatccagaaactgctcgcggcataagtacttccaagtctttcagttgagtatctcagtatctgtatataggtcatatattttttcccctgtattgcaatcattttcgtaaaataattcactcattatctacacgtgattatagatgtaacatgagactatattagattttggactatcaaaa

SEQ ID NO: 11598 - DNA, 1252 bp, Zea Mays
cggcgagcagaagacgcgccactccgaggtcggccacaagagcctgctcaagagcgacgacctgtaccagaatgatccgcagtacatcctggacacgagcgtgtacccgcgggagccggagagcatgaaggagctgcgcgagatcaccgccaagcacccatggaacctgatgaccacctccgccgacgagggccagttcctcaacatgctcatcaagctcatcggcgccaagaagaccatggagatcggcgtctacaccggctactcgctcctcgccaccgcgctcgcactcccggaggacggcacgatcttggccatggacatcaaccgcgagaactacgagctaggccttccctgcatcaacaaggccggcgtgggccacaagatcgacttccgcgagggccccgcgctccccgtcctggacgacctcgtggcggacaaggagcagcacgggtcgttcgacttcgccttcgtggacgccgacaaggacaactacctcagctaccacgagcggctcctgaagctggtgaggcccggcggcctcatcggctacgacaacacgctgtggaacggctccgtcgtgctccccgacgacgcgcccatgcgcaagtacatccgcttctaccgcgacttcgtcctcgccctcaacagcgcgctcgccgccgacgaccgcgtcgagatctgccagctccccgtcggcgacggcgtcacgctctgccgccgcgtcaagtgaaaaaaagaagaagaagaaaaaaaacataataccctgcgttcctgctgccccggctgtctggcccccactactgccaccgacggcggcgccgaacccccgttccaatcatcatatcgtagacgacgcgcagcattaaactatcaatcaccggatctggctctttcttggccctgtactgtactattaatgttccgttcttgtttttttattcggaattgtcgccgtttcagtatacgtaaatctcgaggtcgataatacagtaatactaccaatttaactgtatactcctaccgtctggatggttttgttttgttttgtttcgttctccctgcgcgtgtcgaaattccgatttcgaattatttggtcaaaacccaagctgtcaaattcggtcgatgcttccaccacatgtttttgacagagatggcaggcaaccctcgcatcgcgcatgttcaccgacagcgacgccccacctccgtacagatattttgctcgtatatagcatctgtgccctgccgaacg

SEQ ID NO: 11599 - DNA, 982 bp, Zea Mays
ggatgcaggggagtctgattctgatagtgaagcatcggatgttagcggctctgatggagaagacacctcatggatttcatggtattgcaacttaagagggaatgagttcttctgtgaagtcgacgatgattatattcaagacgacttcaacctttgtggtctcagcagccaagttccttattatgattatgctctcgatctcattttagatatcgagtcatctcatggtgatatgttcactgaggaacaaaatgagctcgtagaatcagctgcagagatgctttatggtctgatacatgcacgatacattctgaccagtaaaggactggctgcaatgctggagaagtataagaactatgactttgggcggtgcccgcgtgtttactgctgtggtcaaccatgcctgccagttggacaatcagacatccatcgatctagtaccgtgaagatatactgccccaagtgtgaagacatctactacccacggtccaagtaccaagacatcgacggcgcatactttgggacaacgttccctcatctgttcctgatgacatacgagcacctcaagccacagaagctctcgcagcgctatgttcctcgtgtctttggcttcaagctccacaagccatgaacctcatgtatttgtcttttaaactcctcaagacgtggcactgggggcatgcgggagttttgcaatccttgaagacttgcatataagagcgccattggcaggtcagtggattggtaaaattctatcatgctgcagcgtgcttgtaccttagctggctggcacctatccaacatttgaatgtagctctaaggatatcaatgttgtaacctaactgctattgttctttgattagtaaaccaggagccccccctacaatgtagaatatggcaattatttatggctttgcagaaaataacaacccttcatctgcttggttctccaaaaagctatttatctaaaaaaatatcaaaa

SEQ ID NO: 11600 - DNA, 976 bp, Zea Mays
gatggacgggcggcagcgacattggtgcggcgacagagccggtggcaacaatcctatctcatggaaactgagacggttctacagttcaaatgaaaaacacttgcccgcaatatctgatccagaaatagaatctgcatttaaggatttgttggctgctagttggaatgaacttccagattctcttgtagcggaagcaaagaaagcagcatctaaagccaccgatgatagtgctggtcaagaggctttgaaaaatgtatttcgtgcagctgaggcatgtgaagaatttagtggaactttggttaccctaagaatggctcttgatgatctttgtggcctgactggcgaaaatgtgggtcccttacctggttatattgaagatgctgttaaagctgcatataatcgctacatgacatatctggagtcctttggtcctgaggaaaactatctaagaaagaaggtggagactgagttggggacaaaaatgatacacctcaaaatgcgatgcagtggcataggttctgagtggggaaagatctccctgattggcacctcagggatctcaggttcctatgttgagctaagggcatgatgggacgtctgcaggtaaccatggaaatcatcgatgagctgaggaagtctgtagatcagaatatgccagtactgcattttcctttcccctttctagctagcatggcaataacaatgagatcatcaaacagcggcgcggtttaaggaacttcagatactcccggcccttgtgtctgtgtctttgtctgtaataagaacgtgtatatgcgtgaaacctatcagttctgttattttttggcatgcgcctgacttcttgttcaactggtgtgagttgtatgctttgttcatgaagcactgatcaatgatcatatgccttcgcccgcaacagaacttccttcagcactgcaaaaatacagtgacctgccatttttttatgaaagggtttaac

SEQ ID NO: 11601 - DNA, 1088 bp, Zea Mays
cttgtagaaatcattagccacgtcgtgtattaatggagtccacggaggaattttgtttctttgtggctgcggtcttccactacggatcaataagcttgattgctgagccttgccggacagcacatctccgtgccatggagattgccaaagaggcaggtgcactgctctcttatgacccaaacctgagggaggcactatggccatcccgtgaggaggcccgcacccagatcttgagcatctgggaccaggcagacattgtcaaggtcagcgaagtcgagctcgagttcttgacaggcatcgactcggtggaggacgatgttgtcatgaagctgtggcggcctaccatgaagctgctcctagtgactcttggagatcaagggtgcaagtactatgccagggatttccatggcgctgtgccttccttcaaagtacaacaagttgatacaactggcgcaggtgacgcgttcgttggtgctctgctccaaaggatcgttaaagatccatcctcgctacaagatgagaagaagcttgtggagtcgattaaattcgctaacgcgtgcggagcgatcaccaccacgaagaagggggcgatcccgtcgctgcccaccgaagcggaggtcttgcagctaatagagaaggcttagatcatcatcgtcctgtacgccatggttttcaccagcttctacttcttcgaattgtattggattctgatatggaacagaagaagaagcggctgccccatcttaccagccctttttgtttgccctagtttccccttgtgaaaagggtgttttgttttataaactctacttgcaataagcagagcctttttttaattatgtcagggtgcatttgatacgatcgaataatcatcaatccataattgtagcaatttttttttaaaaaaagaaaagtcaattgagtttttgttccagtggtggataaatttctagaatcgggatatctggtcctgataagaggtgatattcagagcctttattttctactatagatagctgagactgagacagagtacactggcggcatctgccgggccagtggggcttcattgagcagctttgattgtt

SEQ ID NO: 11602 - DNA, 1467 bp, Zea Mays
ctttggaagtcgtggatcttcttgcaccttaccaaagaggtggtaaaattggtctctttggtggtgcaggggtgggaaaaactgtccttatcatggagctgattaacaacgttgccaaggcccatggtggtttctctgtctttgctggtgttggagaacgtactcgtgagggtaatgacttgtacagagaaatgattgagagtggtgtcattaagcttgacgataagcagagtgagagcaagtgcgctcttgtctacggtcaaatgaacgagccacctggtgcccgtgctcgtgttgggctgactggtttgactgttgctgagcatttccgtgatgctgaaggacaggatgtgcttctcttcatcgacaacattttccgtttcactcaggcaaactctgaggtgtctgctctgcttgggcgtattccatctgctgtgggataccaacccactcttgctactgatcttggaggactgcaggagcggattactaccacaaagaagggttctattacatctgttcaagctatttatgtgcctgctgatgacttgacagatcctgctcctgctaccacctttgcccatcttgatgctactactgtgttgtcacgtcagatttctgagcttggtatttaccctgccgtggatcctctggattccacatccagaatgttgtccccccatgttctgggtgaggaccactacaacactgctcgtggtgttcagaaggttcttcagaattacaagaatctccaagatattattgccattctgggaatggatgagctcagtgaagatgacaagttgacagttgctcgtgctaggaagattcagcggttccttagccagcctttccatgttgctgaagttttcacgggtgcacctggaaagtacgttgagctgaaggagagtgttaaaagtttccagggcgttttggatggcaagtatgatgaccttccagaacagtcattctacatggttggaggaatagaggaggtcatcgccaaggcagagaagattgccaaggaatctgcatcataaggggtctacaggcaacgcaaaattaacttttggaggtcaacgtgatgtgctttttatcctgtgttatcaagaacttacgtgcaggagaccctgccctgcagaaggatgtttctctcctccgtccccccaccccacaccccaaaataaggattcgcagtgacattttaatttggtttactgccctttgaggaagaattaccttttttgatgaggtgaaactataaccttgttaattctcaaacaaatactcttctcccatgttcatagccattatgaggtcgcctgttcaatttatttttctgagccgaatagccgcttctacagttcgttatctgtgtatagtctagttttgtgatccgtttccaactccagtgtttggttggtaggacgataacggatgaaatgtgtttggttctttgggacaaag

SEQ ID NO: 11603 - DNA, 52 bp, Zea Mays
cgagtcgacgggttcagaaacctgagatgagcaaggaagctgacgagcggga

SEQ ID NO: 11604 - DNA, 943 bp, Zea Mays
atggccaagatgctccgctgcgctggcaacgaggacatcatcaccatcaaggccgacgacggctccgacaccgtcactttcatgttcgagtcgcccaagcaagataagatcgcggatttcgagatgaaactgatggacattgatagcgagcacctcggaatcccggattccgagtaccaggccatcgtccgcatgccttctgctgagtttatgaggatctgcaaagatcttagcagcatcggagacacagtcgtcatctcggtgactaaggagggcgtgaagttctccacatctggagaaattgggagtgcaaacattgtctgcaggcagaaccaaactattgacaagaagaggctaccattatagagatgcaggagccggtttccctgacctttgccctgcggtacatgaactccttcaccaaggcgtcttcactgtctgagcaagtcactatcagcctgtcgtccgagcttccagtggtggtcgagtacaagatcgctgagatgggttacattagattttacctggcccccaagatcgacgatgacgaggagatgaagccctgatggcctgtgacgacataatgctcgtgttgcctgctcttccttccagccgttgtttgcttagctactctttgcaagcgaagaagggatgtgatgtgtatctcttaggctagactgcttcagctagttttctgtgactgctacatgaatccatggattactgatttactgggcttgtgctttgtgtatgatgctgccatctggtctcccaacaaagaagggatgtggtgtgtatctcttaggcctggttttcttttttcttggcataagtgtcatcattcatcaagttctccttgtggcggtggcaaggaagttgaaaaagctgaacgtgatgtgtttgctgccgatgaaccctaaagtagggcccctcgaagtggaag

SEQ ID NO: 11605 - DNA, 95 bp, Zea Mays
gtccagcaacccaaagttgactaggatacgacggcctagacctctcacgaacacatcacattatcctccatgcgcctcatcctgtggtacctgtt

SEQ ID NO: 11606 - DNA, 127 bp, Zea Mays
accatggacaaaaatttgtgtgtcgtcatgcctactgaaaacatcgatggaaacacgtcctccacctccaccagctaaaccattgcctccacaagcacttattttgccacctccttgcctggttgaa

SEQ ID NO: 11607 - DNA, 74 bp, Zea Mays
tcaacagattaaaaaaaaaaaaaaaaaaaaaaaaaaaaaagtgtatacatacagactcacccccaagataatcc

SEQ ID NO: 11608 - DNA, 1691 bp, Zea Mays
gggtcgacaacaatttgccgggcacacccaagacccgcggaagccacgacgacaagcctccatcgcctcttgttgtttgcgggccccatacgtcagagaccacaagcccgaggcttaactctccctgccgctaatccctcgcgccgccggagggaagcaagagatagatctgtccgcggccatggcggcggcggcggcggcggcggagcaaggcgtggacgccgcgaggaaagaggaggaggaggagcaggtagtgaatccgtgggaggtgtcggcggggaagggcggcatcgactacgacaagctcgtggaccagttcggctgccagcgcatcgacgacgcgctcgtggaccgcatcgcacgcctcaccgcccgaccaccgcactgcttcctccgccgaggcctcttcttcgcccaccgtgatttgaacgagatactggatttgtatgagaacgggcagaagttctacctctacacggggagggggccctcgtcggaggccctgcacctcggccacctcatccccttcatgttcacaaaatacttgcaggaggcttttaaggtgcccctagttatacaactgactgacgatgagaagtacttgtggaaaaacttgactattcaggaaagtaaaaggcttgcccgtgaaaatgctaaagatattatagcatgtggttttgacattgaaagaacattcattttctctgatttttcttttgttggaggtgctttttatgaaaacatgatgcaagttgccagatgtgtaactatgaataaggctattggaatatttgggttcaatcttgaggatcacataggaaaggttagctttcctccagtgcaggcagtcccatcattcccttcttcatttccccatctcttcgctggcaaggaccaactgcggtgtcttatcccatgtgcaatagatcaggatccatattttaggatgactcgtgatgttgctcctagaattggttatcagaaaccatcactgattgaatctagattttttcctgctcttcagggggagaacacaaaaatgtcagctagtgacgcaaattcggcgatatacgtgacagatagtgctaaagaaataaagacaaaggtgaataaatatgccttctcaggtggccaggactcaatagagctccatagaaaacttggcgctaaccttgatgtggatgtcccaatcaaatacctgaacttcttccttgaagatgatgacgagcttgcgcacataaaaaaggagtacaaggagggaaggatgttgactggtgaagtgaagcaacggcttattgcagttctatctgagattgttgctagacaccagagagctagagctcaagtgaccgaagagatggtcgatgcattcatggcagtgaggcctcttcccaatatgtttggctgagcatcacggcgacaacttgaacaaacatttttgttatcagggagaattttaagagtctttagaattgtcgtgccaccataagtatcccctgtgttttacttcttcgggatttaggcaaacctggccaaacatcccatgtggtggctgtggttgattttgtaaactcatacttgatatggtatcaatgattcaattcagacattttttttcaagcatatgcatgccattgtaatagagagcacctcttttttagttataaacggatgttgcttttgttcaaaca

SEQ ID NO: 11609 - DNA, 67 bp, Zea Mays
gtggcgagtagaagagcatgtgactaaggatcgtagtgcccagcagatagaagttgctgagcaggag

SEQ ID NO: 11610 - DNA, 1044 bp, Zea Mays
gctggggccaagaacatgattaccagaattcttgatcccaatcctacaactagaatcacgatttctcagatactggagcatccttggttcaaaaaggggtacaagcctcctgtttttgacgagaaatatcaaactagcttggatgacgtggatgctgcttttggagattcagaagaccggcatgtgaaagaggaaactgaagatcagccaacctcaatgaatgcattcgaactgatttctctaaaccaggcactgaatctggagaatttgtttgaagcaaaggaggagtataaaagagagacaagattcacctcacagtgccccccgaaagagataatcacaaagatcgaagaagctgcaaagccgcttggctttgatgttcagaagaaaaaatacaagatgcggatggagaacccgaaagcaggtagaaagggcaatctgaatgttgcaactgaggttttccaaatagccccatccctgcatgtagtcgagctcaagaaggcgaagggggacactctggagttccaaaagttctacagaagcctgtcgacccagctgaaggatgttgtgtggaagtgcgacggcgaggtggacggcaacagcgcggcagcatgaaagtgccctttgaactttccactggacggcgccggttttcctttgtacatagcttctctttcggatgatcccgtgtccattgcagagtcggttttgcaagcaagttctttggtttatttgtagtaagcccggtgaaacaaccgccctggaggctgttgtggatgagcttactggcgtgtttagttcgtttcatggtcgggaggttggatggaatggaaaccacaatcaaggctgtagtagtgtgtgtagtaacgaagtagatacatgcatcagatggtgtaagggagtaccagctgttagttcatggtttcaagcttagccccccttcaatttgttcgatgatgtattacttcacaataaacattattacttagatgtatgaggtgagcacacttggtcttttgtcctctttgtgctattttgcgtgat

SEQ ID NO: 11611 - DNA, 70 bp, Zea Mays
ttgatgcttgtagtgaacacctagtctcaatttccaaattaaaagatgaattggctagtcttaatgccca

SEQ ID NO: 11612 - DNA, 74 bp, Zea Mays
gagccgttccgcatacggccggggcgcgtcgccagccccaatccgcttccctcccggcaatttcaagcactctt

SEQ ID NO: 11613 - DNA, 81 bp, Zea Mays
cactttttccttggcttcgaagagcccaaatgtacacgctaagtctaacaatgacattgggggtcagttgatgtaggtaaa

SEQ ID NO: 11614 - DNA, 969 bp, Zea Mays
tggtcgtctaggcggcggtccaacgcctagacgtctaggcggtagtccaacgccttgtctcgccgtaccgctttaaaaaccatgcttttagtgcctcttgttagtgcgtaccgctatgatggcccagaggtgaacacatctttggctcattctgaagccaaaatacttcatgagaagatccataagaaggcttacagtgatgaggagatcattagaattctcaccacacggagcaaagctcagctacttgcaacattcaatagctacaaggatcagttcactcatgcaatcaacaaggatctgaaagctgaccccaaggatgagtttctttcaacactgcgggcgatcatccggtgcttcacctgccctgacagatacttcgagaaagtcattcgactggctcttggaggcatgggcactgatgaggatgacctcaccagggtcgtaactactcgcgccgaggtcgacctgaagctgataaaggaggcttatcagaagagaaacagtgtgccgctggagcgtgctgtggccaaagatacaactagagattatgaggatattatgcttgccctccttggggcggagtgaggaggcgtgcctcaactcgatctcatctgctcctacttgtttgatggggccaaaaaactgcatcgacgtggtatccacatggccgtggttttgaataataataaatttgtaacacgtagcctgcattagcagcgcgttttaaataaaggaacttcctgatatacttgttatcgtttgactgcgttttcacagaagctgttttgttcgttatggttatcctttcctgatgactgatgggaacatacaaactggatgctgttttgacgttaggcacagctctcttctttttccttgccttttctggttatttacaacagtcgagagcagagcagccagagttcatggtgtactgtattaaactcatgacgagtgaaatattcc

SEQ ID NO: 11615 - DNA, 79 bp, Zea Mays
caaggggatgacgggttcgacgactcgacggcaaacgcgagcacgcgcgaaacccgatggacgaagagcgagcgcacag

SEQ ID NO: 11616 - DNA, 1875 bp, Zea Mays
tttcaaccaggaaaaggtcgggaaaaaaatccgaaatggccgctagtggcctcggtctctccacctccttcctccccggccacgacaccctcctccggcgccggcgccggcggccggcgggccacgccgccgcgtcgttccggccggtgacggcggagctcggcggcgtcgcgacggagctgggccgccagctggtggaggcggtgggcgtggggctcccctgcaccgtcatgcagtgcggcgacgtcatctaccgcagcacgctcccccggaacgacgggctcaccatcacggcccccggcctcacgctcgcgctcgctaccgtgtcgtacctctggtccacgccaggcgtcgcgccggggttcttcgacatgttcgtcctcgccttcgccgaacgcctcttccgccctaccttccgcaaggatgacttggtatttgggaagaagctcggggagggcgcattcggggtcgtgtgtaaggcttcactggcgaaccccgaagcggcgaagaagcaaggggatttggtcgtgaagaaggcaacagagtatggtgcagtggagatttggatgaatgaacgtgtcaggagggcatgcgctagtagctgtgcggattttatttatggcttttgcgagacaaaagcaaaaggtaagggagctgaagaatattggcttatttggcgttttgaaggtgaggatacactttatgatctcatgcaaagcaaggaattcccttacaatgtggagacaaaaattcttggcggtatccaagacttgccaaagggaatagcgagagagaataagatcattcaaacggtgatgagacaactcttatttgctcttgacggacttcattcgacaggaattgttcacagagatataaaacctcaaaatgtgatattttcagagggatcacgaaccttcaaaattattgatcttggagcagcagctgacttacgtgtaggaattaactatattcctaaagagttccttttggatccaaggtatgctgctccagaacaatatattatgagcacacaaaccccgtctgctccttctgttccagttgcaacaactttgtctccagtcctgtggcagctgaaccttcctgacagattcgacatatatagcttgggtctcatattcttacagatggcattcccttcactacgaactgatagcaacctcatacaatttaatcgccaactgaaaagatgtgattatgacttacaagcttggaggaatctggtggagccacgagcgagtgctgagctccggaggggctttgacatcatggatttagacggtggtatcggatgggaactcctcacctcgatggtccggtacaaagcacggcagaggaccagtgctaaggccgcattggcacacccgtacttcaaccgtgaagggctccttggcctctccgtcatgcaaaacgtacggctgcaactgttccgcgcaacccagaaggactacagtgaagcagcgcggtgggttatcggcctcatggcaaggtcaggaactgaagatgtgggaggctttacagaagcacagcttcaagagcttagggaaataaaaccaaagaaaagcagcacccagcggaacgcgcttgcctccgtgctgcgcctgcagaggaagatcatgagaacgatcaaggagagcatggacgagctcaacagccagcgcaaaagcatctggtggagccggtggatacccagggaggagtaggccggccgcaggcgcacatgtacatcgtccacttctgtatgaaacgtcacctattagcactggtgaattggtgatagtataatacactatcctacttactgctttgtacatgctgacgactggggagggagaggagtcggcggcggcggcg

SEQ ID NO: 11617 - DNA, 1165 bp, Zea Mays
cggccagcaacttgacacacaattagtaaagtatgggatgcacttactggggatgagctacattcatttgaacacaagcatatagttcgggcatgtgccttctctgaggatacacaccttttactcactggaggcatggaaaagattttgcgtgtgtatgatatgaatcgtcctgatgcagctccaagagagcttgacaaatcacctggttccgtccgaactgctgcttggcttcatagtgaccaaactatattgagttcctgcactgacatgggtggagtaaggctgtgggatgttagaactggaaaaattgtccaaactcttgaaaccaaggcttctgtcactagtgcagaagtaagccaggatggcaggttcatcactactgctgatggctcaagtgtaaaattctgggacgcgaatcactttggccttgttaaaagctatgatatgccatgcaatgtggaatcggcttcacttgaacctaagtctgggagtaaatttgtcgctggaggagaagatttatgggttcatgtatttgatttcttcactggtgaagaaatagcttgtaacaaaggacatcatggtccagtccactgtgtccggtttgcaccttgtggtgaatcatacgcatcgggttcagaagatggcaccattcggatctggcagcttagcccggctaatgctgatgacaatgaggtggccaatgcaaatggcaagacaactgctggggtaaacgaagttacaaccaagatcgaaggcttccacattcccaaggaggggcagaccgaggggtaggatctcatgtgttttgtggtgcttgtggttcttattgcgaggagattgccatcagagctgcagtggtcattcagtttccctctgcggagtcatcatgtctgcgatccaagggtatcctggcttcatgagtcatcatcagcactggggaaaaacaagcaagcaaatggtggtgggtttttggatggggccctcgctttgatagaacatagcaattgtagcgtcaaaaataaacaagagttgggtagtttaggtaccgtgtttgcgttcattaaagtgaagtattctgtatcaccacaggtaaccttgattgtggtgactatttttttttgaatgcaaatcgattgctctctccaatctgaataaataggac

SEQ ID NO: 11618 - DNA, 1421 bp, Zea Mays
gcctctcaagctcaagggctcaaggccattagcgtaattacaaaattgtaattaattctcaatctcaaggttagtaacgtaattctagagcttccgagcagaaaaggtacggagtcggaaggatatgatcgcttaggagtgcggctagggttttttcttgtcacaccttccctcggtcccttccatcttctagccgccgccgccgccgccgctgcccaaaaccctacctaccctcttcttccccctcactctcctttcatctccattctaatggcggcccaacccgtccggcgaagctgctagtgcttgtatctactatcttcatcaggtacttcgccatcctactgaagtattccccgccgccgctgccatggccaccctcaaccctttcgaactcctcggcgccgacgacaacgacgacccgacgcagctgattgcggcggcggcggctgctgctcagaaagccgaggcgaagaagtccgccgtggcgcctgctgggaaggctgcccagcctgcggcgaccaccaagttcccgaccaagcccgctcctccctcgcagacggttcgggatgcacgcggcggtggctcatcagctcgtggaggctttggccgtggtgaacgtggccgtggcagaggtggacggggatatggccagaaccgtggcttcagtggtgacaatggcaatgagttccagggaggttatggtggcggaggctatggggatggtgctgtaactggtggatctgaaggagaaagggagagagagactcgtcccccgtaccgtggcggaggcagacgtggtggttacaggaatgttgagtttgctgatgactctgagaggccaccacggagaaactatgagcgccacagcgggactggccatggctatgagatgaagcgtgatggcgcagggcgtgggaactggggcactgccactgatgaacttattgcccaggatgcagaggactctccgaagatggaggaggctgctcctgttgctgagaaacaaggtgagcagaatgatgccccagcagcagatgagaacaaagataacaaggatgctactgcaaatgaggaggaagaaaaggaagaggacaaggagatgactctggaggaatttgagaaaataagagaggagaagaggaaagcactacttgcattgaaggctgaggagaggaaagttgaagttgacaaggatttgcagtctctgcagccactttcaaacaagaaagaaaatgatgaagttttcattaagctgggttctgacaaggataagaagaaggaaaatgctgagcgtgatgagcgtgccaagaagatctgaaattgtaagcgtgtgatttgagagttgagaccaagtattccgaatcttcaaccttgatacacaaactctgaacaaggggaaaaagcaaggggcagtctta

SEQ ID NO: 11619 - DNA, 1023 bp, Zea Mays
tacgtagacaatacactgagaggtgtggctgtgccggaccagtcaagcccatatggtgtccgactgctgatcaaggactacccctatgccgttgacgggctcgtcatctggtgggcgatcgagcggtgggtcaaggagtacctggacatctactaccctaacgacggcgagctccagcgtgacgtggagctgcaggcgtggtggaaggaggtgcgtgaggaggcgcacggcgacctcaaggaccgagactggtggcccaggatggacaccgtccagcagctggctagggcgtgcacgaccatcatctgggtggcatccgcgctgcacgcggctgtcaactttgggcagtacccatacgccgggtacctcccgaaccggccgacggccagccggcgcccgatgccggagccaggcagccacgactacaagaagctgggagcggggcagaaggaggcggacatggtgttcatccgcaccatcaccagccagttccagaccatcctgggcatctcgctcatcgagatcctctccaagcactcctccgacgaggtgtacctcggccagcgtgacgagcctgatcgctggacgtcagacgccaaggcgctggatgcgttcaaaagattcgggagccggctggtgcagattgagaatcggatcaagacgatgaacgacagtccggacttgaagaaccggaaggggcctgtggaaatgccgtacatgctgctgtaccccaacacgtcggacgttaccggcgagaaggccgaggggcttactgccatgggcattcccaacagcatctccatatgagcctgggcagattgtgtctcgtagtaaattgttgtgctgcgccgtgcgatgtgtttcttcattggttttgtcagtctcagggtaggggatggagatcataccatgatctttgtagggttgagagaggagtccacgcttgaatattgttgtcatgtatgtaattcttggttaataataaagttcgtcagttcatttcttagcctatcagtctccagc

SEQ ID NO: 11620 - DNA, 56 bp, Zea Mays
ccaagaaaagaagtcgccttgctaccgaaggatcgccttctgctccgactactcaa

SEQ ID NO: 11621 - DNA, 1215 bp, Zea Mays
cacgagaattccatcgccgcggtattaaaaagtccctcccacgccgccgccacctaaacctcctcactcctcagactcctctccgcacataccctccctacctcgccgtcgccgtcgcatctgccatgggggcgtacaagtacgtctcggagttatggagaaggaagcaatccgacgtgatgcggttcgttcaacgcgtgcgctgttgggagtacaggcagcagccggccatcgtccgcctcacaaggcccacccgccccgacaaggcccgccgcctcggcttcaaggccaagcaggggtatgttgtttaccgcgtccgtgtgaggcgtggtggcaggaagaggcctgtgccgaagggtattgtctatggcaagcccaagcaccagggtatcacccagctcaagttccagaggaacaagagatctgttgctgaggaacgggctggacgaaagcttggtggactcagggttctcaactcctactgggtgaatgaggatagcacctacaagtactttgagatcatcctggttgatgtggcccacactgccatccgcaacgacccaagaatcaactggctatgcaatcctgtgcacaagcatcgtgagctccgtggtctcacctctgcaggcaagaagttccgtggcctgcgtggcaagggccacactcaccacaagaacaggccgtcgaggagggccacctggaagcgcaaccagaccctgtccctccgccgctaccgttgagcacacacatcttgaattcttgatgctctgctaccgtggaacccgccccatgcagaccctttccctccgccgctaccgttgagcacacacatcttgatgctctgctactgtggaacccgccccatgcaggctctctgatagtatttggtatatttgtttcattgttaaattttgctacatgtgttacttttgagccccttgaactccgttgtctgtaccatggagcaagtgacgcgtacgagtcgatgaaaatgattgtttagtagtgcattgctgtgtattctgtctggcacgattgatttagggcatgtttgggaacacttctttcaaaaccacggtttatattaccatagtttaccgtatgttatgacatgaacatattgtattttacatcattctaattcaacatctgtttggagccgggaggagaaaggccaagacaaggaaggagaaaggggctagactgcgcctgcgg

SEQ ID NO: 11622 - DNA, 204 bp, Zea Mays
attttggtggagtttattggctagagttgattggtgggatgctgttggttgtacacagagtgctgccgaagatggtatagtttcacttaacagtgtgatagcttttctggatgcggacttccattctcttccgactatgcaacagaggcagcagcactgtcctgcagtggtggatccaggaatggatcaaaggaggggctgcta

SEQ ID NO: 11623 - DNA, 85 bp, Zea Mays
gtgatggtttggttcttttttttttttttttttttttttttctttttttttttttttttttttttttttcttttttttttttttc

SEQ ID NO: 11624 - DNA, 318 bp, Zea Mays
taatagctgctaggcagtgctattctttggcctatagcaagatgagtcggaaattggtttgggaggaaacgaacagctatggacactgggcgttggattattgtttacagccattgctgccgcttatgtaacgaggctcgcaaaggacgctgtaaaggagatcgacgactagaatggtaggattctctaggagaaagggccatctggatagtgtactagcctagcacattgtacatcactggcacctttggtgcgataaaatcttatagaaagccagagcaattttatgaggtaatgtgatctcttgttgttgtggtg

SEQ ID NO: 11625 - DNA, 137 bp, Zea Mays
cttacagattgtgtttcctcatgaacggtcaatggacgattagggcggtatgtatggttttgcctctttgcccacaaccagaagcgctgaaactgaacagggatgccatattccttggctacttcctcctattaaac

SEQ ID NO: 11626 - DNA, 209 bp, Zea Mays
cttgcctttgttgcagagaagaggcttcagatccctctatccaatacctagttagatggctcctccacttgatcagtagccactggagtagactcctccttcaaacaccacttcttctaggtgttctacaagtcaattacaaatacatgtatgcttatataatgatatgaaatgcaaactctcacaaggagaggtggggaacataaaca

SEQ ID NO: 11627 - DNA, 76 bp, Zea Mays
caaaattaggccatgttcttatttagtgaaccatgacccaaatttgattttttccgttatccctccacgaccaaac

SEQ ID NO: 11628 - DNA, 66 bp, Zea Mays
gtctgtcgcaatcggagtccggatgcatcttgggcatccattttagtgcagactggtcctaaaacc

SEQ ID NO: 11629 - DNA, 63 bp, Zea Mays
ggcatgtgaccagttaaagggtcctcggtcagcaggcctacatcgacaaagtccttaatcgac

SEQ ID NO: 11630 - DNA, 905 bp, Zea Mays
tctaaagcttagaagcgttattgtcagatgagatattccagcctaaggttatttggtcccttgctgatgtacaggcaacatgtggtacacttgctttatctacggcaacagtgaaattggtagcaccagatggagaggagaaaatagcatgttcagtcggaacaggtccagtcgatgcagcttacaaggctgttgacaaaataatccagattccaacggttctccgagaatacagtatgacatcagtcacagaaggcattgacgcaatcgcgacaactcgggttgttgtcactggagatgtgagcaacaacgccaaacatgccctgactggccagtccttcaaccgctccttcagcgggagcggggcatccatggacattgtggtgtccagtgtcagagcttacctgagcgccctgaacaagatctgcagtttcgctggcgccgtgaaagccagcagcgatgtagctgagaccgcaagcgtcccgagcacagaatgagcttccgtttagttcacagtgacatgttcaaaatttctggaaggatcttccattgagcttaggacaggcaggaagtcttggggcctatgtagtgtacaatttatgtgtgtcatatcccgtgctcgttgccagtttgtattgtaccatatataaaccatagaatatgttgccatttagaagtctggccaaggtcagctgtaatgattcacatgcttatagcctggaaacattagacattgaaaacccgagcggtgaataaaggatgcccaaggtagaaactgtgatgaatcatccatatcagtgttgtgatgccagcatgaatattcattcggcgaaccttacatgcggtcagccggacaacaccagaatcggaggcatgcatgatccacgtagcctagaatcttgttg

SEQ ID NO: 11631 - DNA, 191 bp, Zea Mays
ctcaccgtgtaatgaatgtctcgctcaaaagcttcagctatttttgctgctttgtaataccgatcacttggcttttcagctaggcctgatattataagaggtgttcttgcttcatcaataaggattgaatcaacttcatctatcacacagtaattgaagttcctcaagacaagttcatctacagtctgcaa

SEQ ID NO: 11632 - DNA, 630 bp, Zea Mays
agcgggcctctcccaaaaggtgcctcgtaagcccaaaatacgttttgagattcgcatattctcgcgatgggagcggaggaagcagagggtactcccccgccgctgcccgccaccggcgagcccgcaaccacggcaagggcgcagccaatatctgcagcacaattcctctcctggaagcagcgcaaggatgcagaggtagccgcaaggaaagctgaagcagctgagaagcgagctgatgatatcgcttcgggagcggcgcagatgaacggccgcgagctgttccaacatgagccctgggtgttcgacaacaacatttactgagatcgtgtcgggctactgttcctgcattagtccaagctccagcggtggtttcattttgtactgctatatcagctttgcgaaactgtggattttatttcaccgtttctaagattattctctcaataggtaattgaacttgtttcaaatacgttttgccaaatctttgtgcagtcaccgaatggtatctagtgtcgctattctttttctaaaactcttacaaacaaagagtattggtcggaagagaattctcgatcttcagattatcgttgttttcatctttcagttatcctattgtgaagtctgatgcaa

SEQ ID NO: 11633 - DNA, 992 bp, Zea Mays
ctgtgctatgagactcctttgattccattgtaaacccaaaagcagcggagtccctggctgatcctaatgagtacccaaacttatttgaagactggcagattgctctgaatgtagaagctgctgttgctccgaaaagggttatctatccaccggctgaggagtacatgattcatgctgaaaggtcaaatgagaatttagtggaagcttttaaaaacatgcatgtacaggaagagatggtgccagatgataatgaagagtatgttcacgaggttattgaagatggtggagtagaagagagtcaagaagatgctgttgaggttgatgcagaggatgatggagtagaagaaagtcaggatgaagctgttgaggttgaggctgaggattcaactgatggtgctgtccttgtgaatggaaacaatagtgaggaacagtgggtgctgactcctgagcaatagtggatcaacgggacagcaactttgcaagtggttaagtttgtaaaggttgctgactgctttctagagtacgaagtccattttctccagcagtattaagcatgagacgtgctctaggattggcttatccacatacgaagttggaccacaattaatcaaaacttcatcattgtgctcgataggaaattttgtgcttccttttttacatatagatcaggtctttaggtctcagaaaacttcatcaaaagtactcttgtttcaccgagatggaaatatgggatgtgattggtgatcggagtggtatttttacaaggtacatagagtagtagcttgtggaattgaggatgttttacatgtgatgtacatcggacttgggagctttgtatcaacagcatacgttttcaacagtctgtgtttagtttagtgaataatttgtgttgagctatgtttttgatgttgtgattgctaggctacttgtatagttgtgtatatccgactccgttgagaagctatctggccggagtgatagtgacagcggag

SEQ ID NO: 11634 - DNA, 76 bp, Zea Mays
cacgttcgttccttccacgatcgacggtcccgagtgctttcttcccccagctagcgcccaggttgcggcgccccga

SEQ ID NO: 11635 - DNA, 76 bp, Zea Mays
cgggaggaaaggatcctccataaaacttttgtgtgaacttatcgggaggggtttttgcctcctatggtttgtaata

SEQ ID NO: 11636 - DNA, 2106 bp, Zea Mays
ccgcgatcgccatcgcctcacgcactcgcatcctcccggtcccggactacccataaaaccaccgcgacggcgacgggtccttcgcttcgcctacggcatattcccccgaggccccgaaccaaaccaaaccaaaccaaaccaaaccagcccagatcagcgaaacacactccgctctcccgagaccggacacatggcggcggcggcggtgacgtccaacggcggcgcagtggccgcaaatgggccggcgcccggccggctggcctccgtgtacagcgaggtgcagacgaaccggctcctgcacgcccttcccctcccctccgtcctccgctccaacttctcggtcgtcgtcggccccgccagctccgccgcgggcaaccccgatgagatcgccaagctcttccccaacctgttcggccagccctcggcgtcgctggtgccgtcggccgagcccgcggcgaccaggccgctcaagatcggcgttgtgctctccggtggacaggcgccgggcggccacaatgtcatctgcggcatctttgactatctacaggagcgtgcaaaaggcagcaccttgtatggatttaagggaggcccagctgggatcatgaagtgcaagtatgtagaactcacttcagactttgtgtatccctacagaaatcagggtggatttgatatgatctgcagtggaagggacaagattgaaacaccggagcagtttaagcaagctgaagacacggccaacaagcttgatttggatggacttgttgtcattggtggtgatgattcaaacaccaatgcctgcctccttggtgaatactttaggtcaaggaacatgaaaacccgtgttattggttgcccaaagactatcgatggggatctgaaatgtaaggaggttccgacaagctttggatttgatacagcttgcaagatatactctgaaatgattggcaatgttatgactgatgcgagatccactggaaaatactaccactttgtgaggcttatgggtcgtgctgcttctcacattacgctggaatgcgctttgcaaacacaccccaatgctgcactcattggggaagaggttgctgcaaagaagcaaacccttaagaatgtcacaaactacattactgatatcatctgcaagcgtgcagatcttggttacaactatggtgttatccttataccagaaggcctgattgatttcatcccagaggttcaaaaactcatcgcggaattgaatgaaattttggcacatgatgttgttgatgaggcaggggcctggaaaagcaagcttcagcctgaatcaagggagctgtttgagtttttgcccaatactattcaggagcaacttatgcttgaaagggatccccatggcaatgttcaggtcgcaaaaattgaaaccgagaaaatgctcattagcatggtggaaactgaactggagaagagaaaggcagaggggagatactctgcacatttcagagggcaagctcatttctttgggtacgaaggaagatgcggccttcctactaattttgattctaactattgctatgcattaggctatggcgctggtgcccttctccaaagtgggaagacaggacttatttcctcggttggcaaccttgcggctccagttgaagaatggactgttggtggaacagcattaacatcactgatggatgttgagaggaggcacggcaagttcaagccagtgatcaagaaggctatggtcgaacttgatgctgcacctttcaagaaatatgcatcgatgcgtgatgagtgggccctcaagaacagatacatcagccctggccccatccagttcagtggccctggaagtaatgactcgaaccatactttgatgctggaactcggtgctgcgctatagagatgcgtcctttactttgttcttacagtttttgggagtggagactggccactggagcagcctgcaggtctccatattgtgtgtgaaattgtttaataagaggtttgatgggagttttttgcgtagccgactggatgtagtagcaaaataagaacagggttttttagttttttttttgatagtagcacacactgtagattgcaaaatgtattccttggttt

SEQ ID NO: 11637 - DNA, 466 bp, Zea Mays
ggacggctgccaccgcggcccggatgtttccctgccaccataaatgcgccgcggccgtcctcgctgcccaacccttcgctgcgccgccgcctccgacatcgtctcttcgtccccacgagcaaccgataatccgccggcgctgagatgttggtttatcaagacctcctatctgtgggtcacccaaggtcctgttgatgtagacattggtgccaatccatccgccgagggtggtgaggatgaaagcgttgatgacacagccgtgaaggtggttgatattgttgacacattccgtctacaggagcaacctccttttgacaagaaatcatttgtctcttacataaaaaaatacatcaagaatctcactgctgtgttggagccagagaaagcggatgagttcaaaaagggtgtcgagggtgcaaccaagtttctccttagcaagctgaaggaccttcaatttcctttttaa

SEQ ID NO: 11638 - DNA, 72 bp, Zea Mays
ttgagtctaaatctttgaagtggccaggttttggagtttgacaatataaatgtaaaagtactaatatattca

SEQ ID NO: 11639 - DNA, 1605 bp, Zea Mays
ttcgtatttcatttgtttgtgtgttgcgaagcggttggagttctttcaattatcaggatggaaatgttttttggcagctttctcagtgaatcagtatcaccgcagaaccttttcggacacccggatgttgagaaatgcccattcctgaggaatatcaatggagctacaaccttttccctcgcttctgctttgccagtagctgctcaaggaggcaagggtccaatttttgaggaagggtcaggctttgagtctgcattcaagcttttccatggccgagatggaatagttcccctttcagaaagatcatatgtatctgatgaaaaccacaatgagagcattgatgtcaggactgaacctgctctgccgtttaatccattggctgctagagcagccacaataagtctatcagcatttggaccatttggttttggctttttcaacggcaagggcaaaaggcagaacaagaaacccaacaatctagatcagtcccaccagaagcccaagacaccagatcagtcttccatgaaacaaaaaggagtcaacccaccatcacatgaggcattcagcgatgagtggttggaaaatggccagtgcccacttgcgcggtcttaccgggcaatgagtggtgttttgcccctcgttgccaaggccttacagccaccagctggtatgaagctgaagtgcccacctgctgtggttgctgtccgagctgcccttgcgcgaactgcgcttgtgaaatccctccgaccacagcccctgccctcaaagatggtagccattgcactactggggatggcagcaaacatccctcttggggtgtggcgggagcacaccaagaagttctctcctcagtggtttgcagctgtccatgccgctgttccgttcattgcaatgctgaggaagtctgttgtgatgcccaggactgcgatggcattcaccatagcagcctccattgttggccagacaattgggtcaagggctgagcgcatccgtctaaggaatcaggcggcaaatggtactggtgattcttcaacgcacactgctatgtatccaaacaagaatgggcattgcagcgacactgaaggcaaggcatgggaccctcttgcgacgaagataacaggctcaactgctaggggttctcctgcaccaaccccaagcgtgtgcttctgattgtgttaagcatgtgattcacgcacacctgtgaagagattatacatgaaccagtttatcttatagtgccatgtaattgccttgtgtgtcccagaaaactgagctgcccgtgtgcgataagtagaataagaggtgctaccccactgtttgctgtgttgctatggtcgagattgatgtattgatgctgctgcatttctttctttttgttaatgtgtggtggcgtttctcgcttctgtaaagcagctgaagctgtcacatcatttgatcagttgaagctgtatgttaccatgtgtgtgccatttaatgtttggagttatgaaatgaggcacatgtctcgaccctgaaataacatatagttcttctgcactgtgagaatgctgccctctgttcatgtctatattttagttcaaggcatcacgttcacgtgtaggcagt

SEQ ID NO: 11640 - DNA, 2212 bp, Zea Mays
ccaacccagaccaaatccaccgtttcgttgctgttctattcgggtacagaacacccattggtttggaagccatcaccaccaccacctataataaattgcacgagatttgccgcgagaccgcatctccatcccgcatcgcgcatcgcatccaccgccgagcttgctttctttctttcttttttctgggagaagaggaagaagaggggaggcgcgacaaaaagggcgccgcgccccgccccgccccgcatcgcccccgacgccggcatctctccctcgctctccttctcccgatctgatccgaagcgcggcggcgtcgacgacgacgacctaagggcacgatgcattcgaccaacctgctgctggaggagcccatccggatggcctccatcctggagccatccaagaccagcttcttcccggcgatgaccaagatcgtcggcacgctcggccccaagtcgcgctccgtcgacaccatctcctcctgcctcaaggccggcatgtccgtcgcgcggttcgatttctcgtggggagacgccgcctaccaccaggagacgctcgagaacctcaagctcgccatcaagtccaccaagaagctgtgcgctgttatgcttgacacggttggaccggagctgcaggtggtcaacaagagtgaaacccccatctccctcgaggagaacgggactgtcgtgctcacgccgcatcagggccaagaagcctcctccaccttgctgcccatcaacttcgatggactcgccaaggctttgacaccaggtgcaacgatatttgtgggccaatacttgttcactggtagcgagactacttcagtttggttggaggtttctgaagttaaaggagatgatgtggtttgtatcatcaagaacacagctaccttggctgggtcgctcttcacgctgcattgttcccagattcatattgacttgcccacgctgtctgatgaggataaggatgttatcaaaaaatggggtgctccaaataagattgacttcctctctctgtcttacacaagacatgcagaagatgtgcggcaggcacgtgagttcctctcgaaattgggtgatcttagccaaactcagatctttgccaaaattgagaatgttgagggcttgaaccattttgatgaaatactggcagaggcagatggtatcattctgtcaagaggaaaccttggaattgaccttccacctgagaaggtctttttgtttcaaaagtctgcgcttcacaagtgcaacatggctggaaagcctgctgttgttactcgtgtcgtggacagcatgactgacaacctcagacctactcgcgcagaggcaactgatgtggcaaatgcagttcttgacgggagtgacgccattctccttggtgctgagactctccgtggtttatatccagtggagactatttcaacagtgggcagaatttgtgctgaggctgagaaggtattcaaccaagatttatactacaagcggactgtgaagtatgtgggagaacctatgacccacttggagtctattgcttcttcagcagtgcgagctgcactcaaagttaaggcatcagtcatcatttgcttcacctcttctggacgagctgcaaggctcattgctaagtacaggcccagcatgcctgttttgtctgttgtcattcctcgtctaaagacaaaccaactgaggtggagtttcacaggtgtttttgaggcaagacaatcactcatagttagaggcctcttccctatgcttgctgatccacgacacccagctgaatctaccagtgctacaaatgagtctgtgttgaaggttgctcttgaccatggcaaagcctcgggcgtgatcaagtcccacgaccgcgtcgtcgtttgccagaaagtgggtgattcctctgtggtgaagatcattgagctggatgattagacaatcaggctatgctgttgtctactagggcacgtttttgccaatttttttgcctaggccgaaacttattggctatgtataatcctatagcgcttgaaaactgagcagtttttcctatggtgacatcataggatttgcttttacagttccaattatggtgtagttcgaaatttgctcgactaaactgcggtgtaacagttaaatgggcagatggaataatgtaatcatactgttccctcgttaggttgtcacttgaattgatgatctgggcttttttttttggttaaaaa

SEQ ID NO: 11641 - DNA, 1093 bp, Zea Mays
cataccatgcctttggaatgcatctgatgaaattttgaaataatgagggaattaggtgtcagctgggatgttgaactgtatggagaattgctcaggataggtggtggaaaggaaaggatgacagcttacttcaaccagacaggatggccggctaaagcaccaaagacagatgacaaaagaaaggagttcatagcttctcttcacaagaggaaaacagaattattcatggccctaattgagaaaaagttgcttcctctccgtccaggtgttcaaaggttaatcgatgaagctttaggaaaggcagttaaagttgcagtgtgcagtacatcaaatgagaaagctgtttcagcaatagtgtcgtacttattggggcctgatagagctgataagattaccatatttgctggagatgtggttcctcacaaaaaacctgacccagcaatctacatattagcagcaactacacttggagttgatccacaaagctgtgttgttattgaagacagtactatagggctcgcagcggcaaaagctgccggcatgaagtgtatcgtaacaaaaagcggaagaggacttcgagacagcagatgcagtgttcgattgcattggtgacccgccagaagtgcgcttcgatttggatttctgcgccaagttgctcaagaaacaatatgtgagctgaaagggggctagtgcaagtgatataccaagtacgaggttcctgaatatggagaaagagtccatggcatgccaatgttggttcttcaagccatgacctgatactaggacttggaagtccacgttctacccaatagtaacttatagaatgacattcactactgcccacccagttggcagttgcaaatgtgttagtcattcaacaaattggaaaccactcgaataagggatcaccaagtccaaactcttcagtcaaagcaataacaattgaggttacgagtcgaaaaatatgtaaggcaatcaaactattataagtgggtgtttgaatgtactagaactaatagttagtggctaaaattagttgagacatccaaacaacctagctaatagtttagctattagctgtttttggtaaatt

SEQ ID NO: 11642 - DNA, 67 bp, Zea Mays
atagattgcgatccgtttctgagcttcgagggatcaaagatcgagcgttggcgaccaagtgatccag

SEQ ID NO: 11643 - DNA, 1598 bp, Zea Mays
catgccataaggtggtatttacctgacttcgaacatggttcaatcaaggatgattattgtgggggaagctcaggatacaactcggaattactgaagatcatggaaactaaccaatctcccccttgcaagcgaccgcggagagatcgaaaccgtgaaaaggcaccctcctcaaacaaaattgaagtcatggaacaagagatatggagagatttccctgaagatcttttcgaaactgtcatagcaaggcttcctgttgctgcaatttttcgattccgcactgtctgccgaaggtggtcttcccttttgggctcagacagtttctctcgtcagtactctgaagctccacatggactgccatggttctatacaatcactcatgagaattcaaacaacaatgttgcgatgtatgatcctttgctgaagaaatggcaccaccaatctgttcctctcaatcatacgaagatagttattccagtggcatccgtgggtggccttgtatgtttattggatctgagccacaggaatttttacatctgcaaccctcttacgcaatcactgaaggagatcccaccaagatcagtccatggttggtcaagagtcgttgtagggatggtgttgaatggaagaagttctagtgatggctacaaagtaatgtggttagatattgatgggacttgcgaagtttatgactctacaaagaacgtgtggtcttgccctggaacttttcctccaagcatcaaacttccacttgctctaaatttgaggtcacaaccagtggcggttggcagcatgatatacttcatgtgcgcagaaccagatggtgttttgtcatatgatgtaagcaccgggatttggaggcaatttgccatcccactgccactgcatctgactgatcacacacttgccgagttccagggaagggttatgctggtgggtctgctgtgcaaaaatgcagcgacctgcatctgcatatgggagttgcagaagatgactctcctctggaaggaggtggacagaatgccaaatctctggtgcttagagttctacggtaagcacatgaagatgaaatgcctgggcaacagtggtttgctcatgctctccttgaaggcgaagcatatgaaccgccttgttacatacaaccttttgaaaagggagtggcagaaggttcctgattgcatgctaccatggagtcgaaaaaggcaatggataacatgtggcacagcatttgatccggtcccctgcgccttggtctgacatggaattttaccttctttgtctgagcactataatattttagtcctttcatatcattggcctatctttagatctttctatgttgttgtgacaagttctgcgaaaacgcattactgtggtttgctttgtataacgccgccgaaacaatcgaacggtttcctttatcacctgctgttctgttaagcttgtaatctttctgaacgtgcagttacctgcccagagctgagttcattatacaataaataccgggatgttaatgtttggactctggtgcatggagatgcagtggtgcttgttattaccatgaaaataatgtttttaattattgtgcatggagatgtacg

SEQ ID NO: 11644 - DNA, 881 bp, Zea Mays
acccaatccacagcacgagcgtgtcaaacgttatccggttcaaagccgagcggcgtctcctctctccagcggctccagccaatccggcaatcccgctcccccagctcgctgctcgcccgctctcctccgccctccgccatggcggccttcccctccgcctccccgtcgccggcgatctccgcctcgacctggagcatggcttccctccagaactcaagctttgagcatcggttgtttggtattgatgcccgtggaaggatagttgcgatgcgacatgggagacgcgttcctaaacttaacaggcctccggatcaaaggaaagcgctgttgcgtgggcttaccacacagctgctgaagcatgggaggataaagactacaaagccaagggcaaaggcaatgaggaagtatgtcgagaagatgatcacgttggcaaaggatggatctcttcacaagaggagacaggctctggcatttatttatgagaagcatatcgtccatgccttgtttgctgaggttgcagacaggtatggagaccgagaaggtggctacacaaggatcatcccgacgttcccgaggcggggagataatgcacctatggcgtacattgagcttgtttaggattttccatcggttgctgtggtttcattggttggtgccatgcaggctgagtggtcatgtttgcgcattgccgttcggagatctgtttttttttccctttccttatcaagttgttctgtaccaaagtgtagatcacgcgtgaaatttggaactcgtcaaacttcgttctgtaattgacaaggcgccattatataatctggaaaataagttcgtggcctcacataaaaaaaagaataattatatacatgacattcaaaatttac

SEQ ID NO: 11645 - DNA, 368 bp, Zea Mays
ggctcgaaagttacatggtgacttatcagagctggacaagagaggtttaggaccttgaccagctcttactacagaggggcacaggggatcattatggtgtatgatgtcagtcgacgagagacgttcaccaatctttctgatatatgggccaaggaaattgacctgtattcaaccaaccaggactgtgtaaagatgcttgttggaaataaagtagacaaggaaagtgagagggctgtcacgaaaaaggagggaattgaatttgccagggaatacggttgtttgtttctagaatgcagtgcgaaaacaaaagtaaacgtagaacagtgttttgaggaactggttctaaagtattggcctgtatgcacgtt

SEQ ID NO: 11646 - DNA, 1283 bp, Zea Mays
cagtcttacttggtttgtgctgcttgagacctacatgttcaagtacgacaccgtccacggccactggaagcacagcgacatcacactcaaggactccaagacccttctcttcggtgacaagccggtcaccgtctttggcatcaggaaccctgaggaaatcccgtggggtgaggctggcgctgagtatgtcgtggagtccaccggcgtcttcactgacaaggacaaggctgctgcacatctcaagggtggtgccaagaaggttgttatctctgccccaagcaaagacgcacccatgtttgttgttggtgtcaatgaggacaagtacacctcggatgttaacattgtttccaatgctagctgcaccacaaactgccttgctccccttgctaaggtcattcatgacaacttcggcattgttgagggtttgatgacaactgttcatgccatcactgccacccagaaaactgttgacggaccctcagccaaggactggagaggtggcagggctgccagctttaacatcattcctagcagcaccggtgctgccaaggctgttggtaaagttcttcctgatctgaatggcaagctcactggtatgtccttccgtgttcctactgtggatgtctcggttgttgacctcaccgtcagaatcgagaagggggcctcctatgaggatatcaagaaagctattaaggctgcttccgagggtccactcaagggtatcatgggttatgcggaggaggatctggtttctaccgacttccttggtgacagcaggtcgagcatcttcgacgccaaggccgggatcgctctgaacgaccacttcgtcaagctcgtctcgtggtacgacaacgagtggggctacagcaaccgcgtcgtcgacctgatccgccacatgttcaagacccagtagaggggttttttccccctgcttctcatggatggttgctgcttgtgtatgccgagaataaatgtggatggcgcgtgcctctgggtcgccaggttcatgctgagtctggacatgttttgcacttttgcttcccttcctgctaccatctgtgacagaaccgctcgctaatatgggacctgagattagctttttgctgcttgtggtgaggttgcagttttgttctgtgtttctgtgttgttagcaatcctatgattcaggtgttcgaatgaagaagataggctgctgcagaggaattgggtgttagctctttcttacccagttggaactgtaaatagtaattaatgaagaaagtagatgtcgcgtacctggtagc

SEQ ID NO: 11647 - DNA, 272 bp, Zea Mays
  misc_feature (271)..(272): n is a, c, g, or t
cgatgactgaggttcagcggtgtttctactactgctgctagctcatcagccaccagcaccacaactcaagcaacttcctcagctgttcaagtcagcagcacaggtccgactactactacatctatcactccagcagcatcccaagcacctaagctaccatcagaaattgttggcaaaaatgttgaggagattattagggactggaacaatgagcttcaagaccgtactgcaaaattcaggaaacatgccaccgcaatagctgaatgggatnn

SEQ ID NO: 11648 - DNA, 1010 bp, Zea Mays
gtacagtgattcttagagaagttgcacaaatttaaactggtacacatcattttcccaactattcccactattggggtttggtaatctgcctcagctggtgaaggtggaggaaatatcacaaaccattgattctgagaacttcacagtgcaaaactgtatcaagttttcaggacctttggctacaacctcagttgccactaatgcaaaatttgaaattagaagccccaagcgtgtgcagatcaaatttgatgaagggattgttggtacaccacagttgaccgactccattgtgctaccagagaagtttgagttatttggacagaacatcgacctgagtccactgaaaggcatattttcttccatcgaaaatgcagcatcctcggttgcaaagaccatatctgagcagcctccgctcaaaataccgatcaggacaaacaatgctgaatcgtggttgcttacgacataccttgacgaagagctcaggatctccagaggcgatggcagcagcatctttgtgctgttcaaggagggaagtactcttctatactgagatccaaatcccgagtccatgatcgttgaagctgaaccgtgaagtagttatactgcttatgcttttctttcttatagtaatatgctccgtctcaaaataagtcaatttctagaatcacttaaagtcaaattatcttaagtttgaccaattttataggaaaggcaccatcgtctatgtctctatgacaccaaatgagtacattatgaaaaatattttatggtgcattagtgacactaattcagtgccatgctctttttatgaatttggtcaaacttaaaaatagtttgatttaagataactctgagaaattgatttattttgggacagagagaatgtttctgggttgtcttgtaaatacagttcttgtcattagagtatatgatgactaggaccggtttaatccgaattatataaactctctatatatcagcgaaccccttttttatagttaactgatcgc

SEQ ID NO: 11649 - DNA, 780 bp, Zea Mays
ctagaggttcactggccgtaaaattgatgatccagagttgttagaagcagttcgactgacgatcattaacaacatgatacagtatcatccagagtccagcagtcaattggctatgggggcaacttttgggccagaagcccctacggaagaggttgatgtggatatagcaacccacatagatatctatgatgatggccctgaaagaagcttacttgtggtggaaacagcggatcgtccagggttactggttgaccttgttaagatcatctcggacatcagcattaatgtccaatctggagagtttgacactgaggggctcctggctaaagcaaaattccatgtcagctacaggggcagaacactgaccgaggctttacaacaggttctttgtaatagcttgcgctatttcttgaggcggccgacaacagaggacgccagcttctagccagatagatgatcatgaagcctcccaactttcttatgtggtggtattcacatgaattgaataccatcgtcaaagcatttgaaacacgcacaataatttgttaagatggggggaattgtacttgatgttatggcaccacaccaattcgaagtattttttgttccaaggcacgggaatctgttgtatccaagtgcagaagattgctattcttaatcatgtaataacacattattattttgctacttgggatacaccgtttggtggtaaataagatggaatattgtgggggcccatcatcccgtgtatcatgcaaataccgtctattgtcagattaa

SEQ ID NO: 11650 - DNA, 2278 bp, Zea Mays
cgtgattacacgaaaatcccgtgcacacccctctgcgccacctcggtataaaatgacaagtgttgtcccctccgccaactcaccgaaccaaacaacacacgtcaaagcggaaaacctcagaaaaccacaataaatcatcctcgtccaccactgcccccgctctgctgcaactccactcggcccggccgccctttccacccaccttgatcctctgatccgttggtgcttgaccgatccatggacacccatatcggatccgtgaacggggcggcgtcgaaccagacggttggctgcccggcgtcggcgccggggtgcccgatggcgtccacgccggcgcagcccgcggcgaccctgtcggcgggggaggcgtcgctggggcgccacctcgcgcgtcgcctcgtgcaggtcggcgtcaacgatgtattcgcggttccgggggacttcaacctcacgctgctcgaccacctgatcgccgagcccggcctgcgcctcgtcggctgctgcaacgagctcaacgccgggtacgccgccgacgggtacgcgcgcgcgcgcggcgtcggggcctgcgccgtcacgttcacagtcggggggctcagcgtgctcaacgccatcgcgggcgcctacagcgagaacctgcccgtcatctgcatcgccggcgggcccaactccaacgactacgggaccaaccgcatcctccaccacaccatcggcctccccgacttctcgcaggagctccgctgcttccagaccgtcacctgccatcaggcggtggtgaacaatctggatgacgcgcacgagcagatcgacacggccattgccacggcactgagggagagcaagcccgtgtacctcagcatcagctgcaacctccctgggctgcctcatcctaccttcagccgcgacccagtgcccttcttcctcacccccaggacgagcaacaagatggggctagaggctgcagtggaggcaactgtcgaattcctgaacaaggcggtgaagccagtccttgtcgccggccccaaactgcgtgtggcaaaggcaggaaaggcatttgtcgatatggtagatgccagtggctatgcctatgccgtgatgccatcggccaagggtcttgtgccagagactcacccccacttcatcggcacctactggggcgccgtcagcaccgccttctgtgcggagattgttgagtccgcagatgcctacctctttgcaggccccattttcaatgactacagctctgttggctactcattcctcctcaagaaggaaaaggccatcatcgtccagcctgagcgtgtgatagtggggaatgggccggcattcggatgtgtgatgatgaaagagttcttgtctgaattggctaagagggttaataagaacaccactgcctatgagaattacaagaggatctttgtacctgagggccagccgctggaaagcgagccaaatgagccactgcgagtgaatgtgctcttcaagcacgtccagaagatgttgactggtgatagcgcggtgattgctgagactggtgactcctggttcaactgccagaagcttaagctgccagaaggctgtgggtatgaattccaaatgcagtatggttcgattggatggtcagtgggtgcattgctcggatatgctcagggtgcgaaccacaagcgtgtgattgccttcattggtgatgggagcttccaggttacagcacaggatgtgtcaactatgctgcgatgtgagcagaacagcataatcttcctgatcaacaacggtgggtacacgattgaggtggaaatccatgacgggccatacaacgtcatcaagaactggaactacactggctttgtggacgccatccacaatggcttgggcaagtgctggacctccaaggtgaagagcgaggaggagctgacggctgccattgagacagcgctaggggagaagaaggactgcctgtgcttcatcgaggtgatcgcgcacaaggacgacaccagcaaagagctgctggaatggggctctagggtttctgccgccaactcccggccaccaaatcctcagtagaagtcccgcaggctccaagcctcggagtgccagtagtgatagtaagctgtagcacggtgggggctcaaccgaataacgtgaacgcattgccctttctgttacgtgttttattttattgtgtttctgtggtcgtatatctgttttgtgacgtgttccctgcttctcccatgtgaattccagaagaactatgagaaaattcaggttggttgtaaaaaaaaaa

SEQ ID NO: 11651 - DNA, 1621 bp, Zea Mays
catgtgggccctctctgcgaacctcgccagcactaatcgagccgccactggcagcatctgaagagaataaaagacagccccacacgcagctcgaatcccggcacgtgagcggcggaggcagggacggccatggcatgcaaggagctggggctgtcattcacagccatggaatagagacttgcatcgcaacaatgctcatccctggtgcaaaggagttcagagtgacccacatggaaatgatcaaaggaatcaaaggtcatggctaccatgatgaattggtcattcctattattgagaataccccttatgagtatgagctcactgactccctaagtgaggcgattgcagcatacccaaaggcaactgctgtgcttgtaaggaaccacggaatatatgtatggggggagtcttggatcaatgccaagacacaggctgaatgctaccattatcttttagatgcttgcatcaagctctatcagctaggtattgattggacaacccctgaacatggttcaataaacaatccaaggagaccgcacagcattttgagccctgaaatttgtaatggatgtcatgctgctgattcatcaaagtgtgttgtactagacattgaggggacaaccactccaatatcatttgtgactgatgtcatgttcccttatgctcgtgataatgtacgaaaacatctgacttctacatttgactttgaggaaactaaagaagacatcaaactattgcgcatccaaattgaagatgatctacaaaatggagttgctggggctgttccagttccacctgatgagggtggcaaagaagaggttatcaattcattggttgccaatgttgaatcaatgattaaagcagaccggaagatcacatcattgaaacaacttcagggtcatatttggaggattggatttcaaaagaaagagctacagggagttgtctttgaggatgttcctgtggcgctaaagaactggcatgctagtggcataaaggtctacatatactcaagtggaagtagagaagcacaaaggcttctatttggcaatacaacatacggtgacctgcgaaagttcctgtgtgggtattttgataccacaactggaaacaaaagagaaacaaggagttattttgagatctctcagtcactgggcgtggacagtccatctcaaatcttattcatcaccgatgtcttccaagaagccattgctgctaaaaacgctggttttgaggtgataatctccattcgcccgggaaatgccccacttcctgacaatcatggtttccgcactatcaaatcattcagcgagatctgaggaatctggtgatctggacatgtctagatatatgtaattcgcgagtgctttagcccgcgtgccagttcatgcagtagaagcattatagcaccgcagcatggcaaaacgatgtgacgtaacaataagttacatggcgaaataaaaactttggttcgttgtgtatttgtggctcatctacaattggatagtttgcatttccttgttcagcatctgtaggttgtggctgtgatcatttttaggtctcgtttgacattgcttaacttcacgtaaatcagttttttagcttcagctgttttggtgaa

SEQ ID NO: 11652 - DNA, 83 bp, Zea Mays
ttcaagttcttggtcctgtgtacagtgctgacctctagcttcaccaagttcccagtctttcatgcaaagaagcatctctacca

SEQ ID NO: 11653 - DNA, 439 bp, Zea Mays
tttccacgtgtggctttatgaggctcaactggcagtataagggtaccggtgggaagagcatatatggacgcaccttcaaagatgagaacttcaaattggttcacactggacctggagtggtcagcatggctaatgctgggccgaacaccaatggcagccagttctttatttgcactgtcaagacaccttggttggacggaaggcatgtcgtgtttggccaggtcctggaagggatggatgtcgtaagtctgatcgagtcgcaggagaccgacagaggtgaccgcccgaagaagaaagtagtcatcagcgagtgtggggagcttccagtggtctaagtgttactcatctgttgtcggtcttacctaacctcggatggatggcgatatttcccccacctgaacttgtcgtgctaccctccccctccccacccccctaccct

SEQ ID NO: 11654 - DNA, 61 bp, Zea Mays
ccggtttcccccttctcagacaccggcgagcaagaattctccgcgctccgtggccagccgt

SEQ ID NO: 11655 - DNA, 1599 bp, Zea Mays
gtttgtcctcggttggattgctaacaccgttgcacatcattgactggaagctgatgacaaggagaaaccaacacatttgagatttctagtgtctaatacggcagcagggtgcatcattggcaaggaatcatcatggtttctggactgtttgatgaagtaatgaaggccatggagctgattcttgagaaactgttggctgagggtgaagaattcaacgaagcagaagctagacctaaagttagacttgtagttcctaatagctcttgtggtggtataattggtaaaggtggagcaacaataaagtcgtttattgaagaatcacatgctggaatcaaaatctcgccacaggataacaactatgttggtttgcatgataggcttgttacaatcacagggacctttgataaccaaatgaatgcaatagatttgatactgaaaaagttatctgaggatgttcactatccacctaatttgagctccccatttccttatgcaggccttactttcccaagctaccctggtgttcctgttggttatatgattccacaggtgccatatagtaatgctgtgaactatggacctaataatggttacggaggaaggtatcaaaataacaagccaactacacctatgagatcacctgctagtaatgaagcccaagaatctttgaccattggtatagccgatgaacacattggtgctgttgtaggtcgagcaggaaggaacataacagagatcattcaggctagtggtgctcggatcaagatatcagataggggtgactatatatctgggacatctgacaggaaagtgacgattactggaacacccgaagctatccggaccgcggagtccatgatcatgcagagggtgtcagccagttcagagaggtgatgagccccttctgaaggaagggcgtaggccattgctgtgtccgagcacagcagcgtgtttgatgcaagttaggaggatgtgggaactgctttccttttattttccccccttttttcttttttcctagcaagctcgagcagaaaaaagaaacaagctgttattgtttgttgcattgcgtccaaccgatggttttatgttagtataaactgctagtcgaagataattaggtgcagcgtttgaattgatttgggtttacggttgagttatatcccgtgtatgccataacaaaggcagtcgccgctctgttgctagtggcaagcgctgcctgtcctgtgtctgtttgtacgttgacaatttgattccgttgctcaaggatagaagaatattgatacaggagacccgaggactggtttggtttttgcagtgcttttgagtcgtgtgtgtagatctgtgctactgaggtgctatcttttacgtgatcaggaagagtatcggtggaagctttcaggtgttccattcacccatctgcgtgttgcgggtctcggcggttggcgaccgagcgtgtttgcctgcagtattgggaaacctgtctgactgagacgtctggctggatcgagctgcctggccgcggctcctatcccaggtcaagacaacgactaaacagcaaaaaccattaaatggatgtactgtgcaaaaaaaaaaaac

SEQ ID NO: 11656 - DNA, 1515 bp, Zea Mays
gtgggcagcagccactcgctctccccacctcgtctctcttccactcatcccctccctcgccccttcgcctcgcctctcttcttcggatcgagcagcagtactgcactgcatgccgccgatacaaatcccatcctctccctcctctactgcacctgcaccacagtagctagctagctatctttgctacggcggctctgtaatctggtccactagcgctccattcgaccccacccacagccatggctgccgtgaccgcggcggccgtctctctgccctcctcctcctcctcccctgccgccgccaaggccaaggcggagccggtcaagaagctggagaaggtgtccaagaagcaggaggaggggctcgtcaccaacaagtacaagcccaaggagccgtacgtcgggaggtgcctgctcaacaccaggatcaccggcgaccaagcgcccggggagacgtggcacatggtcttcagcacagaaggcgaggtcccctacagagagggccagtccatcggcgtcatcgcggatggcgaggacaagaacggcaagccgcacaagctcaggctctactccatcgccagcagcgccctcggagatttcggcgactccaagacggtgtcgctgtgcgtgaagaggctggtctacaccaacgatcagggggaggtcgtcaaaggagtctgctcgaacttcctctgtgacttgaagccaggcgctgaggtgaagatcacagggccagtgggcaaggagatgctcatgcccaaagaccccaacgcaacaatcatcatgctcgcaacgggtaccggcatcgctccgttccgctccttcttgtggaagatgttcttcgaggagcacgaggactacaagtacaccgggctggcgtggctgttcctgggcgtcccgaccagcgacaccctgctgtacaaggaggagctggagaagatgaaggagatggcgccggacaacttccggctggacttcgcggtgagccgggagcagacgaacgcggccggggagaagatgtacatccagacgcgcatggcggagtacaaggaggagctgtgggagctgctcaagaaggacaacacctacgtctacatgtgcgggctcaagggcatggagaagggcatcgacgacatcatgctcgacctcgcagccaaggacgggatcaactggttggactacaagaagcagctcaagaagagcgagcaatggaacgtcgaagtctactgatgatgatccttcattgtattgttcagctcaagcaatctggtggtgatgagtttgcattgcattgtacgtagtattgcggagatcaatcgaatcgtttggctcgtcgtcattctatcgatgtacatacattatatatgatgaaagacatatataatcgtttctttcaggaatttgttgtctctctgcacgtgaatttgttgcgagaaagaaaggacacacattagccttttctttattagggcaattatgaattatacccttctctgattctgattttacttttttc

SEQ ID NO: 11657 - DNA, 55 bp, Zea Mays
gccttggacggagtttaccgtccgatttgggctgcattcccaaacaacccgactc

SEQ ID NO: 11658 - DNA, 824 bp, Zea Mays
gctgaagcaaagcaaaagcaacgaggagtggagaaaaaaaaaaaagaggcgccgcagcgaggtcgaggtgattattatttaggcacaaggggcgctgtccggaaattccccaaatcgacctgggctggacccagccgcgccccgtctgcctcctgcttctctctccgcttccgcttcctgcgcctccaggctccacttctccgctcggcagtcggcactggaaggacagcatgtcggtctcggcgtcgtcaccggcggcggcggcgggcgatgagaagcaggaggcggcgcccgtcaggcgctgcaagggcgtcaacgacctcgacaaggtcgttctccgcgaggtccggggcagctccgcagaggtgtacttgtatggtgggcatgtgacatcatggaaagatgagcatggagatgaattactttttgttagcaataaggctattttcaagcctccaaaagctatacgtggaggaataccaatatgctttccgcagttctccaactttgggaatctggaaccacatggatttgcaaggaataggacatggagtgttgatgatgatcctccaccatttccagtgccaacctccaatagcgcttatattgacttgatcctcaaacctactgaagatgatttgaagatctggcctcatagtttttgaataccgcctgagggttgcacttagtcctggtggtgatttgatgctaacttcacgtataagaaacactaatgcagacgggaagccattctctttcacttttgcataccacacatacttcaagatttctgatatcagtcccaattcgtttgaccaaactct

SEQ ID NO: 11659 - DNA, 1091 bp, Zea Mays
agagttccagttgagttggtggattgcttctgacacgctgtgataacctgagggtggtgccaagaaggttgttatctctgccccaagcaaagacgcacccatgtttgttgttggtgtcaatgaggacaagtacacctcggatgttaacattgtttccaatgctagctgcaccacaaactgccttgctccccttgctaaggtcattcatgacaacttcggcattgttgagggtttgatgacaactgttcatgccatcactgccacccagaaaactgttgacggaccctcagccaaggactggagaggtggcagggctgccagctttaacatcattcctagcagcaccggtgctgccaaggctgttggtaaagttcttcctgatctgaatggcaagctcactggtatgtccttccgtgttcctactgtggatgtctcggttgttgacctcaccgtcagaatcgagaagggggcctcctatgaggatatcaagaaagctattaaggctgcttccgagggtccactcaagggtatcatgggttatgcggaggaggatctggtttctaccgacttccttggtgacagcaggtcgagcatcttcgacgccaaggccgggatcgctctgaacgaccacttcgtcaagctcgtctcgtggtacgacaacgagtggggctacagcaaccgcgtcgtcgacctgatccgccacatgttcaagacccagtagaggggttttttccccctgcttctcatggatggttgctgcttgtgtatgccgagaataaatgtggatggcgcgtgcctctgggtcgccaggttcatgctgagtctggacatgttttgcacttttgcttcccttcctgctaccatctgtgacagaaccgctcgctaatatgggacctgagattagctttttgctgcttgtggtgaggttgcagttttgttctgtgtttctgtgttgttagcaatcctatgattcaggtgttcgaatgaagaagataggctgctgcagaggaattgggtgttagctctttcttacccagttggaactgtaaatagtaattaatgaagaaagtagatgtcgcgtacctggtagc

SEQ ID NO: 11660 - DNA, 150 bp, Zea Mays
tctggttattttctgttcaataagggttgtagctttaagcactccagtttgtgcgcatgtggaacacttttgagaaactgttgtgcttgtacatatgctgatactatcgttctcatgaataaacgatgctttttactttgagtgaaacac

SEQ ID NO: 11661 - DNA, 1090 bp, Zea Mays
ctcaccggcccaccgcaagcgcagaagcacaaccacaacacctcgcctcgtcagatcgaccgggaagaagggagcagaagccaaccggctcgtccgcccgttgcctgtcgtcgctatggccgccgtggaggtgtgcgtgaaggccgccgcggggaaccccgacacgctcggcgattgcccgttctcgcagagggtgctgctcacgctggaggagaagaaggtcccgtacgaggtgaagctcgtcgacctcggcaacaagcccgaatggtttctgaacatcagcccagagggtaaggtgcctttgttcaacggtggagatggcaaatgcattgctgattctgatgtaatcacccaagtcattgaggagaagttcccgactccttctctggtcacccctccagaatatgcatcagtgggatcaaagattttcccagcctttgtcaagttcttgaagagcaaggatgctagtgatgggtcagagaaggcgcttctggatgagctgcaggcactggatgatcatctcaaagctcatggcccctacataaatggggagaacgtgtcagcgactgatcttagcctggggccaaagcttttccacctacagatcgcactggagcatttcaaaggctggaagatcccagaaaacctaaccaatgtccatgcctacaccaaggctcttttcagccgtgaatcttttgtcaagactaagccatccgaggagcacgtgattgcgggatgggcgcccaaggtgaatgcataagagccttgtgctttggtgctacctggtggactccatccatttatcttatcagtctttgtcagtggtgtggataggtgtcaagtctgtagcctagatgcatgattcagttggaattatgcagtgccgtgtctcgagtactcagttctggctgttgcggttgtgcatcttaccttctgttgctggttttgtttgaggccatgggcatctcttggtcctatgctgtgagagcgctgtaatgtgggtaccaaataatggagctgcttttatgcttgtggtgtggattctgttgtgccttgctttcatgattctgttttcctgtggattctgtgg

SEQ ID NO: 11662 - DNA, 540 bp, Zea Mays
ccactttttaatatttcatacacaagtctggaaatgcaattattacacatttaggttctctgttagggcaaatgcgcaacagccaaagcttttcgttggcatgatcctcatcctcattttcgcagaagcgcttgctctctatggtctaattgttggaattatcctttcgtctcgcgctggtcaatcccgggcggattaagtgcaccaccattctgtgattaccgcaccgtttattatgctattctgagaggattggaactctattcccttgtctagtttattcttgttaccatgtattaatgtaacaatctgtagctgatggaaggtgacttccagtcatgttttggttttggtggtgtcgagcagaggttatttatttttgggttaaggtcggagtcggacggatgctcttgggctaagtggatttaattttatccttgctgaataaagaacacggaattgtagccaaataagaacgtgatatataaatatttctttcccactttgctggatgcctggattttcatcaccatctatact

SEQ ID NO: 11663 - DNA, 264 bp, Zea Mays
ccgggcccaacccagcgccactctgtaaaatcgcttccagtttgtcttcctccagaaaaaccctacagttcatccctctcgacgcgccgccgccgtctcgccgctgcccacccagattgacggctccaattggcgcccatggcggaagaaaccaacataaaaaaggaggaagaggagttcagcaccggtcctctctcggtgctcatgatgagcgtcaagaataatacccagcagcagcagcctgaagctcctgcttgaccaaat

SEQ ID NO: 11664 - DNA, 522 bp, Zea Mays
aatgaagggagcatgtagttaaacaaaaaatgatttcgaatagtctaaggaggccaaacggagacttcggaagcctgctttggtgcatttggcctacgcaaaggttataaagaagctcaacttctgtgggtagcaaatcaataaagacatagcggagtttggcatgggaaactagttaactgatactgaccgccaaccgctgcatctcagttgtaaacgctggagcctctccttggaccaaatacttgctttttgtcacatgatgcattatctcgtctgttcagacactggtgaggagccttttgttttctgcaaatgtagctggtataattttcgctgcattctgttatgcacacaatcggagagattcatcgtgagtagtttggaaatagctgccagcaaataaaaaagctctgtaacatccaatggctacagttctttgttgtggttatgatttgggaatttatgtatggtttccagtattcaacgagcagctgccagtattcaacgagcaccccatgg

SEQ ID NO: 11665 - DNA, 828 bp, Zea Mays
aagaaaggaaagcggtgcgagcggaggaggcgaccgaagcgccacttgcttgagtagcgaagcgcgagagcaatggcgtcgctgtcgtgcgcctccacgctgccctggacccccgcctcctccccgcggccctcggcggaccgccgcctcacggcctctcgccgggctccgtcgctggtcatcgtcgcccaggggaaggtgaagaaacaccctcaggtcatattgacagatgacatagaagaggtggggaagaaaggggatacaatgaaggtgcgagctggattctaccgcaactccttgcttcccaagggcaaggctgcgcttctaaccccagcagtccacaagcaaaatacaatagtggcatctgagaatgaaaatccacctttaatgccggcaatcatgactcctggtggtgcgcttgatctcgcaactgtactactgggaaatcgtataatcttcattggccaatatattaactcccaggtggcccaacgtgtgatatcacagcttgtaacacttgctgccatcgatgaagaggctgatattctgatatatcttaactgccctggtggaagtctctattcgatcttagcgatttatgattgcatgtcctggataaagcccaaagttgggacagtgtgctttggtgttgttgctagtcaagcagcaattatccttgcaggtggcgagaagggaatgcgctatgcaatgccaaatgctagagtaatgattcatcaacctcaaggtggatctgagggtaatgtggaggaggtgaggcgacaggttggagaaaccatctatgctcgtgatgtctgattaaagttcatg

SEQ ID NO: 11666 - DNA, 826 bp, Zea Mays
ccaaattcagaccatccatatcagatgaaggtgctggtaatctcaagtcacagatcggaccgcccattctcttggaaaatcatctcccgccgtcagatctaggtcacccggcagccatcctataaaacctctccatctctcctccttacttccgtccccgccgccacgccagagaggagaggaagagcgcgcggagagtgagagcccgggagccgggagaagcagcggctgggagcaagatggtgcagcgcctcacctaccggaagcggcacagctacgccaccaaatcgaaccagacccgcgtcgtcaagacacctgtacaccaagaagcgcgcgagcggaccgaagtgcccagtcaccgggaagaagatccaaggaattccacacctgagacctgctgagtacaagaggtccaggttggcaaggaaccaaaggactgtgaatcgtccatatggtggtgttctgtctggtactgcagttagggagaggatcatccgtgcctttttggtcgaggaacagaagatagtgaagaaggtgttgaagatccaaaagaccaaggataaggcctccaagagctagacgatataggccacaatgtttgagtccattcgaatttatttcagcaggaaaatttctcgcgggtatggggaatcttggtacttatgctagtagtatgtgagatgggtgtggtttaaattttgagcgtaagttgagttctgttaacttgttaagttcggtggaatgttttaaactatgtggatgtcagattttgttaatgtttgcgcagtttgccccaattttggccttcattacgtacataacggtg

SEQ ID NO: 11667 - DNA, 599 bp, Zea Mays
gctggcgcaggcccaagggtatcgactcccgtgtcaggcggaagttcaagggatgcaccttgatgcctaacattggatatggctctgacaagaagaccaggcactacctccccaacaagtttaagaagtttgtcgtgcacaatgtttctgagctggagttgcttatgatgcacaacaggacatactgcgctgaaatcgcacacaacgtgtccactaagaagcgcaaggaaatcgtggagcgagctgctcagcttgacattgtggtcaccaataagcttgcccgtctccgcagccaggaagatgagtaaactgtttctagcagtagttttggaatggtgcggctttagaggacttgctgtgtatgatgattcagttatcatttctttttgcttcatgattctgagtactgtgaacccacttgctatcagtagcaacttaactgtggcactgttattatcttttaccatctcaaatacagcagttttgatataaaaaaaatgtctgcattggttaatgttaatctgtgtttttgttggcgcccagcagccactgcttgcagtctgttttgcacgtgtcaaattctcttcttgctgcaagtg

SEQ ID NO: 11668 - DNA, 2188 bp, Zea Mays
ccatcagacagacgcagactctctcacccgactcgtcagacgtcagccagcagttcgaaaccaaggattgatccaggagcttccggaaggcgaggcgcgcgcgcagcgtcgaggtgctggtgccggtgccgcccatggatcgggctcgcggatccgcgttcctgctcggcgtcctgctcgcaggatccttgttcgcgttttcagttgccaaagaggagaccaagaagctcgggaccgtgatcggtatcgatctcggtaccacctactcctgtgtcggtgtgtacaagaacggtcatgtcgagatcatcgccaatgaccagggtaaccgtatcacaccctcatgggttgccttcaccgatagcgagaggctcatcggtgaggctgccaagaaccaggcagccgtcaaccctgagaggaccatctttgacgtcaagcgtctcatcggaagaaagttcgcggacaaggaagtccagagggacatgaaacttgttccctacaagattattaacaaggatggcaagccctacattcaggtcaagatcaaggatggggagaacaaggtcttcagccctgaggagatcagtgccatgattcttggcaagatgaaggatactgctgaggcataccttggcaagaagatcaatgatgctgtcgtcactgttcctgcgtacttcaatgatgcgcagaggcaggcaaccaaggatgctggtgtcattgccggcctcaatgttgctaggatcatcaatgagccaactgctgctgctattgcctatggtttggacaagaagggtggcgagaagaacatccttgtctttgaccttggtggtggtacttttgatgtcagtatcttgaccattgacaacggtgtgtttgaggtgctggccaccaatggtgacactcatcttggaggtgaggactttgaccagaggatcatggagtacttcatcaagttgatcaagaagaagtacagcaaggacatcagcaaggacaaccgtgctcttggaaagctgaggagggaagccgagcgcgccaagagagccctcagcaaccagcaccaggtccgtgttgagatcgagtccctctttgacgggaccgatttctcggagccgctgacccgtgccaggtttgaggagctgaacaacgacctcttccgcaagaccatgggccctgtcaagaaggccatggaggatgctggccttgagaagagccagatccatgagatcgtcctggttggtggaagcaccaggattcccaaggtccagcagctcctgcgggactacttcgacggcaaggagcccaacaagggtgtcaaccctgatgaggctgttgcctttggtgccgctgtgcagggaagcatcttgagcggcgagggtggtgacgagaccaaagatatcctcctccttgatgtggctcccctcaccctgggtatcgagaccgtcggtggagtcatgaccaagttgatcccgaggaacactgtcatcccgaccaagaagtcgcaggtgttcaccacctaccaggaccagcagaccactgtctccatccaggtctttgagggtgagcgcagtatgaccaaggactgccgtcttctcggcaagttcgacctcaacggcattgcgccagctccaaggggcacaccccagatcgaggtgaccttcgaggtggacgccaacggtatcctaaacgtgaaggcggaggagttcgcggaggaggacaagaaggagaaggtggaggaggccctcaaggaggcgctggagtggctggacgacaaccagtcggccgagaaggaggactacgaggagaagctcaaggaggtggaggccgtgtgcaaccccatcgtgtcggccgtgtaccagcggtcgggcggcgcccctggcggtgacgctgacggcggtgttgacgacgaccacgacgagctgtagatggttgtagatggtggtggtgacgtggagtgccgggagccgagccaaattttgtaacggtgtttagcggcggacaatacttattactaatcttggtgctgctctgccaatagccgtgctgagcgtagtaactgtttgtttgtaattttttttcttctacttccttggttgttcaggattcgcattcgaattttatgtgaaaaaaagaaggcgcgcttttaaaatcttgcatttgcccccttgtggtaataatgctaattaaatggtgc

SEQ ID NO: 11669 - DNA, 873 bp, Zea Mays
ctgcacacgcgacgcatttgcctatatcagcactgtggtcataactctagtagagaaaggagaagatgcaggcatctagggcaaggcttttcaaggagtacaaggaggtacaacgagagaagtcagctgaccctgatatccagttaatatgtgatgattccaacatattcaagtggactgctcttatcaagggcccttctgaaacaccttatgaaggtggtgtgtttcaacttgcgttcgcaattccagagcagtatcctctactgcctcctcaagttcgatttttaaccaaaattttccacccaaatgtgcatttcaagacaggtgaaatttgtcttgatatattgaagaatgcatggagccctgcatggacctttcagtctgtttgtagagcgataattgctctgatggcccatcctgaaccagacagcccacttaactgtgattcaggcaatctcctgcggtcgggtgacatcagaggctatcaatcaatggcccgcatgtatacaaggctggctgccatgccaaagaaaggttagatgtagaacatgtgccaagccaagagcctatgtcagtccatatgttgtcaggtttgctgtgtgctgtctgtctgtgaacttggtggttcttgtttcctaataagtcctaaccattcatgtgtgtgtattctgtattctgtatcccggattcccgatgcttggtctgtgatgtaataaatcctggaattcaacagttgttacttctgatctatttatttagttgctcagtatttccgtcagtttctgctgcgcaacactacggaggtgtcttgtttaatgtttcatatgctgtcagctactgcgacagtcttggaggacacattcaagagacagc

SEQ ID NO: 11670 - DNA, 1867 bp, Zea Mays
ttaagtgtcgtattgactgttgagttggctggcaagcgaaggcacatctgcttgaagttgaaccttttgagcatgcttttgggccaaagggcaagaggaaacgtccgaaactaactgctcttgactacgaatctttgctgaagagagctgatgattcccaagatgtgtttgagcaaaagtatgcttcatcaaagttgccaagggaggaagaagaagatggcttacgtgatctagtgaggcatacaatgtttgagaagggacagagcaaaagaatctggggtgaactatacaaagttattgactcttcggacgttgttgtgcaggtgttggacgccagggatccaatgggcactcgatgctaccatctagagagacatctaaaagagaactgcaagcacaaacacttggttttcttactaaataagtgtgatctaatccctgcttgggctacaaaaggatggttaaggaccctttcgaaggactatcccaccctagcattccatgcaagcatcaacaagtcatttggcaaaggatctcttctgtcagtattgaggcaatttgctcgtttgaagaatgacaaacaagctatttctgtcgggtttgttgggtaccccaatgttgggaagtcatcagttattaacacactacggtcgaagagtgtctgcaaggttgctccaatacctggagagacaaaagtgtggcagtacatcactctcactaaaaagatatttttgattgattgtcccggtgttgtatatcaaaacaatgattcagaaactgatatagttctgaagggtgtggtccgggtgacaaatttggcggatgctgctgagcacattggtgaagttcttaggcgtgttaaaaaggagcatctccaaagagcgtacaaaattcaagattggtctgatgataacgattttcttgtccagctgtgcaggaccactggaaaacttctcaagggcggggagcctgatctgacaacagctgccaagatgatacttcatgactggcagaggggtaaaatccccttctttgtaccccctccgcagcaaagcgacggcggtgcatctgaaagtgctgaacctattgggattaccaaagaggacggagtaagcagcgacaggactgccgcagccatgaaagccattgcaggaataatctcgtcacagcagaacatgaatgtgccctgccataaggaaaacaatgcagacaatgaagacactactgaaaatgcagataacgaagacattgagagttcagataacgaagacaatgatgacatcgagcctgcagagcgatctgagtgatctttgggtacagatgtggattattagagttgatatgtcaaggctaattaatttgtcagcccaggtgttgtgtagctacttgaccatatcactggcgtgctagaaaaaaaggatcatgttgagttgcactttttgtaactatcgtacctgaatctttgtaatagggcaagatcagttttgctaggtacctggttgtatcgggatggttatctgtgctgtctactacaaatacagttacatctattttacttaaatcaagtggaagttatctctaaatttttattgcggcttcatgaatttttgcgtacctacatatttcaagccccatcttttcgattgtgccacgtagaggtcgataagctaaaaatgatcgcagaggtttagaggtatctttgttgaggaacaattgtttgtcctaatatgagatgattaattgtgtcgcattcaaattttatttgtgatactgtgattgaaaggtaactgccaatggaactaacatgtttttcgatacaggagaagccaaaaaagcagagacaaagattggattgaattaaaaaaaa

SEQ ID NO: 11671 - DNA, 76 bp, Zea Mays
gtcaacgagcttccgtctgtgctacgggggaaccggaccacacctagccgagctatcggggagaccccgttcttcc

SEQ ID NO: 11672 - DNA, 80 bp, Zea Mays
caggcactggagtagactccttcaaacaccacttcttctaggtgttctacaagtcaattataaatacatgaatgcttatg

SEQ ID NO: 11673 - DNA, 76 bp, Zea Mays
agaaaaaccggatgcaaaagacgtacgatgaggaggaggaggtggaggaggagggtggtgaaggtaaccagagccg

SEQ ID NO: 11674 - DNA, 1462 bp, Zea Mays
ctatggctctatggacccttctgtttccactatatgggatggcaacaccctttataatgagcttgaagttgtggagggtatgaaacttgacagaggttacatctctccgtacttcattaccaactcaaaagcccagaaatgtgaactggaagacccattgatcttaattcatgacaagaaagtgacaaatatgcatgctgtggttaaggttttagaaatggctctaaagaaacaaaggcctctactgattgttgcagaagatgtggaaagtgaagcattaggtactctgattattaacaagcttcgtgcaggcatcaaggtctgtgctgtcaaagctcctggttttggggaaaacaggaaggcaaacttacaggacctcgctatccttaccggaggagaggtaataactgaagagctaggaatgaaccttgagaatgttgagcctcacatgctgggttcatgcaaaaaggtgactgtctctaaggatgacactgttattcttgatggcgctggagacaaaaagtctattgaagagagggcagaccagattagatcagcagttgagaacagcacttcagattatgacaaggaaaagctccaggaacggttggcaaagctctctggaggtgttgctgttctgaagattggaggagccagcgaagcagaagttggtgagaagaaggatagagtgacagatgcactgaatgctactaaagctgctgttgaagagggcattgtaccaggtggtggtgttgctcttctctatgcatcgaaggagctcgataagttgcagacagcaaattttgatcagaagattggtgtgcaaatcattcagaatgctttgaagacacctgtacacaccattgcctccaatgctggggtggagggagcagtagttgtgggcaagcttttggagcaaggaaacactgaccttggttatgatgctgctaaagacgaatacgttgacatggtgaaggctggtatcattgatccgctaaaggtcatcagaactgcattggtggatgctgctagtgtgtcgtccctgatgaccaccacggaatccataattgtagagatccccaaggaagaggcaccggctccagcaatgggtggcatgggtggaatggattactaagtgtcaagcacacccacgatacaacaacatcaaagcagagatgacgaggtggttgtcaggaggatacaattttgaggctgcggacgtaggacctcaatatctccaagcaatagtggggggataataaacatgagcagtagttgtttgagatctgaagctgtagatcaagattggattctgacaccttgtgctgaaccaagtgtagtctgattattacacattttttggctgagtaaaatcggattgccgttctgttttgccagtgtcgcgactgtgcttgtgggcttgctttgcttttgataatcatagctttctgcattctgatgt

SEQ ID NO: 11675 - DNA, 429 bp, Zea Mays
gatgagagagacgagatcatgaggaagcaatactcccctgtgctctccttgtgcctgatggcccttgtcgtagctgctatggtctgtgtcatgtacaccacctcggcacaagcaggaaggagtggctacaactcgtacgaacctgatggaaggagtggatacaactctgttccaataaacggcggtggcagcccctagccaggcggtggagcctgtatcagaaatcaaaaaaatataaaggctcatcggatgaaaactgtgtgtgtattctgtcatgtcatgtgtgttggtatatgatggcttggtcgtcgtaattaatgtaatgtgtggacaataaatatgcggggttgcacctcaacgtaactctagtacttgctattgcgatatatatgtactttattattattattattatatgtgttagaagtc

SEQ ID NO: 11676 - DNA, 1435 bp, Zea Mays
gccgggcaaaggccggagcgcctatatactctcttatcaaggcacgggcgcacggcacggcccatcacccatcacgtatcgctccctccctcggccctcgatcgtacggcgcgagcgttgcgctccacgccttcctcttcctcgtctggcatcgcgaaccgccgcaccccacccacccgcccacaggccacagcccacccccttctccaggtctctccccggcggcggcgggtgcggttctccggccatcaccgtgcgcaccaggaaaaactatgaggaggtacagccccccttatcgcagcccccccaggaggggatatggtggcagaggaagaagcccccctcctcccaggaggggatatggaggacgcaaggagggtagtggaagccttttggtccgcaacatcccattaagtgtcagagcggaggatcttcgagttccttttgaaaggtttggccctgttcgggatgtttacattccaaaggactattactctggggagcctcgaggatttgcctttgtagagtttgttgatccttacgatgcctctgaagcccagtatcacatgaatcgccaagttttctttggtcgggaaatagctgttgttcttgctgctgagtcacgaaaaaggccagaagaaatgcgcagcagaactagagtaagaggttactctggtcatgaaggtcgccggtcttcttactatggtcggtctcgttctcgctctcctcgctatcggggccgtcctcggtcgagatcatactctcctgctccaaggcgggggaatgactactctgcctctccaaggagacaggaagcccatcgctcatctcctcccaggcgcctgccaaaggagcatgatgaagataagaagcggaggtcctactctcctgccagtagagatgatgctgacaatgtttatgagaagaggtcgcccccagcagacagcgatggatctcctctgcaccgcaggtcccccaaggagtactcgggctcacctcctggatcccgctccaggtccgccgacgattctcctgttgccagtgactgatcgaccgatggatgctacaatatgaatggtatgcgcatgcggtcatcagtcctatgtctttgtcagaccgagctcactaaacttacccccctttgggggtcgatgttgtattgctaagttccgtttgtgctaagtattagcgcatactgctagactgccactgtcgtctgtgctatgcatgcttttgatctcgagtgatgtttgaggaaccagtgatcgtgttgatggtgctgaacattggaacctgcagtacagtgtagcatgatgcttgcttgctgggccacggcccgttcactgggacctgttgcgtttccgtctttcgagtttgattgatgctgctgcgggtgcttttagccgtcctgtgctactactcccttttcgaatta

SEQ ID NO: 11677 - DNA, 2262 bp, Zea Mays
acctcaaagtcgtctacccacatcataatcgacggcccacgcggccacgcgtacgtccccgattcatacaggctggccccaccttccgatcctaataagcccgctcccacactcctttcttcccctgcctgccgtctctcttccaccttccaccacaagcgccgccgcagccggtgcctgctccttcccgatccccgaggcaaagctgcgactccgcaaccgccgccatggcgttcgagaagatcaaggtctccaacccaatcgtcgagatggacggtgatgagatgaccagggtattctggcagtctatcaaggacaagcttatcctcccatttctggacctggacatcaagtactatgatttggggatactgcaccgtgaagcaactgatgacaaggtcacagtggaggctgcagaggctactctcaagtacaacgtggctattaagtgtgcgaccattactccagatgaaactcgggttaaggagttcaatctgaaacacatgtggaagagcccaaatggcacaattaggaacattataaatggcactgtgttcagagagcctattatatgcaaaaacgttccaagacttgttccaggatggactaagcccatctgcattggaaggcatgccttcggtgatcaataccgagctaccgatgcagttctgaaggggcctgggaagctgaagctagtttttgagggaaaagaagaacagattgatctggaggtattcaacttcactggtgctggaggagttgccttgtctatgtacaacaccgacgagtcaatccgagcttttgctgaggcttctatgacaactgcttatgagaagaaatggccactctaccttagcaccaaaaacacaatcctgaaaaaatatgatggcaggtttaaggacattttccaggaggtctatgaagctgactggaagtccaaatttgaggctgctggaatatggtatgagcatcgtcttattgatgacatggttgcgtacgcgcttaagagcgaaggaggctatgtgtgggcttgcaagaactacgatggagatgtgcagagtgatttcttagctcaaggttttggatctttgggtttgatgacatcagtgttggtgtgccctgatggaaaaaccatcgaagctgaagctgcccatggcacggttacccgtcatttccgtgtccaccagaaaggaggcgaaaccagcacgaacagcattgcttcgatctttgcatggacaagaggacttgcccacagggcaaagctcgacgacaacgctagactactcgacttcgctctcaaactcgaggctgcttgcgttgagaccgtggagtccgggaagatgactaaagatctggcgattcttgtccatggatcttccagcgtcacgagaagccattacctgaacaccgaggagttcatcgacgcagtcgctactgagctccgatcaagactgggagccaactgagcctacaagaaactttgcatggcgactttgaatgcttcgtcaccgtcaccgatctgctagtcgtcttttctgttatgaagaagtgaatgtgcgtcaccgcagtttcgatgcaagctaattatagatgtggtgtcacgtgagcgctcaaaataaaggatacacatgattaaattgtttttattttacaaaatgccttccgttcaagccgcgtactaccgcgggatcacggaccactctctcagacggccaggtggttgtggtctcccaattccgcgctccagtggcaccacgtctccaggccacgcgttccaatttccacggcgctagtgacgtcgccaaaaaaggtgagaggaaaaggagggccgcgacgaggacgaccatgccggggcaaccgacaccgggactgccgcgtgatttgtgcccttgcgcacagtactacctatctatgcgtgtgtacgatatcttgtgtgcgctgcttggctgctctgtctacgcgcgcgtggactgcgactctgaaacctttcggcagcgtacgcaattgtcggatttcaataaaggaccgtctggtctgaatctctcaataaggacatgtataagtctaggttcttggttggctttttcagtataaaaacagctaagagatcagcatgatataactctaaactttaaatcagaaatgtatttcaaagacaatatgtatagaaagttgtgttgagatatgttttttatgaagagtctgtctcttgtaccttttttagttaatccttaaatacttctcaagagaccttatattaaa

SEQ ID NO: 11678 - DNA, 371 bp, Zea Mays
taagatccatagagcgacagccacggttcttacgtgacgcacgagacaaactactttgtatatttctacatcgactctaaagctgtcttgctattcaagtctgggtgattgtcgcagccaatacagtcaaccttgcatgcctacattttctttctctcatgtatgctccatcccctcccctttcccctcagagtcgtctgcagccaagcctggaagccggtaatcttatgagcctgcatgttgatgtatcagcaacggattattcttcgcatgccatagtgtgagatcaggttgcatcttatttatgtctgatatatcttggtgttgtgagtacattatcttgttgcattatgattgccggacaactggaa

SEQ ID NO: 11679 - DNA, 1768 bp, Zea Mays
ttataaaacctagctcctcaagctccagacgcagtcgaccgccgcagaccgggagtagtcgacgcgccgtcactgaatcctcagatcacggctagccgtaatcacgccactctgctgactcccggcgagtgtaacattttccttcagccatgggcaaggagaagactcacatcaacattgtggtcattggacatgtcgactctggcaagtcgaccaccactggccacctgatctacaagctcggcggtattgacaagcgtgtgattgagaggttcgagaaagaggccgcggagatgaacaagcggtcattcaagtatgcctgggtgcttgacaagctcaaggccgagcgtgagagaggtatcacaattgatattgctttgtggaagttcgagaccaccaagtactactgcactgtcattgatgcccctggacaccgtgacttcatcaagaatatgattactggcacttcccaagctgactgcgctgttcttatcattgactccactactggtggttttgaggctggtatctccaaggatggacagacccgcgagcatgctctccttgctttcacgcttggagtgaagcagatgatttgctgttgcaacaagatggatgccaccacacccaagtactccaaggcccgttatgatgagattgtgaaggaagtctcttcctacctgaagaaggttggatacaaccctgacaagatccactttgttcccatctctggtttcgaaggtgacaacatgattgagaggtccaccaaccttgactggtacaagggcccaaccctacttgaggctttggacttgatcaatgagccgaagaggccttcagacaagcccctgcgtctccccctacaggatgtgtacaagattggtggtattggaactgttcctgttgggcgtgttgagactggtatcatcaagcctggtatggttgttacctttggtcctagtggccttactactgaggtgaagtctgttgaaatgcaccatgaggctctccaggaggcccttcctggtgacaatgttggcttcaatgttaagaatgttgctgtgaaggatctgaagcgtgggtatgtggcctccaactccaaggatgaccctgccaaggaggctgctagcttcacgtcccaggtcatcatcatgaaccaccctgggcagattggcaacggctatgccccagtgctggactgccacacctcgcacattgctgtcaagtttgcggagctcattaccaagattgataggcggtctggcaaagagcttgagaaggagcccaaattcctcaagaatggtgatgctggtatggtgaagatggttcccactaagcccatggtagtggagaccttttctgaatatcctcctcttggtcgctttgctgtccgtgacatgaggcaaacggtggctgtcggagtcatcaagagtgtggagaagaaggatccaactggagccaaggtgaccaaggctgccgcaaagaagaaatgatgtgtctggctggttctgtgtttgcttgagggatacctagtggaaacgtaaaatatctcgtcttgttcacgtcattgtctgaactatgctcgcaacgtttgcctggtcgatttagaactgttattttcgttaaaaccagagtgttatttaagacttatccgaacatctggtgagccatatatggttactagttttgttactacccttgttggtgttgtgtgcttctttagcaaatgtgctgtttctaaattgctcattatttgctcaaaaaaaac

SEQ ID NO: 11680 - DNA, 76 bp, Zea Mays
ctccgcctcctccacgagctcgacctcagcaacaaccgcttcgtcggcccgttcccggacgtcgtcctggacctcc

SEQ ID NO: 11681 - DNA, 85 bp, Zea Mays
tgtccgccgcgatccgaacacttcaccggaccattcaatcggtaggagcgacgggcggtgtgtacaaagggcagggacgtagtca

SEQ ID NO: 11682 - DNA, 2301 bp, Zea Mays
tttttttaaaaaggttcgtttgcacgatttgcagtaatggttggtttccatcgaagatggaaacacacacagtgcaggccgtgatccgatggaaacacacacagtgcaggccgtgatcatcggatcgtccttccgtagccttccgtgaccgtgatccctcatccctgatcagctacttcgtacaggaaccttccagaactcttgagaactgggatccaacgcagctgggctcctctcggttttataaaaatctcaacagggtttcgttttttcgccttaatccccatcaaaccccaagcgcgcacccatcttctggcctttccagccgccaagccttctagaagcttcaagagctcgattcgatcggaaccctcgccatggccgacgaggcgaaggcgaagggtaacgcggcgttctcggccggccgcttcgaggaggcggcgcggcacttcacggacgccatcgcgcttgccccagacaaccacgtcctctactccaaccggtcggcggcgctcgcctcgctccaccgctactccgatgctctcgccgacgcgcagaagaccgtcgacctcaagcccgactgggccaagggctactcccgcctcggcgcggcgcacctcggcctcggcgacgcggccagcgccgtcgccgcctacgagaagggcctcgagctcgaccccagcaacgagggcctcaaagcggggctccaggacgccaagaaagccgccgccgcccctccgcgccgcgggtcgtccggccccgacgccatcggccagatgttccagggccccgagctgtggagcaagatcgcgtccgacccctccacgcgcgcctaccttaacgagcccgattttatgcatatgatgcgcgaagtgcagaggaaccccagcagcatcagtatgtatctctccgatccccgcatgatgcaggtgctcagcctcatgcttaatgtcaagatccagagacccgaggcctccgagccgtcgcagtctaccccgccgccgccgaagcagcagcagcagcagcagacgccgccttctgagacgaaggctagggatgtggagcccgagcccgaggcagagccgatggatttgactgatgaggaaaaggaccgcaagcagacgaaagctgctgctcagaaagagaaggagttaggtaacgcagcttacaagaagaaggacttcgaggtggcaatccagcattacaccaaagccttggaacttgacgacgaggatatttcctatctgactaaccgagcagcagtctacattgagatgggaaagtacgatgaatgcatcaaggactgtgataaggctgtggagaggggaagagaacttcgtgctgatttcaagatgatttcaagggcactgacaagaaaaggaacagctctggtcaaacttgctaagacctctaaggattttgatattgctatcgagaccttccagaaggctctgactgagcatcggaacccagacactcttaaaaagttaaatgaggctgagaaagcaaagaaagagttagagcaacaagagtattatgatccaaaattggcagatgaggagagagagaaaggcaatgagttcttcaaggagcaaaaatacccagaagcaataaaacactacacagaggctctcaagagaaacccgaaggatcctagggtttatagcaatagggccgcctgctacaccaagttaggagccatgcctgaaggtcttaaagacgcagaaaagtgtcttgaacttgaccccaccttcaccaaagggtatacgaggaaaggtgcaattcagttcttcatgaaagaatatgacaaggccgtggaaacctaccaggctggcttgaagcatgacccgaacaaccaggaactgcttgatggtgttaagaggtgtgttgaacagatcaacaaggccaacagaggtgaaataagccaggacgaattgcaagaaagacagaacaaagctatgcaagacccagagatccagaacattcttaccgaccctatcatgcgacaggttctaatagatttccaggagaacccaagtgcggcccaggagcacctgaagaaccccggggttatgcagaagattcagaagcttgtaagtgctgggatagttcagatgagatgatcgagcgatgcgatgattggctttgttcgttcacgtgcaccctggtcatacatatgttttaacaagcagcagcggcataagaatgaacctgttcgggggctaatcttattccttttggattgtaagtgcattgacattggataattcatgtttgtggcactgagtttcgagtaaaaat

SEQ ID NO: 11683 - DNA, 2621 bp, Zea Mays
tggagccctactgccctagggttgaggaaggagaagaaggactactcgacggcgatactagagaggaaaaagtcaccgaaccgccttgtcgtcgacgaggccaccaacgacgataactccgtcgtcgcactgcaccctgacaccatggagaggctgcagctcttccgcggcgatactgtgctcctcaagggtaagaagaggaaagacactgtttgcattgtccttgcggatgaaacctgtgaggagccaaaggttcggatgaacaaggttgtccgccagaacctgagggtgaggcttggtgatgtggtttctgtccaccagtgccaggatgtgaaatatgggaagcgtgtgcacattcttccaattgatgatacagttgaaggcattacagggaacctgtttgatgccttcttgaaaccatacttcctagaagcatacaggcccgtgaggaaaggagaccttttccttgtcaggggtggaatgagaagcgtggaattcaaagtgatagagactgacccttctgaatattgtatcgttgccccagatactgaaatattttgtgatggggagcctattaagagagaggatgaggagcgtcttgatgaagttggttatgatgatgttggtggagttagaaagcaaatggcccaaatcagagagcttgttgagcttccactacgccatcctcagcttttcaaatctattggtgtgaagccaccaaagggcatattgctgtatgggccacctggttctggaaagactcttattgctcgtgctgttgctaatgagactggagcctttttctttctgatcaatggcccagagattatgtcgaagttagcaggagagagtgagagcaatctcagaaaggcatttgaagaagcagagaagaatgctccatctatcattttcattgatgaaattgattccattgcacccaagagagaaaagaccaatggagaagtagaacgtcgtattgtttcacagctactgactcttatggatggactcaaatctcgttcccatgttattgttatgggtgctacaaaccggccaaacagcatcgatcctgctcttagaagatttggaaggtttgaccgggaaattgacattggagttcctgatgaagttggccggcttgaggttctccgtattcacactaagaacatgaagctagctgaagatgttaatttggaactcatttcaaaggatacccatggatacgttggtgctgatcttgctgctctttgtactgaggctgctcttcagtgcattcgtgagaagatggacatcatagatcttgaggatgagacaatagatgcagagatattgaactcgatggctgttacaaatgaccatttcaagactgcgcttggaacaagcaacccatctgctctccgtgaaactgttgttgaagtcccaaatgtctcttgggaggatattggtgggctggagaatgtcaagagggagctccaggagactgttcaatatcctgtggaacatccagagaagttcgagaagtttggcatgtctccatccaaaggagttctgttttatggtcctcctggttgtggtaaaaccttgttggcgaaggcaattgccaacgagtgccaggctaacttcatcagtgtcaagggtcctgaattgcttaccatgtggtttggtgagagtgaagccaacgtccgcgaaatttttgataaggctcgccaatctgctccttgtgtcctcttctttgatgagcttgactcaattgcgactcagagaggaagtagtgtgggtgatgctggaggcgcggctgatagagtgcttaatcagctactgaccgagatggatggcatgaacgccaagaaaactgtgtttattattggtgctacaaacaggcctgacatcattgatcctgctcttctgaggccagggcgtcttgaccagctgatctacattccactgcctgatgagcagtctaggctccagatcttcaaggcctgcctaaggaagtcccctgtggcaaaggatgtggacctgaatgctcttgctaagtacacacaagggttcagtggagcagatatcacagaaatttgccagcgtgcgtgcaaatatgcaatcagagagaacattgagaaggacattgagagggaaaggcggatgaaggacaaccctgaggcgatggaggaagatgaagtggacgagattgccgagatcaaagcagctcacttcgaggagtctatgaagtatgctcggcgcagtgtcagtgatgctgatatccgcaagtaccaggcgttcgcccagacgttgcagcagtcccgtgggttcggcagcgagttccgcttctcagagcagtcggcgacagctggtgctgctgcagccgatccgtttgcttcggctggtgctgcggctgacgatgacgatctatacagctaggtgtcctgttgggttggttctgggttgtgcaatatcagtctcatcagtcatctgtttaaaactctgattatacttagacacgggatgtcatgcaatgatatttgttttccgtacatttggacgttgagataatgcctgtttattttatgccatactctccatgccattttatgaatgattgtttgtcattgagtatatgagtc

SEQ ID NO: 11684 - DNA, 1481 bp, Zea Mays
gaattgggtgttgcactggggattccccccctgagggggccgagccggcgagcatgtcaatgtcgcagagcggctggaaaagttcaagacaacaattttcactcagatgagcatgcttgccatcaagcatggagcaataaaccttggccagggctttccgaattttgatggcccagactttgtgaaagaggccgcaattcaagctatcaatgctgggaagaatcagtacgcaagagggtttggtgtgcctgaactgaactcggctatcgctgaaaggttcctgaaggacagtggattgcaagttgaccctgacaaggaagtcactgttacatctggatgcactgaggcaatagctgcaaccatactaggtctgatcaatcctggcgacgaggtgatactgttcgccccattctacgattcatacgaggctacactgtcgatggccggtgccaacgtgaaggccattaccctccgcgctccagatttcgcggtcccgcttgaggagctggaggctgcagtctccaaggacacgaaagcgataatgataaacacgccgcacaacccaaccgggaaaatgttcaccagggaggagctcgaatccatcgccgccctctgcaaggaaaacgacgttttgctgttctcagatgaggtctatgacaagctggtgtttgaggctgaccacatatccatggcttctatcccgggcatgtacgagaggacggtgaccatgaactctctggggaagacgttctctcttacaggatggaagatcgggtgggcaatcgcgccgccgcacctgacatggggcctcaggcaggcgcactcgttcctgacgttcgccacctgcacaccgatgcaggcggcggccgcggcggctctgagggcaccggacagctactacgacgagctgaagagggactacagcgcgaagaaggctatcctgctggaaggactcgaagccgcagggttcatcgtctacccatcgagtgggacatactacatcatggtcgaccacaccccgttcggtttcgacagcgacgtagagttctgcgagtacttgatccgcgaagtcggcgtctgcgctataccgcccagcgtgttctacctcgaccccgaagagggaaagaaattggtgaggttcaccttcagcaaggacgaaggcacgctgcgggccgcggtcgagaggttgaaggcgaagctcaggaggaaatgaatgaaggggggattacatgtttgtggctggtgattgttgaataatctgtgctgggtttcaactgcgcccggatgcctgtactgtctctttttttttttgctagcaatagttatgctgccagcgacttcatgcctagtgtcgttactatttgttttgtctgtgtgtaagcagatggcgatggatcaggatacctgccggctgccgctacacttttgtaacctatggagcaatttgtgtcaaaaaaccatggcatagaaagaaaaaaaaa

SEQ ID NO: 11685 - DNA, 73 bp, Zea Mays
ttacccagcccccgagggtgttgccggagatgatccggctcggatgggtaacgtgagctgtgacccagccccc

SEQ ID NO: 11686 - DNA, 536 bp, Zea Mays
cacaccagggattcatcaaaaagttggcgtcaggctggatcagatggaagcagtcagctgattctaaaagaaccttctaccaatgttgtcctagctgatcatgttacaacaaagaaatgggagaaaattgttgatttcgatgaccaccttgatgatattagcaaggattggtcgaacccaggcctccttgactgaattttcatgattgatctcgctatactgttttggaacttcgctagaaatgaggtggtgaagctcgtcctgctgtgctatggatttctctcagtcgcaacgagttgtaagcactaagcacggatttcattttaatgtaaatgagtgattttgtaacaattacagttcaaaatgctaaaattatgcagagaccatgagattgtttcaaggtcatgacaattattacgagttgtcacaaacaatttttgttcgtacatgactcttattttaaagaatgaaagttcacataaatttaagtgaaatgttgtagacgaagggaatattaatggtctgtttggaataag

SEQ ID NO: 11687 - DNA, 61 bp, Zea Mays
cttgcaagtttttttttttttttttttttttttttttttttttttttttttttacgtgcgg

SEQ ID NO: 11688 - DNA, 84 bp, Zea Mays
tgaaaatattcttgcaggtagaagtcatccttcctcatgataacccctgagctaggcattaatgcaaaggacaacctctatcca

SEQ ID NO: 11689 - DNA, 641 bp, Zea Mays
cgtacaggtccatattatttcgaagacttggtcgatatgatgtatgacaaaatttctgaatcttttaatgcctactttgaggataatagtattgaggaggttgctgaacagtttttgatcatacatgaagaatgcctgcaaaacaactattcgtctatagagaagctaaggaattctcctgttccggggaatgctgtttctcaaagtagacagatagtgggcgatgacgacgatgacagtgatagctcagatgacggtgatgacacatcgatggtggctgatgaagaggctgggccagaagagatggcagtggacaggccaaggccccccaagcctactccagacgccgatgggtggactgttgtgcctcctaggcgtggtggtcgcagcaagaaatagagtacatggtagctgctggcttttctcgcggaatgtttgttgagtgctgcggttccatattcacttgtatcgctcgatatttgacccgacatggatgttgtgagtgtgtagtatgtttggtttgccaccgcccaccaatttggtgtaaacaaggtaattattatagatgcatcctgtgatcaggttttgagtgttgcagagtcatcgtttacgtgctgcccgtcccacaaagagcttattct

SEQ ID NO: 11690 - DNA, 1237 bp, Zea Mays
gttcgttgtacttctagttttattgctgttcggttgcttggcctgatttgatgcggttccagctaagcttgcccccttcgacccgaccaagaagaagaaaaagaagaaggttgtcatccaagaaccttctgatgaagtggacaagcttgcagagaagacagaaacactggcagtcgcagaacccgctgaacttaacttcactggaatgaagaagaaaaagaagaagccggtggatcttgattcaactcttgatgagcttggagatggggaggacactcaagatgatcaagctgtagaggaacaaggggaaggcattgtgctgggaagtgtccctacatacccttgggagggaactgatcgggattataaatatgaagagctgctggacagggtgttcaacattctacgtgagaacaacccagatcttgctggggataggcgtaggaccgttatgaggccaccacaagttcttagggagggaacaaagaagacagtttttgttaactttatggatttgtgtaaaacgatgcataggcaacctgagcatgtgatgatgtttttacttgctgaaatgggaacaagcgggtcacttgatgggcagcaaaggttggtgatcaaaggaagatttgcccccaaaaactttgaagcaatcctgaggagatacatcaatgagtacgtcatctgcaatggatgcaagagccctgataccattctgtccaaggaaaatcgtctgttcttccttcgctgcgaacagtgtggatcttcaaggtccgttgctccaatcaaagctggattcgttgctcaagtcggtcgtcggaaggcatgagcatctatatgtggatggtgttggggtcaataccaactcaacaatagttgattatttgttgactagagattctgcggcgcaatgttgagcaagatatatcaacgatgccctttgtctgcattcaaaggattcatctattgatgtcacaagcctatgaaaactggcgagtgtgaatcctgatctacgactccctgcgatcataatcctgtgactgctggttagtgtcaaatgcagtctgttaaacttcttgatgcggtcactaatacaagttcatcaaagttttgtccgaatgccataattctgtcataaaatttactttctctgtaatacacaatgaatctaagtgtttacttcattattcgatccttggaattcagctgattcattcaaacaaacattctctttagcttc

SEQ ID NO: 11691 - DNA, 81 bp, Zea Mays
gctaaataacatacacgtcggcttgcctattattattgcaatctgagacacaacatacactacaacatttttataaacaca

SEQ ID NO: 11692 - DNA, 116 bp, Zea Mays
cacaattttcacaggtctatgggatgttggatgtgcagagggtggctggtaacttccatatctcagtgcatggtttgaacatttttgttgctgaaaagatttttgaagggtcaaac

SEQ ID NO: 11693 - DNA, 461 bp, Zea Mays
aacaaaccaccacgtcgctataagtatagggtgggctcgtctcggacaagccccggccgtctcgatcccagcatccgagagagctccacaggccaggtccccatcgccgcggcgcttgccccacctctcccccgcccggtagtagcctcgccgccgttgccgagatggggttcgtgtccttcgtcgggagggtgctcttcgtcgccgctttcctcctctccgcctaccaggagtttaatgaattcggtgctgatggtggaccagcagctaaggcccttcggcccaaattcaacgtgtttgtcaaaaatgtatctgctcatctgggagtagctgtgccacacattgagttgaagcatgtgattgctgctacaattggtcttaagggtcttggaagcctcctttttattttgagcagctctctcggtgcttatctcctgctaatgaagtggtttttatctttg

SEQ ID NO: 11694 - DNA, 106 bp, Zea Mays
attatgttggtacctctgttactgagttgatctggtcgagtttaattttgttttcgtattctgtccttaccgacgattgtaccttttggccgtttcactttcgttc

SEQ ID NO: 11695 - DNA, 1814 bp, Zea Mays
agattgggctggtccggccactccgacacccttatataaagtcccgaaccctagaggccagcaccttcctccccaactcgccgtctgccttctgcgcctccatttcggcctctgtcccttgcaagttcaatctcacctccaaccatgggtaaagagaagtcccacatcaacattgtggttattggccatgtcgactctggcaagtcgaccaccacaggacaccttatctacaagcttggaggcattgacaagcgtgtgatcgagaggttcgagaaggaggctgctgaaatgaacaagcggtccttcaagtacgcgtgggtgctcgacaagctcaaggctgagcgtgagagaggtatcaccattgatatcgctctgtggaagtttgagaccaccaagtactactgcacggtcattgatgcccctggacaccgtgacttcatcaagaacatgatcactggtacctcccaggctgactgtgctgtccttatcattgactccaccactggtggttttgaggctggtatctccaaggatggccagacccgtgaacatgctctccttgcgttcacccttggagtgaagcagatgatttgctgctgcaacaagatggatgcaaccactcccaaatactccaaggcacgttatgaagagattgtgaaggaagtctcatcctacctcaagaaagttgggtacaaccctgataagattgcctttgttcccatttctggttttgagggcgacaacatgattgagaggtccaccaaccttgactggtacaaaggcccaaccctgcttgaggctcttgaccagatcaccgagcccaagaggccttcagacaagcccctgcgtctgcccctccaggatgtgtacaagattggtggtattggaactgtaccggttggtcgtgtggagactggtgtcatcaagcctggtatggtagtcacctttggtccaactggcctgactaccgaggtgaagtctgttgagatgcaccacgaggcacttcaggaggctcttccgggtgacaatgttggcttcaacgtgaagaatgttgctgtcaaggacctcaagcgtgggtttgtggcctccaactccaaggatgaccctgccaaggaggctgccagcttcacctcccaggtcatcatcatgaaccaccctgggcagattggcaacggctatgcccctgtgctggactgccacacctcccacatcgctgtcaagtttgctgagctcattaccaagatcgacaggcgctctggcaaggagcttgagaaggagccaaagttcctgaagaacggtgatgctggtatggtgaagatgatacccaccaagcccatggtggtggagacattctcagcgtatcctccccttggtaggtttgctgtccgtgacatgaggcagacggttgctgttggagttatcaagagtgtggagaagaaggacccaaccggcgccaaggtgaccaagacggttgctgttggagtcatcaagagtgtggagaagaaggacccaaccggcgccaaggtgaccaaggcggccgccaagaagaaatgatgcgatcccgtgtctgcttttgcagtgcctggataacttgccactaaagttgtgtatgcggttgttgctgttattgcgtggactgtttgctgcggtgtctcctgtgtctgttgtctgttgtctttactatcagtaatgctcctgagacttgtatttctccttttggcgccgctaaatggaattttcgaacaatgattttcgtgttattattttacaaccttttcgaacaatatttacacgtctgatgtgttttgctgaga

SEQ ID NO: 11696 - DNA, 70 bp, Zea Mays
ttggccccgccagtggacgacccggccaggcttcggccgccgctgctacgcctcctcggcctgggaagtc

SEQ ID NO: 11697 - DNA, 429 bp, Zea Mays
agacacggtgtttctaccattgaatgttctccttgcttaccgccctctcttcaagataggctgctgctggtcgtggcggtggtcctgttggacgaggtggtgcaccccctgtgaggaggtagatctgtcgcgctatgtggcaaatcaagcttttgccctagttgcaaaaactttgcttgagcagcgatgctatatggttgttaagggtagcttatcagcagcagttcatgtttacagcatagatgcaggactttgtgtaactttgcacgagaagactgtggacagtttcgacgatgctatattgctattgagggtctgatttggataatactccctccgtcccaaaatattccaaaatatgctcttgatttttatgtctatgtttaaataaacgataatgaatctagacacacatataaaataaataca

SEQ ID NO: 11698 - DNA, 1128 bp, Zea Mays
acaataaacgcactcaattttctcagattttcactacacagatcgtgatggtccagggctccaggcttcagtcagattcagagttcagaattcagaatctatagagatactctactagtcagttccgagcggccgcactggacctgaacagcgagcaatggaaaattgggccgaaccatatcgaggcccgaccgtatctgcatcttgcatacagagaaggcccatctacgccgcggaccgcaggccgcttgttcacggctcgaaagaccaggggaagccggaaaccgcacggccggcctgcctctagtcgtcgtcgtcgtcgtcgtggtggtgcttgcggcagctccggagtccaggcagcacgctagtcggggggcgcgggggaggagatatggatcggtcgtatctccccgtggcggcggcggccgtcgccctggtcctcgtgtgctgctccggcctctgccgcggcgagcggctcggggcgagggagtgcgaggacctggggttcaccggcctcgctctctgctccgactgcaacgcgctctccgagttcgtcaaggaccaagagctggtggaggattgccataaatgttgcaccgaggattcagatgattctatcagcaagctcacattttctggtgcaattattgaggtgtgcatgaggaaactggtattttatccagaagttgttggcttcctcgaagaagataaagacgacttcccatatgtggaaacccgttattcttatggttcgccaccaaagctcataatgcttgacaacaagggtgaacagaaggagaccataaggattgataactggaagcgagagcacattcggcagtttctcaaggagaaagtgaagccagtgaaattagacagctgagttcttgcgataagtgcctgaatatttccagtttgacgttccaatagaacctacgtaacctgtaccttgctaccaaaatcgtagctgatgtatgagattggcgttctcatatttacacctcaaaatgatcgtacgagaagcctgtgtgtgcggcatactttgtaacctgtttgttactcttacagtcaggtagtaagtatctggcactatgatccgtgaagagtagttgatgtgcgaacaaaaaa

SEQ ID NO: 11699 - DNA, 118 bp, Zea Mays
tcaccatgtccatgtgagtttcaaggatctactgagcatgtagcacatttgtttcttcgcatccagtaaatgtaaaaaatagaatatcaatgcttgtaagtgggtggggttttgttac

SEQ ID NO: 11700 - DNA, 1284 bp, Zea Mays
aattttagaggttagaccgccacgaaagcgtcactgcacacggcattcccctcccctagcgttatcgtcgcaccataaataaccatcctctcctcgcctttccccacatctcatcttcgtctgtgttcttgggcgtacgcggacacagccccgatccgaatcgtcgtccttgcgagcctcgccgatcccccactcccctcccctcgcttcaagatgcagatctttgtgaagaccctcaccggcaagactatcaccctcgaggtggagtcttctgacaccattgacaatgtcaaggctaagatccaggacaaggagggcatccctcctgaccagcagcggcttatcttcgccggcaagcagcttgaggacggacgcacacttgctgactacaacatccagaaggagtcaaccctccacttggtgctgcgccttaggggaggcatgcagatctttgtcaagaccttgactggcaagacaatcacccttgaggtggagtcttcagataccattgacaatgtcaaggccaagatccagaaggagagcaccctccacctggtgctgcgcctcaggggaggaatgcagatcttcgtgaagacattgactggcaagaccatcaccttggaggttgagagctccgacatccaggacaaggaggggattcccccagaccagcagcgtctgatcttcgccggcaagcagctggaggatggtcgcacccttgcagactacaatatccagaaggagagcaccctccacctggtgctccgtcttcgcggtggttattaagccatcagtcgttgaagctgctgctgtatctgggttatctagtgtctctgccattgcccatggatggtgctgtctttcaaagtatttgtatggtttgtgtcgtgagtcgtgactgagctggtttcatggaccagttgtgttctcgttacccaaaactatcgtgcgaccgcatatggcttaatcatgaataaatgttgtttgaatttaaactattcgctgaatattgttgttttttgtcatgtcagttaatgttactaaattggttgccttctaatttttgtttactggtgtttgtcgcaccttatctttttactgtatgtttacttcaggttctggcagtctcattttttgtgactagttaaaacttacagctaaaaaaatgcagtttttcattttcatttgaagtttgattagagctattgataccggaccatcaggttaggttagttgtgcatagaatcataaatattaatcatgttttctatgaattaagtcaaa

SEQ ID NO: 11701 - DNA, 67 bp, Zea Mays
gtccttacggagaggtactcagggaaaatggcatgagccccctagagtatcacaatatcatcatcgg

SEQ ID NO: 11702 - DNA, 2293 bp, Zea Mays
ctgaatctattgatatgccacatattgtatcctggggatgaatcactagaggggaaagttctccgcttgaagcaacaatatacattgtgttcagcctcactacaggacatcattgctcgttttgagagtagagctggcgagtctctcaactgggaggacttcccctccaaagttgcagtgcagatgaatgacactcatccaacactatgcattcctgagttaatgagaatactgatggatgttaagggattaagctggagtgaggcatggagtattacagaaagaaccgtggcatacactaaccatacagtgcttcctgaagctctagagaagtggagcttggacataatgcagaaacttttacctcgacatgttgagataatagaaacaattgatgaagagctgataaacaacatagtctcaaagtatggaaccacagatactgaactgttgaaaaagaagctgaaagagatgaggattctggataatgttgaccttccagcttccatttcccaactatttgttaaacccaaagacaaaaaggaatctcctgctaaatcaaagcaaaagttacttgttaaatctttggagactattgttgatgttgaggagaaaactgagttggaagaggaggcggaggttctatcagagatagaggaggaaaaacttgaatctgaagaagtagaggcagaagaagagagttctgaggatgagttagatccatttgtaaagtctgatcctaagttaccaagagttgtccgaatggcaaacctctgtgttgttggtgggcattcagtaaatggtgtagctgaaattcacagtgaaattgtgaaacaggatgtgttcaacagcttctatgagatgtggccaactaaatttcagaataaaacaaatggagtgactcccaggcgttggatccggttttgtaatcctgcattaagtgcattaatttcaaagtggattggttctgatgactgggtgcttaatacagacaaactggcagaactgaagaagtttgctgataatgaagatctgcattcagagtggcgtgctgctaagaaggctaacaaaatgaaggttgtttctcttataagggagaagacaggatatattgtcagtccagatgcaatgtttgatgtgcaggtgaaaaggatacatgaatataagcggcagctgctaaatatccttggaattgtctaccgctacaagaagatgaaagaaatgagcacagaagaaagagcaaagagctttgttccaagggtatgcatattcggtgggaaagcatttgccacatatatacaggcaaaaaggatcgttaaatttattacagatgtggcagctaccgtgaaccatgattcagacattggagatttgttgaaggtcgtatttgttccagactataatgttagtgttgccgaggcgctaattcctgccagtgaattgtcacagcatatcagtactgctggaatggaagctagtgggaccagtaacatgaagtttgcaatgaacggttgcattcttattggaactttagatggtgcaaatgtggaaatcagagaggaggttggagaggaaaactttttcctttttggtgcagaggcacatgaaattgctggtttgcggaaagaaagagccgagggaaagtttgtgcctgacccaagatttgaggaggttaaggaatttgtccgcagtggtgtctttgggacttacagctatgatgaattgatgggttctttggaaggaaatgaaggttacggacgtgcagattatttccttgttggcaaggacttccccagctatattgaatgccaagaaaaagttgatgaggcgtaccgagatcagaagttatggacaaggatgtctatcctcaacacggctggctcatccaagttcagcagcgataggacgattcatgagtacgccaaggatatctgggatatcagccctgccatccttccctagaccagccccttagcaggaagcgctggtcacctcagttttgtgtagacaaaatctaggcatcgataaatgatgggggactatgcatggtgttttggcagcactgttcagtaccttgccttctaaatctggtttttggtgtgtgtgtgtaagctaataaatgtcgaggcaggattgtaggaacaccattgatcatttggctcgctggtgacctggtgacgtatggtgtaattagtagttgtttgcctcctggagcttgctggcttctgtaatggtattttcgtaacgaaaatggcgggaaagtacgggggccgctagtgctattgtgacgtta

SEQ ID NO: 11703 - DNA, 1710 bp, Zea Mays
  misc_feature (1709)..(1710): n is a, c, g, or t
ttctcgcgccgcaacgcgacgcaatgccccacccgcacggtcgcgccgcgcagcgcaggaacccccaccacgcggtcggcgtcggcgtcggcggcggtgctcccgcctccccgccgtcggcgtagctcccgcgcgcttcggccctgggcgccggtgtggtttctccatcacgctctctcgcgcttcctacctgcgtgcgccctgctgcccggtgatggccagccgtctcttcgtgctccgtcggcacacgaggtggtggcagcggcaggcgccacggcctcgctcgctttgcccgccgtctcacggtggggactcggcgtcttcccatgggacgctggagctgctcgcgcgtctgcgcagctcaccatcgttttcaaccgagatgctaggttcttcaggttgttgcagagttgtagcattcaagcctgccattgtatccatacgagtccatcagtcaatagcggaaatcaggctactgcagagcctcaacaacagaatccaggagtgcctgtaccggttgatggttctagtgaactaaaacccaagaggacaaagctgaaaggaaggagggcagtgacaaattttttgaaatccttgagatggaaaaagaaaaaggagtttcaaagaatgactgcagaggagaagattttgtacaaactgaagctagctcgaaagaaggaagagcggcttgttgtggcactgaagaaaattgaaccagaggatccatcagaacctacacatgatcccgaggtgcttacacctgaagagcacttctatttcctcaagatgggccaaaaatgtaaaaattatgtgcctgttggaagacgtggaatttaccagggagtgatcttgaacatgcacttgcattggaaaaagcatcaaactctccaggtaattgtgaagacatttacaccagaggaggtcaaggaaattgccatcgagttagccacactaagtggtgggattgtgcttgacattcaagatgggaacacaattattatgtacagagggaaaaactatgcacagccaccaccagagatcatgtctccaaaagtttccctctctagaaaaaaggtgacgcaaaagttcagctgatgcaagaacgatctcactggtacgccagctgaagaacatttttaccaagtgaattcatctcatacatcaaactgacctcatttatcaggctgaaagcatggccctgccttttataattacatatgtgtccaacgtaagtgtcagtgcatcccatgatggcatacatacatattttgcgtacatacacatcacatgactggataattacatatgtccaacgtaagcgtcagtgcaccccatgatggcatacatacatattttgcatacatacacacatcacatgactggagaatcatgcagagatctctcatctcattctcagccaagatcaggaacgatgaagtagtcctcgtcgtcgtcgtcaggcacctccatccgtgacttcttgaacaggcgcgccccgttcgccttgtagaacccggcgttactcactggctgcggcgaggcgaagaactccgccatggcagttttagctggcgaatgggcgtggaacaggtcgatgtcctcgaaccactccagctccttgagcccaagagacgagtctttctgcaacagcaaacacaaaacagatggaaaaggaaaactgagataagaataagaacgtgaaaagcttnn

SEQ ID NO: 11704 - DNA, 551 bp, Zea Mays
acgatgcagccacgttttccagtcgtagcgtgaaaggttttaagggcaaaagccctcggagcgtcactgggagaagagaaacgcccggcggcgcgaagcggagggtgagaatatcggagttcggcgatgtcgaagcggcagggaccgccgaaacaccagaaccgctacgcgtggaagccgaaccttggtcagaagatcaacgaaaccgagcccgggggcaggttccgacctctgtcagaaatcaccggcgtctgtcagcgctgccgggatcaaatcgactggaaacgcagatacggaaaatacaagcccattgttgagccagcaaaatgccagaagtgtaataagcgaaacgtccggcaagcataccataacgtatgcagagattgctccaaggacctcggcatatgtgctaagtgctgcacatgtgttaatgagcttgtcggaagggatgcgaatgaggaggaaagtgaacgcaagtcactagaagaggctgtcagaggtgctagggagagggaacgacgtacacttcttcgtattgcgctccaaagaaa

SEQ ID NO: 11705 - DNA, 600 bp, Zea Mays
cgtttcgatggtgcgtgatggcaagctgtttgttaatggagtagttcaggatgaggattttgtgctggagccacacaactacgagatggaaccagtgcttgtgccggaaggttatgtgttcgtgttgggagacaaccgcaacaacagctttgattcccacaactggggtccacttccagtgaggaacattgtcgggagatctatcctccggtattggccaccatcgaagatcaatgatacaatttatgagcctgatgtgtcccgcctcacggtgccgtcctcgtagtagtcgctgcagtgatgctggatatccagtgtgtgtacaatgaccttatacttcgtggagcctcatttgatgagttgagctccagttccaattctctcagaatattgtctcctgagtgttccctgtaaattctctttgcctgactgatttgttttcgctgccggttggcagatgcttgttcaaagcacgggaaagtgcagtaccttgcatcttgcaatacaaactaattaaaccggttacccttttttttttgttttatcgagataaactctgattttaagaaagcaataaggtttcgtacatcatgttatttc

SEQ ID NO: 11706 - DNA, 2294 bp, Zea Mays
cgtcattcttcctatttcccttgttcctagtttcctaaaggtcttccgcaaggataacaggaccatgctctccaggaaggacttgtttaaggacactctaagaaaggcagcccatgcatggaagcgtattgtggaactacgtctcacagaggaggaagcaggtatgctgaggctatacgtcgatcagcctggttatgttgatctgcattggggcatgtttgttcctgctataaaaggtcaaggtactgaggagcagcagaaaaagtggttaccaatggcttacaagttccaaataattgggtgctatgctcagactgaactcggtcatggctcaaacgttcagggccttgaaacaactgccacatttgatccaaagactgatgagtttgtcatccacagtccaactctgacctccagcaaatggtggcctggtggcttggggaaagcttccactcatgcagtggtgtatgctcggctgataactgaaggaaaggactatggtatacatggtttcattgtgcaactgcgaagcttagaggatcactcccctcttcctggtattactctgggtgatattggtggaaaatttggcagtggtgcatataacagtatggacaatggtgttctgcgatttgaccatgtgcgcataccaagggatcaaatgttgatgaggctttcacaagttacaagggaggggaaatatgttcattcagatgtcccaaagcagctgctttatgggacaatggtttttgttcgccagacaatagtcgcagatgcttctaaggctttgtcccgtgctgtttgcattgctgtacgatacagcgccatccgaaagcagtttggctctcaagatggtggccctgagactaaggtccttgattacaagactcaacaaagcagactctttccgttgctggcttcagcatatgcatttagatttgtgggtgactggctgaagtggctatacatggatgtcactcagaaactggaagctaaagactactcaacactgcaagaagcccatgcctgtactgctggtttgaaggctgtgacaacatctgcaacagctgatgccattgaagaatgtagaaagctctgtggcggacatggttacctgaacagcagtgggcttcctgaattgtttgctgtctatgttcctgcttgcacttatgaaggagacaatattgttctgcttttgcaggttgcaaggattctaatgaagaccttatctcaattgacatctggaaaacaacctgttggtacaatggcttacatgggcaatgtacaatatctgatgcaatgcaaatgtgctgttaacacagctgaagattggcttaaccctgttgccatacaagaggcgtttgaagccagggctctcaggatggcagtaaactgtgcccagaacataggccaagcagcaaaccaagaagaaggtttctatgagcggtcccctgatttgctagaggctgcagtagctcacatccagttggtcattgtaaccaagttcatttcgaaggtgcagcaggacattcctggacctggagtgaaggaacagctccagaacctttgcaatgtctatgccctctacattctccacaagcacctgggcgacttcctggcaaccgggtgcatcacacccaagcagggagcgctggcaaacgagcagctgggcaagctttacgcacaggtgcgtccaaatgctgttgcgctggttgatgccttcaactacacagaccactacctggggtctgtgctggggcggtacgatgggaatgtgtacccagcgctgtacgaggaggcgtggaaggaccctctgaacgagacggtggtgcccgaggggtaccacgagtacctccgccccttgctcaagcagcagctcaagctctccaggctctagtctgatcggctaccccccctggaattctccatggcggctgccttctcagaaaatctcacgcgacctccgaatgaaagtgatgtaagctactaacgattcttgttagagccaggaaagaggctctccagccaattataaatttattcctcaagctctgaggatcaagttcaagctgtggattatataggaagcacgtttaataattaataaagagggagaggatgagcatctctctgttgctgctcaagtgttgtgcgcagtgcgagtagtagaatgaatatgtatgtacgagtgcgtgtattgtatggtgaattgaagttccatttgtttgctaaaagtatatcagaaaacaatggcttgatttgcctaagtccaaaatgaaagccagattccgaac

SEQ ID NO: 11707 - DNA, 71 bp, Zea Mays
cgaaaagcgtaattattgcgcttaatcgtacattggtaactagtattttcgtataaaattatacaatgcca

SEQ ID NO: 11708 - DNA, 1751 bp, Zea Mays
acactcgtggttgtttaccgtgcgccgggctcctcccccacatgggcaagcgcaggcgcggcacggggagcagggcacacgcggcgtagtagcgccaagcgaggccgcggccacgccttctccaccgttcgtccgtccattcccattctcatttccatttgcctcgctcgccttcctcctccccactccactccattccaacgcaacggcctcgccccgctttataggccgccgcccgcgccacatcgccaccgtctcgcaccgtcgcggccacccattctctctcgtccatcgcatcgctccggctcccagcgcaatcgatccatccgtccctaggtgtgcttcagctatgcagttcagcagcgtgcttcccctagagggaaaagcgtgtatgagcccagtgaggagaggcagtggaggttatgggagtgagaggatgaggatcaactgctgcagcatcaggcgcaacaaggcactgaggaggatgtgtttcagtgcaaggggtgctgtgagcagcacgcagtgtgtgctcacatcagatgctggcccagacactcttgtcgtccgaacatcctttcggaggaattatgctgatcctaatgaagtcgctgccgtcattttgggtggtggtaccgggactcagcttttccctctcacaagcacaagggccacccctgctgttcctattggaggatgttacaggcttattgatatccccatgagcaactgtttcaacagtggcataaacaagatatttgttatgactcagttcaactcagcttctcttaaccgtcacattcatcgtacctatcttggtggggggatcaacttcactgatggatctgttgaggtgctggctgcaacacaaatgcctggggaggctgctggttggttccagggcacagcagacgccgttagaaaatttatctgggtacttgaggattattacaagcataaagctatagaacacattttgattttgtcaggagatcaactctatcgtatggattacatggagcttgtgcagaaacatgtcgatgacaatgcagacataactttatcatgcgctcctgttggagagagtcgagcatctgactatggattagttaagttcgatagttcaggccgtgtaattcagttctctgagaaaccaaagggtgctgccttggaagaaatgaaagtggataccagcttcctcaatttcgccattgattccccagctgaatatccctatatcgcttcaatgggagtttacgtttttaagagagatgttttgttagaccttctaaagtcacggtatgctgaactgcatgactttggttctgaaattctgcccaaggctttgcatgagcacaatgtacaggcatatgttttcactgactactgggaggacattggaacaatcagatctttctttgatgcaaacatggccctctgcgagcagcctccaaagttcgagttttacgatccgaaaacaccattcttcacttcccctcggtacttgccaccaacgaagtcggataagtgcaggattaaagacgcgatcatttcacacggctgcttcttgcgtgagtgtgccatcgagcactctattgttggtgttcgctcacgcctaaactctggatgcgagctcaagaataccatgatgatgggtgcggatttgtatgagaccgaagacgagatctcaaggctactggcagagggcaaggtgcccattggcgtaggggagaacacgaagataagcccttcta

SEQ ID NO: 11709 - DNA, 80 bp, Zea Mays
tcttaacgaggctctcaaatcggatttgggcatatgatattgggagctgagtgtcacacccggatttcggggcaccaaga

SEQ ID NO: 11710 - DNA, 1020 bp, Zea Mays
tttagttctttattgggttcatcatacagacagtttagcaggtcaaatcgaacaaaagatatgcaggggcatcaaactggacagtaaaggaagttgttgaatcagtgaggaatgattttggcagcattgacatactagtgcattctcttgctaatggcccagaggtaacgaagcctttgttggaaacctcaagaagaggctatcttgcggcaatttctgcatccagttactcctatgtttcattgcttcagcacttccttcctataatgaatcccggtggtgctagcatctctctaacatacattgcatctgaaagggcgattcctgggtatggtggtgggatgagttctgctaaagcagctcttgagagtgatacacgggtgcttgcattcgaagctgggcgaaaaggcaaaatcagagttaacaccatatcagcaggccctcttgggagccgagctgctaaggcaattggatttattgagaagatgatagagtactcatatgttaatgcaccattgcagaaggagctgttggctgatgaggtggggaacacagctgcattcctggtttcttcattggcttctgccatcaccggctcgactgtttatgttgacaatgggctcaatacaatggggcttgcaattgacagccctaccataacgtcatagatgtggttgtggtagatagacgacctttcctgctgcattgcggtatcatccttgaataaagatcatagttagttataaatatgagaggtaagggcaggaaagggggaaaattatgaactggtcttttgcgctttctttgctggagaggaacattagagcgatttccagaatgatgggatgctattatgtgatttcatatgattcagaagcagtacaataactccctagatgagctgtcataactatacttatgtttaagaaacagcctacatcttaggtcacttatgttttatccactgtattttacttaaggtgacgaacacctcggtttcctcgtcctcgtcgtgctcct

SEQ ID NO: 11711 - DNA, 75 bp, Zea Mays
tgttcatttgagctcttgcgcttggattgcttttcttattccttctttcttgtttccaactcaattgtaatcaag

SEQ ID NO: 11712 - DNA, 1427 bp, Zea Mays
aagcagggcacatgctgacatgccccgtgaccgtgccgttgtatcagaataatgccaaggagatggtaccttagcgtaaaccttctccagtcagcaattcctgatgcgctggtcaacaccggtctggcgaagctgggctacgagtatgtcaacatagatgattgctgggcggagtctgacagggactaccagggaagcttcgttgcaaacagacaaaccttcccctctggcatcaaggcgctcgcggactacgtgcacgccaaggggctcaagcttggcatctacagcgatgctgggacacggacgtgcagccagaaaatgccagggtcacttgaccacgaggagcaggacgtgaagacattctcgtcctggggtatcgattatctgaaatacgacaactgcaacgacgccggcaggagcgtcatggagaggtatacgaagatgagcaacgctatgaagacgtatgggaagggcatcttcttctcgctgtgcgaatgggggaggcaaaaccctgctacctgggcaggcggcatggggaacagctggagaacgaccgatgatatcgccgacaactggggcagcatgacgtctcgtgcagaccagaacgacaggtgggcttcctacgccggacctggcgggtggaacgatcctgacatgcttgaggtgggcaacggcggcatgtccgaggcggagtaccgctctcacttcagcatctgggcgctcgccaaggctccgcttctgatcgggtgcgacgtgcgggcgatgagccagcagacgatgggcatactcagcaactcggaagtcatcgccgtgaaccaagatagccaaggtgcgcagggaaagaaagtgcagtccagcaatggcttggaggtttgggctgggccgctcagcaacaacaggaaggccgtggttctctggaaccggcagggataccaggcaaccatcaccgcacagtggtcgagcatcgggctcgcttcttccactgctgtcactgctcgcgatctatgggcgcactcgtcgttctcggctcaaggccagctatcagcttcggtgccacctcacgactgcaagatgtatgtcttgacgccgaactagctcagaagacaagagcggattgttccatggcgcgtgggatgcaaccattcggtcaggattcagggaagaagagtatgcagtgcaggcaaggatttcaagagaaggaaattcgatatcatttggttatacaggatatgagtgcgaatggaggaataatttatactaatactatggaagtgtatctaaggcgccgtcaaaatgccggtgcctgtgttactggatgtttgtaacgagagttgcagcaataaaattggcttgcccaccaccctttttacgagcatgtggacggatttcagagaacaagagaatatagaaaatgtgcgttctctgtg

SEQ ID NO: 11713 - DNA, 76 bp, Zea Mays
ggcggctatcagcccggattcatgctctttggcagcgtcgacgaagagattttaggatgtattcgcgatcgcgctg

SEQ ID NO: 11714 - DNA, 223 bp, Zea Mays
gcttgtgtcgacataaatcaaatttttgattaccttttcaaacttctgcttatcggtgattctggtgttggaaaatcatgcttgcttctcagatttgcagatgattcatatctggacagctacatcagcacaattggagttgactttaaaattaggacagtagagcaagacgggaagaccataaagcttcaaatttgccgaaagagagaaactgggagaagca

SEQ ID NO: 11715 - DNA, 1340 bp, Zea Mays
atgggaagagacacatcaatgttcgcagccaccctcttttctttggcatcactttgagtctgcttgctgaaattatcaattctaggctatttacaacagttcgagattccatgggattaacatatgatgtttcttttgaattgaacctttttgacaaattggatcttggttggtatgtgatcgcagtcacttcaactccaagcaagctgttgatgcctgcaaaggtgttctgagaggattgcatagtagccgaattgtggaaagggagctcgatcgggcaaagaggacactgttgatgaaacatgaagctgagacgaagacaaacgcctactggcttggtttgcttgcccatctacaatcttcatctgtaccaagaaaggatgtatcatgcatcaaggaattgacgacattatatgaaaatgcaacgattgaggatctgtatattgcatatgagcacctgaaagttgacgattcttctttgtttgcttgcattgggattgctggcgctgaatctggtgaagatacaaacgatgacgagcctgatgtggatcttcatggcatgggtcccatgggaggccggggtctttcaacaatgaccagaccaaccacatgatcaccattgggatggccaacccttccaagggagtcacatggccctaggagactgcatgttgactgtcgtttcccagcaaaactgtttaaagataattcaagcatttgatctggatctggaagactattatatcctgagccacaaccaaaagcttggtggctgcattttttccccgaggagcgttgagttaatgactcagcaaggtcgtgaaaaagaatttattgtttgaggtcatgtagcttcacatgtacagtaaaagcaggttggttcttgcatacagttgttgtaactagtgcgttcagggcattgaagataggatgacagtagatcacagacgttgctgggctgcgaatagcgtaaggcatctgctgtaactgtaacgaaataatgaagcgcagtgtcaggaccctggatagatggcaagtgggtggcatgtgtgcctataaaaagggagaacgtatagaccaagggatatgaaagaaccatttgaacaaactaaatcctctctacctttccattactgttatctcttcataatctctcctctcatgtatcctgtttctctaccttctagaacaatttggctatcagatatcaaattagatcgtcttcctcgctgctatctccttcttcaacccttcttctacctgaacatctctcttctctccgatattcccttctgtggcgctaacacgcaggcatgtaacatttttgtgttattcttttg

SEQ ID NO: 11716 - DNA, 1982 bp, Zea Mays
tgccagtgccagtgccacccgccccgcagccctaacttgctggcggccgcctataaaatgctggaacactcgcctcgccgtcgccggggaccaaaccaactcgagtcatcgagttccacagctctcgcgtcgcgcgcagccaatccctctccctccggcctacacagcccacaactcccttctccatctctctctctctctctcgcccgtgtcgccccctgtttgtgtacaaccccatggcgacccacgccggcgagaacggcagcgggcacgagaacggcggcgggcacgcggagtggcggttcgcgcgggcggcgaaggagggcgcgctggccgttgcgggggacaagatgagcatccgggcggtgcggttcaagatcagcgcgagcctggacgcgcgcgacccgcggccgaggacgccgtggccgccgcgctccggaccggcaagttcaactgctaccccgccggcgtcggcctccccgaagcccgccgtgctctggcggagcacctgtcgagcgaccttccatacaagctgtcgagcgacgacatcttcgtcaccgccggaggcacgcaagccatcgaggtggtggtctcagtcctcgcgcagccgggcaccaacatactgctcccgaggccgggctatccgaactacgaggcgcgcgcagggctgcacaacctggaagttcgccggttcaatctgatccccgagagagggtgggagattgacatcgacggtctggagtcgatcgccgacaagaacaccaccgccatggtcatcataaaccccaacaacccttgcgggagtgtctacacccgagagcatttggccaaggtcgcggaggtggcaaggaagcttggaatactggtcatcgctgatgaggtgtacggaaatctggtgtttggggacacccctttcgtccccatgggtgtctttggccacattgcccctgtgttgaccataggatcactgtccaagagatggatagtgcctgggtggcgacttggttgggtggccgtatgtgatcccaacaaggttctgcaagaaaccaagatcattgcatcgatcacaaacttccttaacgtttcaacagatccggcaacttttgttcagggagcgcttccccatattcttaagaacacaaaggaagattttttcaagaggatcattggtctgctagcggaaacatcagagatatgtttcagcggaataaaggacatcaagtgcatcacatgccctcacaagccagaaggttccatgtttgtcatggtgaaactaaatttgtatcttttggagagcatccatgatgatattgatttttgttgcaagctggcaaaagaagagtccgtgattttgtgtccagggagtgttttgggaatggaaaactggatccgtatcactttcgccattgattcatcttctcttcttgatggtcttgagaggctgaaatctttctgccaaaggcataagaagaagaatttgcttaatggccattaactatattcgacttcaaagttgttacccacttccatcgttttccactgtatcatcaacaaaagtgtaacattgaaatccctcagaagtaataaagttaatgtttacatatgaggatatgcatgtcagtgtacatttttagtcaccttaatcctctgttttgaaatctttcgattttgcatttgtttcagttttccattacaatgttcttttcttttaatttgacatcacttataagtgtggtgatggtgacacctgttccaatgtactaaaggttacaattggggacaaattattatgtagtatgtcggttgtgaagtttgaagacagccgaaagttctatttttgtgttgagagaaaatttacatctccaatatttgatgacataattaaggatgaattcttatttggcaaatttaaattgcttagagagatcaaatgtattgataaatggactggactcataagtcgttataagaaaataccaaaa

SEQ ID NO: 11717 - DNA, 512 bp, Zea Mays
cacggtaaacccctttgaagcaaaggcgtatgctcaggagaatgggctcttcttcatggagacatctgctaaaactgcaatcaatgtgaatgacatattttatgagattgcaaagaaattgcttcaagggcaacaagctccaagcccacaggctggaatggttctgaatcagagaccaaatgagaggacggtcagcagttcttcatgctgctcttgagctgtgtttcaacctcgtagtgccgttatcaaatgtatcagaggaggtttatggaaaatatcccatgtcgcttgtgtggctgcctttcaggctgacgtgctcccattctgctcctcatttcctttcacatgttcgtcatgtaaatgccaatactaaagtgtcactgcatgggcagaagtgttaccaaagtgttgattgtgctcttatcatttgattaagcccctgcttaagttctcaattttgcatatatacatggtggagtttcatttgaactttttaaccgatgatataacca

SEQ ID NO: 11718 - DNA, 523 bp, Zea Mays
gatcgctcttctctccgtcccctgctacatataaggtacctccggccccaaactgcacgagctctctctagcattacccggcggcggaagcgtaagcgcaaaacgaagcaagcggccgccatggtgaagggacgcacgggacagcgcgtcaggctctacgtccggggcaccatccttggatacaagaggtccaagtcgaaccagtacgagaccacgtctctcgtgcagatcgagggggtgaacaccaaggaggatgtcgcgtggtacgctggcaagcgcatggcgtacatctacaaggccaagaccaagagcaatgagacccgctacaggtgcatctggggcaaggtcacccgtccgcacggaaactcgggcgtcgtccgtgccaagttcatgtccaacctcccgcctgagtccatggggcgcaaggtcagagtgttcatgtacccgagcagcatctaaggggaagtcttgcctctttataatttccccgaaccccacttattagggtttgttcggttatttt

SEQ ID NO: 11719 - DNA, 975 bp, Zea Mays
tcatgattcggaatcttgttgacgctggacttaggacacagcaatggagatggctcgacttatatgtggtggctgccagacattattgatgtatgctcgcagtgcaacaactgtaagatgctcatgttgtgacacagtcaatcttgtcagaccagtgagtagcatagctcatgtgaactgtggccagtgccaaacagtgttgatgtatccatacggagcaccgtctgtcaaatgtgctgtttgcaacttcattacaaatgttggcggggtgactcccatgatacctttgccaccaccagcactaactgcatcaagtggaacttcatatatcatcccgtcaatttccgtgccgacgaatcaaccgcggaatgtaactgttgtcgttgaaaacccaatgacagtagatgacaagggaaaattggtgagcaatgttgtagtaggggttacgagcggcgggaaaaagtgacggcatatcacaacccgtatagctttgtccaaactatctaaaaagggtttaagaatacataccttgtatcatactgctgtttggcgatcggctgctcgacggaggaatccccctccctggagagcgtagtggcaaggcagcgctgctttcgccactgcgatcgtgctagaacgagccaaaaaaaaaaacgaagtgcgggtgtgcatactcagagtatatctgtagcttgttaccccttgattcttttgtatgtaatatgggctctgcctgactttcactgtgtgatcaaatttccaagcccgtgggcgctgttgctgcgtgccttgttattagtgaataacaaacattgcaaatggctcttgaaatacagtgtgtgtgtgttttaatctctctgcatttatgttaatcagcaggtgccaccatttgctgttccagactgataatgcagagtttgtatccacgttctttggagaaaacatttgaggctcatacgctgtttcatgtcccat

SEQ ID NO: 11720 - DNA, 1449 bp, Zea Mays
ccttcactcaaattgctgaacgcaaccgttcaagtttctgcccgtctatgctctctttgataaggatggtaatcaggtcccaaaggagacagtcgataaagttggagaaacattcgagagaattcttgaagagacggtgaaagtgcgcgatgagcaggaacacgacatgccactgctacaggcaatttctattgtgtttgagaggcacccccatctaaagcttgaagggctagatgatcaggtcttacaatggtgtgtctgccggcttgaggcatggtttgctgcagatgcagatgaaatatctctgaagaactgggatcaggagcgtgttcttactggtggacatggactgatggtaaatgggtactatcctgttattgaagctcttgctcaaggtcttgacatcaggcttaaccaaagggtcaccgaaattacccgccagcacaatggagtcaaggtcactactgaagatggcacaagctacttggccgacgcctgcataatctcagtgccactcggcgtgctcaaggcgaacgtaataaagttcgagcctgagctgccccagtggaagagctccgccatcgccgacctcggcgtgggcaccgagaacaagatcgccatgcacttcgacagggtcttttggcccaacgtcgaggtgctgggaatggtcgggccgacgcccaaagcctgtgggtacttcctgaacctgcacaaagccaccggcaatccggtcctcgtgtacatggccgccggaaggttcgcccaggaggtggagaagctgtcggacaaggaagccgtcggcctggtcgtttctcacctgaagaagatgctcccggatgccactgaaccgacgcagtacctggtgtcgcgatggggctccgaccccaactccctggggtcctactcgtgcgacctggtcgcgaagccggccgacgtgtgcgcgaggttcgccgcccccgtcgagaacctgcacttcgccggcgaggcggccagtgccgagcactcggggtccgtgcacggcgcctactcgtcgggcatcgccgctgccgaggaatgcaggaagcggctcctggcgctgaagggcatcccggacctggtccaggtcgcggcgtgggaggagatggccggagctgtggctcctctgcagatttgcaggacctgagtgagattggatcactggctgcctttggacattggagtggatcgtggatcgcttcgctgctccctgatggttgccgagtctttttttatatttaccttaccttgaaggccgttgtgtcttgtctggaataaatcaagattgactggcactgaaagtgtcatcgcgtcactctttcatacttattaataaatatcacaagtctgtcctgagatctcagcctggtgcctgcgtgctgcctttgccttgtatatgacgttttactttcttttagtctcaattattcaaat

SEQ ID NO: 11721 - DNA, 444 bp, Zea Mays
attgtcatctccagtcgtgttgtggccggaagagacagacacgcaaacgagaggactcgagagagattccgccgccaccaccgccggctcagatgccgccgccgcagtcgggcatgaccctctgccgccttcccaaggccacccttggccttcccctttctctcccctctttgctatatcgtcccagcctgtccctcgccgcacgtcgcaccaaggccgtctccgccagggcctcctcctcctctccatcaccggactcttccttcggttcgcggatggaggattccgtcaagaagacggtggccgataaccccgttgtcatctactctaagtcatggtgctcatattccatggaggtgaagtcactcttcaagcggatcggtgtgcagccccacgtcatcgagctcgacaatctcggagctcaaggaccacaactacaaaagg

SEQ ID NO: 11722 - DNA, 904 bp, Zea Mays
gtgcgtttagcatcaattcatcagctagaagttcgaaatgggggtcaagtttttagtccttctcggtgttgtcctggcctctcttgtcttccaggacgtggcatttgctagagagctcactgaggccaataatgaggatgagggaaagaacatgaaacaaggaggaatgactgaattaaaggatgagaaatggggaggtggatataatggaggatatggatatggaggtgggtatggtggtggatatggaaaaccgggctatggtggtggatatggtggaggatacaggcccaaatatggcaggggctacaggtccggatatggatacggtggcgggtatggtggaggatacggtggcggttatggtgggggatatggtggcggtggtggctatggagaaggtggaggctttggaggtgggcatggtggtggtcgctatccatggtggatggaattaagaagcattgctacataaagtttctctatgtccgataacaataaatggcgacgataaatttgaatgctacatgtagttccgtgatggaaatcttatgtattttgtataaaacatggtacatggactgttacgtatgttgcatgaaatactgtactagaataagatctttgtatgccatgtatggtattagtgtgcatgtgtctggcttttgaaaggtgtacctcgtcatttatggacttatatgtatgtatagataaaaataatatttttatcaaggcttgagtcaaagggcgatgtatggatgaactcatggttcttccatcgttgtgtttttatttcattttcactacatatttctggctccactgcttgtgaaatgattattacactgcttttggtgccatttgcattgatctacttcaagaacatctcaagatatgtggtagt

SEQ ID NO: 11723 - DNA, 76 bp, Zea Mays
catacctctgcaatgtactttgagtaactgtcttcttctggatatttttcactggcatagaaaagcatatgctctg

SEQ ID NO: 11724 - DNA, 71 bp, Zea Mays
agatagatcacggtcacggccaccactcaccagccgcgtgctccggcgtggcgccacgtggcgcaggcggg

SEQ ID NO: 11725 - DNA, 1274 bp, Zea Mays
cagccatccacgtccattagatgtcaatccaacggttgattagagaagcacacaagaaaggtgcaaagattgtactcgttcaggaattgtttgaggggcactatttctgccaagctcaaagactggatttctttcggcgcgctaagccttacaaaggcaatccaactattataaggatgcaacagcttgcaaaggagctggaagttgtcatacctgtcagttttttcgaagaagcaaacaatgcacattataattcggtggctattatcgatgctgatggcgctgatcttggactctatcgcaaatcacacattccagatggaccaggatatcaagagaagttttatttcaaccccggtgacactggctttaaggctttcaaaaccaagtatgccaccattggtgttggaatctgctgggatcagtggtttccagagtgtgcaagagcaatggcacttctgggggctgaaatactgttttatcccactgcaattggatccgaaccccaggattgtaacctggattcccgtgaacattggaagcgggttatgcaaggccatgctggtgccaacttggtccctcttgttgcttccaaccggattggcagagaaactgttgacactgagcatggcaagagctcgataaccttctatgggaattccttcattgcaggaccaaccggagaaatagtgaagcttgctaacgacaaagacgaggaagtgctggtggcagagtttgacttggatgagatcaagtcgattaggcatggttgggggatattcagggaccggcgccctgaactatacaaagtgctactgacgttggatggcgagaaacaatcataaaccccggtctcacgcttaatagtggtaaggcacaggcaggctccagctccacatcaatgttagattttttttttctccttttttaccctgtccaacgatgccatgcctgcatttgtacaagccatctgcgcgtgttcaccatttcacattcagcaaaataaataattttcgtgcaatgtcattctatgtcgggggagaatttagagctccagttcatgactgcatcaatggttcctcgttaaactttgatttatgggtagcattggtctatcaaagtaggaaggtcatacctggcagaaggtgcggaatcagcatatttgattccaaatgccattcacgatggtcgatggcctttaaccgtcaaccatccactacctttggcatgtgacatgtacctttttttccatcaaaaagctcaggattcttgtg

SEQ ID NO: 11726 - DNA, 459 bp, Zea Mays
gcagcgagccaggcgaaaccctaccgattgggtccaacaccagccgccgccatgtcgaagcgaggcaggggaggttcggcggggaacaagttccgcatgtcgctgggtctgccagtggccgcgacggtgaactgcgcggacaacaccggcgccaagaacctctacatcatctccgtcaagggcatcaagggccgcctcaatcgcctcccgtccgcctgcgttggcgacatggtcatggccaccgtcaagaaggggaagcccgacctcaggaagaaggtgatgcccgccgtcatcgtccgccagcgcaagccgtggcgccgcaaggacggggtctacatgtacttcgaagaacatgccattgccactcgacaacagttttctgacggttggacgtccatgtccttcggcttaattgtggagcaaacaaaaaatgtttgtatattcccaagcaaacgtcaa

SEQ ID NO: 11727 - DNA, 1980 bp, Zea Mays
ctcgccgtagtgccgggccgaactcgaacagggatcggggaggtggagcgcaaggtgcagaagagctactgggaggagcactccaagtgcctcactgtcgagtccatgatgctcgactcccgcgccgccgacctcgacaaggaagagcgacccgagatcctgtctttgcttccctcttacaaagggaaatcagttctagaactcggtgctggaattggacgctttactggagatctggcaaaagaagctgggcacgttctggcactagactttattgaaagtgtgattaagaagaaccaaagcataaatgggcatcacaagaacataaccttcaggtgtgccgatgtgacatctaacgacttgaagattgaagataactctgttgatctgatattttcaaactggctattaatgtatctttcagatgaggaggtccaaaagcttgtggggaaaatggtaaaatggttaaaggtcggaggccatattttctttagagaatcatgttttcaccaatctggagattccaaaaggaaggtgaacccaacacactatcgagaaccaaggttttataccaaggtatttaaagagggccattcatttgatcaagatggaggttcgtttgaactttctctagtgacctgtaaatgcattggggcttatgtcaaaaacaagaagaatcaaaaccagatatgctggttatgggaaaaggtaaaatcaacagaagacagagattttcaaagattcctggacaacgtgcaatacaaaacaagtgggatattacgttatgagcgtgtctttggtgaaggttttgtgagcactggtggaatcgagactacaaaggaatttgtgggcatgctcgatcttaaaccgggccagaaagtacttgatgtcggatgtggaattggaggcggcgacttttacatggctgcaaactatgatgtccatgttcttggtattgatctttcggtgaacatggtttcatttgcaattgaacgtgccattggacgcaagtgctctgttgaattcgaagttgctgattgcaccacaaaggattacccagaaaatagttttgacgtcatctacagccgtgacaccatccttcacatacaagacaagcctgctctgttcagaagcttcttcaaatggctaaagcccggcggcaaagtcctaatcagcgactactgtaagaatcctggaaaaccatcagaagaatttgctgcgtacattaagcagagaggctatgaccttcacgacgtgaaggcttatggacagatgctgaaggatgctggttttcataatgtcatcgcggaagatcgcactgagcagttcttgaatgttctacagagggagataggtgaagttgaaaagaacaaagacgctttcctggcagacttcacccaggaggactatgacgacattgtgaatggctggaacgcgaagctgaaacggagctctgccggcgagcagaggtgggggttgttcattgccaccaagtgatttggcctggcagcaggagggctcttcggaataagaatggatgtggctctaactctgcttctagaccggtgatggttcagcttagaagcaggggatcttcatcatcagaataaaaacgtgtgttgttgtgttgctgtgtctacgccactagtatttctgttgttacttatgttctaggtaaactgcgcagccagagcagagctgaagaatatgtactgcttgctcgctcttgtgtggttgtgtctacccctactagcatttcagctttgttgtaggtaaactgcgaacccagagttgcagaacccgtactgctcgtttaagttcatggtgaactacgagctaaaaggctgttgccagagtcgatgtcacttgtcactggaggtccccggttcaattcagatgttgctttggcacgtgctattcttttggacggaggcagctagtgtcaagtacttcgttcgggaaaagagacaacggaatcct

SEQ ID NO: 11728 - DNA, 1340 bp, Zea Mays
attatccacggaatggaatcgaatcgtccaggaaaggggaggaccggagcgagagcgagatggtagtggtggccgccgcggccgcacgcggccgcgctgtaaagcccctgttcctcgtcctcgtccaccacagccgccccgcgccccgcctcccccgccgaaccgcccgcgcccggccgctgcgcttcctctcctgctcgacctcagcgccgccgctgttcgcagccgtcgcatccatggactcgccgccccagggttaccgcaccaacgtcggcatctgcctcgccgacccatccctcaccaagattttctcggcttctaggatcgacattcctagcgcgtggcagatgcctcagggtggtatagatgcaggggaagaaccaagggcggctgccttcagggaattgagagaagagactggtgtcacatccgcagagatcgtggctgaggctcccgtctggttaacatatgatttcccgccagatgtcagaaccaaactgaatgccaggtggggaaccgattggaaaggccaagctcaaaaatggtttttatttaggcttactggaaatgacgatgagattaaccttaatggtgatggatctgagaagccagagtttggtgaatggacatggatgacacccaaggaagttatcgaaaaggcagttgatttcaagaaacctgtatatgaggaagcattgaaacactttgccccctacctgcagtcagatccagccgcttcatcatagaagatttggccaatttgcttgcatccctgctgtatctggacccccaataatttgacacgacgcaatgtagccatgaggtgtgctatacaatttgatagtgtgtggcctgtttgagtgaattatatatgccagcattggatcctcgccctctacttagtcacataagtatacaataagtggtggaaacagtttcagccaatctggaacatggtggccagtgtatcttgtctgccaatgactgaatgctttaggttgaagcaataccataattccagagagactgcggtacagcaacctcaggttatgtggggggtcgtcggcaaaacgacgctcgtttggcattggctacggcagaaactagtgtctggctgccattggttgtgggaggagcagaggaaaacaaattgttggttacactctgtactactgcgtcatgatattgtcggctttcgctttgtggcttttggaggaaaactggagatgtggcagctttggctttacgcatcttggaggaacaggagatataaacacacgcatttcgtttttttttttgaaaaaaaaactctacttggaggatactctattacatgctag

SEQ ID NO: 11729 - DNA, 142 bp, Zea Mays
cgaaccatccacgggtttgatccaaaccctctgccacaaaattcccaggaaaattcttttcaaatagctctcgattctcaaatggatagtgaatgtaggcatatggcattgatccactctcaaaccagcagtcaaaaacctg

SEQ ID NO: 11730 - DNA, 846 bp, Zea Mays
attagagggatgcaaaactacattgtctgcataatctgggatgcaccacttcattgaggaactcagtgctactggaaagtttgaatttatggaccttaatgtggatgaagctgaacatagcatggaaatgcatttgccctaccttgctaaagtatttcaaggacataatgtgaaagtcgtccctatccttgttggtgcacttagctcccaaaacgaagccttgtatgggcagctgctctccaaatatgtggatgacccaaaaaacttcttttccgtgtcgtcagacttctgccattggggatccaggtttagctacacatactacgaaaagaagcacggtgccatccataaatctatcgaggccttggaccgtatgggcatggagatcatagagactggcgatcccgtagcgttcaaagaatacctgcaggagtacgagaacaccatatgcggacgccaccccatcagcgtcttccttcacatgttgaaacattgctcgacaaaaattaagataggctttgtccgctacgagcagtccagccagtgcaagaacatgagggatagcagcgtgagctatgcatccgcagcagcgaaggttgctggtgcatccggggaagaagataaacaagactgagcgagctacagctctgtttgatatactatatataagccgccaaaccttggtgcggaatgtgtgactggtttcccataagaaaaagaacatgtgatttggtaaaacattttcttcttcagtaaaataaataaatatgcagactgctggggatctgtactaattaattaagagattttcctaacaaagtaaaaaaatatataaataataatcaa

SEQ ID NO: 11731 - DNA, 250 bp, Zea Mays
tatagatcctttagaccttcggagtttgaagctagaggtgtcagaaaagttaccacagggataactggcttgtggcagccaagcattcatagcgacgttgctttttgatccttcgatgccggctcttcctatcattgtgaagcagaattcaccaagtgttggattgttcacccaccaatagggaacgtgagctgggtttagaccgtcgtgagacaggttagttttaccctactgatgaccgcgccgcgat

SEQ ID NO: 11732 - DNA, 107 bp, Zea Mays
ggacaaggaagctttgaggagtaaggaaaaaattactcgagttcttgggagctgatcaacgtggggcaggaattgcagcttcttttagtgaaactgcaccaccctgt

SEQ ID NO: 11733 - DNA, 51 bp, Zea Mays
acccgactcgttgacggcgcctagtggtgcgacagggtccgggccggacgg

SEQ ID NO: 11734 - DNA, 62 bp, Zea Mays
gttttggcaccctgttcatgtgatgtcgtggccatcggaggagcactggagccttgcggaag

SEQ ID NO: 11735 - DNA, 755 bp, Zea Mays
cgtcgcagaatggaggagccggaggcggcaagcagcagtacggcttccggccgactgagcccgtcgggttcggcggcgctagcaggggcgacgccgtcgttgacgtcccgctcgagaccatgggggactctcggagcaaggtgaaggagctctcgtcgtgggaatcagatctgaagcggcgagaggcggatatcaagaggagggaagaggcgctgaagaatgctggcgtgccaatggaggagaagaactggccaccattcttccccatcatccaccatgatattgccaatgagataccagcaaatgtgcagaagttgcagtatcttgcatttgcaagctggcttggaattgtgctttgtttgtcctggaacttcgttgctgtcatagtctgctggatcaaggagggagattcaaagttgtttttccttgcaacaatctatgctttgcttggaattcctctgtcatatttgatatggtacaggccactctaccgtgcaatgaggactaacagtgctttcagttttggatggtttttcctgtgttacctgatccacattggtttttgcataattgctgccattgctccaccaattgtatttcatgggaaatcattaactggtattctggctgcgattgacactttctctgaacatgtgataattgggatcttttactttgtggggtttgcactgttttgtctggagacactgctgagcattggggttcttcaggcttgccttagaggtggtgtcatt

SEQ ID NO: 11736 - DNA, 78 bp, Zea Mays
ccaggggctacacatcttataactaaaaaacacatgagcagtttatgaggctgtcaggttttcatttcaatgcaaatc

SEQ ID NO: 11737 - DNA, 1434 bp, Zea Mays
attccttcctcctcatccaggcagcacagctccctccccactcgaggctccgagctttattttttcttgttttgttttgttttcttggtaggagtaacaatagtttctggcagccttcttcctcctcgctctctacccgaggagagaggagaggagagaaatccggaggcaaagcttcagggagaggagagcggcctgtcggcggcgtccccgctgttctgcggctcgccgccgcggcgggcgtcgaacccggtggtccacgacagccggttcggcgtggactgcccgcccctgcccgtgcccatgccggtggcggcggcggccgtgcaccggccgtcggcggcgccgcccatgtcgccgcgcggcggcaacgggtgcgcccgcgcccggttcgcgttccagcccgccgcggtccgcgtcgagggttttgactgcctcgaccgcggccgcggcggccgtggccacggcatcaccgccatggcctagatgcacatacaaacgaacaccaagtaacccactcgcatccccctcttctttcgccccctcctccatccatggtgcgaagaaagtgtaaccatccaagcactttgtcggaggagagagggagagagaggatcaatcaattcgtcctaaatttaaccctcctaaaaaccacttatattactacttttatttatataaatccgtccccatcccaaccatccaccagcccgcccgccccgcctgatccgtcccagcgattgctatgagtttaggtgattttaccacagatcttcctcttttttttgtatgtaaataaagtttgaggtccaggctcgtcatgtaaattcgggagcgagtgaaatcgggtacgtaggaattaggagcagagggacaagagggcctggctgcttggcaacagcaacaacagaaaaaatgggggaaagaagagggaagggccttcttgatcaagaatcaagatctcgtctcctgtctgtctcctctctcggggagggagggagggaggattggttagtcgttggattaggttggggagtgggaggtcgtgggagtagttaggtaatctgtcctagttcatcaatcaacgaggttttctttttctctttttgggttttcgatggaattgtttttgtccgtccgtccatgcaaccaaggaagaaaagaaatttccaaggcccatggagaatctgtacaaaagagtggctacgtgcaagagggcaccgttgagtctgtgagcagaagcaagcagcagcagcagctaggttgttcagtcaggcagtggatgagctgtgtgtgagagagagacatttattttgtggcgttttccctttttcccccttttctcatgttgtaatatcctgctgtgattgaaatgaaatcaagctgtataatactggtagtattattaggctatccgcaaccgttacccctaaa

SEQ ID NO: 11738 - DNA, 74 bp, Zea Mays
gacctcgccttgactgttggccagcttgtatgttccgggcttcaaaaccttggcgatgacgaacggcccttccc

SEQ ID NO: 11739 - DNA, 210 bp, Zea Mays
gtttcgcatacggccggtgcgcgtcgccaagccccccatccgcttccctcccggccatttcaagcactctttgactctcttttcaaagtccttttcatctttcccctcgcggtacttgttcgctatcggtctctcgcctgtatttagccttggacggagtttaccgcccgatttgcgctgcattcccaaacaacccgactcgttgacggc

SEQ ID NO: 11740 - DNA, 80 bp, Zea Mays
aagccttcggtcaaggagtcgctttagaggccagcgcacccgacgatagagttctgggttctgctgatgacactgaattg

SEQ ID NO: 11741 - DNA, 1163 bp, Zea Mays
tgttcagcttgattcgttttatttagtgaaatgtgatatatgctctcgtccttttgctctttcagcaaggtggtgttcccaacaagcctaaaggtcctcttgaggcactccgacccaagcttcagcctacgcaacagaatgcccgcgcccgccgaacttcatatgcgtctgcggacagtgacgacactttgaatctgtcccccgaggatctggtcccgcaaggagaacccagccagcagggagaaccagtcgaggacaagaacaaggaataaacacatgcccagcatagctactgtactgtaccccttttcatacacaagatgccattttccgccgtcgcacaaaaaaaaaacttcttttgccttggtaataagcgtgttgattcggttccggcccaacggtcccggtgaggctgaggttgagacacgtgcagcttgaactgcatgtgagatgtggtatccgctgcactgggctgttgggggtccttgggatgcatgaacaaataaacaatgatgcttgcgatgtttacattgctgtacctggacctgtgttacctctatgcaaacacatgcaaatccgatggtccgagactcgaaactctcccgttgagctgaaggagttgctgtactaataataatgaagattttttttttgttctgatgttgcctatagatgcatcgcaatgctttcttttatttgcaccctgtgcatgttattattattcgcctgcttggctgtcggggtactggttggtgcgtttttctctgtaaatgagttctgcgcccctatgctggttaacaactagtgtattacgcgcgcccttgctcgcgtactgaacaacagtgtgaaataataattttatgagcatgttgaattagatatcgtatcacggtcatatgtacaatggaaatagtagttatgaagcaaataattacataagtgcatatccaaacttaagtagattgtagttcttacaacagttatagagtaaactgatctgctaatacatagtattaagtagtatttgagtaccatacatcaaagagttaactacacttcgttcgtgggggttgcatgaatatatacaaagatgtaaaggctttagcagtttggttatctatacacaaaggcattcttgcttcaaaagtgatgatgctacgcaa

SEQ ID NO: 11742 - DNA, 2605 bp, Zea Mays
aaatcactcgacgcagcaggcagcacacaacccaacactactctccctcccagtctcgccaacgccaccacccccaccattccaaacccccgtctcccaccggctgccgtttccctcccccctccctccctgcctccctcggcggctcctcgcggacggagagaaccccgctcccttgcctagggttcccggaaccctagccccgatccgtacgcgcgagggtccccggcgacgaggaggctgctgtgaggggagggggcagaaggcgcgggaggcggaggcctgtgctgtatgtcagatcgtgggagccggcgaggcggaggcggaggaggagactacggacacggtcagctcgcgaacccgctccaatggccgcagctaaggaaaaggcgtcggtatgctgccgcgatgcgcccgcgcgtgtcgctggcgccccagtcgtccccatgcgcgcgatcgccgcgtccccggtcggcaaggtcgtcgccctcgccgcgggaggcggtgagcgcgtttctgcgtcggctgctggctcaagcggcgccgtgatcgaggagatcgccgcggtccagcccaccaccgcgaaggcatcctccaaagggataccaataatgacaagagcccagaggtgtcaccctttggacccattatctgctgctgaaattgcagttgctgtagcaactgtaagagttgctggaagatctcctgaggaaagagacagcatgcgctttgttgaagctgtgctgttggagccagaaaagaatgttgtggcactggccgacgcctacttctttccacctttccaaccatcactgctccctagaagcaaaggttctgctgttattccaagcaggctacctcctaggagggccagacttgttgtctataacaaacaatcaaatgagacaagtatttggatagtggaactatctgaagtgcatgccgctactaggggtggacatcacagagggaaggtgatatcatctgaagttattccggatgttcaacctgccatggatgctatggagtatgctgaatgtgaggctactgtcaaaagttatcctccatttattgaagctatgaagagaagaggtgtggatgacatggatcttgttatggtggatgcttggtgtgctggctactacagcgaagctgatgctcctagtcgcagacttggcaagcctttgatattttgcagaactgagagtgatagccccatggagaatggttatgctcgtcctgtagaaggaatccatgttgttgttgatatgcagaataatgctgtgatagagtttgaagataggaagttggttcctctaccccctccagatcatttgagaaactatactcctggggagacaagaggaggtgttgatcgaagtgatgtaaaaccacttatcatcaatcagcctgagggtccaagttttcgaattaatggctattttgtggaatggcagaagtggaacttccgtattggcttcacccccaaagagggtttggttatctattctgttgcttatgttgatggtagccgtggacgtagacctatagcacataggctgagctttgttgagatggttgttccttatggagatccaagtgaaccacattatcgcaagaatgcatttgatgctggagaagatggacttggaaaaaatgctcattctcttaagaagggatgcgattgcttgggctacataaaatattttgatgcacatttcacaaacttcactggtggtgtggagacaattgagaactgtgtttgtttgcatgaggaggatcatgggatcctttggaaacatcaagactggagaactggtttagcagaagtaaggcggtcaaggaggctcactgtttcatttatctgtacagttgcaaactatgagtatggtttttactggcacttctatcaggatgggaaaatagaggcagaagtaaagcttactggaattctcagtttaggggccttgatgcctggggaatcgaggaaatatggcacaactattgcccctggtctgtatgcaccagttcatcagcatttctttgttgcccgtatggacatggctgttgattgcaaacctaatgaagctcataaccaggtggttgaggttaatgttaaagtggaaagtgcaggcacacataatgtgcataataatgctttctatgctgaagagaagttgctcaaatctgagttgcaagcaatgcgtgattgcgacccttcatctgcccgccactggattgtacgcaacacacgaactgtgaatcggacggggcagccaactggctacaggctcgtacctggttcgaactgcctgcctttggctctgcctgaggcgaaatttctgaggagggctgggttcttgaagcacaacctctgggtcactcaatacaagcgtggcgagatgttccctggaggggagtttcccaaccagaatcctcgcatccatgagggtctgccaacatgggtcaagaatgataggcctctggaggaaaccgacattgttctctggtacgtgttcgggctcacccatatccccaggctagaagattggccagtcatgccggtggagcacataggcttcatgctcatgatcaaaaaaaaaaa

SEQ ID NO: 11743 - DNA, 84 bp, Zea Mays
ttacagatgtaggtgttactgtctttagaaggagtgatgattcaatagcttttaagggagtgttagagggtcagctatacttag

SEQ ID NO: 11744 - DNA, 863 bp, Zea Mays
gggatctcttggtcgccgctggaaagatccagtgactttggcccccatcatgtatgatcagatttttcgtccaagcaagttgtctgggaatgctgattttcatctattcaaggctggagtagagccaaaatgggaagacccagagtgtgcaaatggtggcaaatggactgtcccatgcaacagaaaggcaacctttgagaccatgtggcttgaaacgttgatggctcttattggggagcagtttgatgaaacagaggacatttgtggaattgttgctagtgtccgtgcaagaggagataagctggcattatggactaggactgccagcaatgaagctgtccaggtaaacattggcaagaagtggaaggatgtcatcgactacaacgacaagatcacgtacactttccatgacgactctaagagagacaagcccagcagaggtgggcggtacaccgtgtaagctggacgtcaagaaggccgttgctttggattggaagtggagagcggaggtggggattttcttctgggatcgtcgccgactttcgtttgattcagcttttacacgaggcagttttcgccgctattacaatgttattttcctctcagacagcttatgtggtacaagaaagagacgttggagacattgacggtttctgtatggcactagatttctatcttaatatggcccccccggttcagtagcaaccccaacgagtcatttgctttttggagatccctgcaatgcatggccatgttttagatcttatatatattgtactgtatataaaacgtttgtgatctgtggagccattggcaccttgcatgcaaatgtgccctgtcggtaaggtattggcattttgtgt

SEQ ID NO: 11745 - DNA, 2664 bp, Zea Mays
gagtaggcgagacgttcatgggttagatctggcggtccggcggcgcggatctgagcgaggtttcggtggagagatcgggtggtggtcactatcttcgcctcatttcgagtagatggagcgtctcatggccaaatcgggcatgtatggcggattctgctactgtctgaagcagcgttgcctgcagatctgaaagtcacttggtctccttgcccagttgaccttactgaatgacattgctttccgcggtttgactgtcattacatccttttcggtgtctgatcaaaaatttttagcacgagatgacgtgcttctagttgttgttgatatcttgtcctgagttgagtaaacctgaagctggaaaggagcggatcacattcgtgctcttgctcttgttgacttctaggtctatcttagatacctagaggctggaaggggtcagatccagttcctgtggtcctagtaacaaggtcctcttgggggaaggcgccatgacctacttccccgaggaggtggtagagcacatcttcagcttcttgccatcgcacagcgaccggaacacggtctcccttgtgtgcaaggtgtggtatgaggtcgagaggctgagccgacgagcggtgttcgtagggaactgctacgctgtgcgccctgagcgtgtggtgctgcggttccccaatataaaggccctcacggtgaaggggaagcctcactttgcagacttcaaccttgtgccgcctgattggggtggctacgcagggccatggattgatgcagcagcaaggagctgtgttggtctcgaggagttgcgcatgaagcggatggttgtgtttgatgagaaccttgagctgctagctcggtcattcctgagattcaaagtccttgtccttatcagctgcgaggggtttagcaccgatggtctagctgctattgcgagtcactgcaagctcctgagggagttagatttgcaggaaaatgatgtggaggaccgtgggcccagatggctttccttccctgattcctgcacttcgctggtctccttgaatttcgcttgcatcaaaggggaggtgaattctgtagacacactctcaaagatactattgcgagccccaaatttggaagacttggggacaggtaatctgacagatgagttccaagctgagtcctattccaggcttactagtgctctggagaaatgcaaaaagctgagaagtctgtctggattttgggatgcttctcctatttgtgttccgtatatctatcccctctgtcatcaactaacaggcctaaacttgagttatactcccacactggattattctgatctagctaaaatggtcagccgctgtgtgaaactccagcgtctctgggtactggattgcatttcagataagggtttgcaagtggtggcctccagttgcaaggacctacaagaactcagggtgtttccatcagaattttatgttcctggtgcttctgcagtgacagaggagggacttgttgcaatatcgtcaggctgcccaaaactgacctctttgctgtatttctgtcaccagatgaccaatgaagcgctaattactgtagctaataactgcccaaatttcatcagatttagactctgtatccttgagccaaagaagccagatgccatgacaggccagccgttagatgaaggttttggtgcgattgtccgtgaatgcaaagggctaagacgtctgtcaatatcaggtcttctcacagacaaggttttcatgtatattggaaaacatgcaaaatacctcgaaatgctttctatagcatttgctggagatagtgataaggggatgatggacgtgatgaacgggtgcaagaatctgaggaagcttgagatcagagacagtccatttggcgatgttgcactcttgggaaatgttgccaagtatgagacaatgcgatccctttggatgtcttcatgcaatgtcacattaaaggggtgccaggtccttgcatcgaagatgccgatgctcaatgtggagatcatgaatgaactagatggaagtagtgaaatggagaaccatggagacctctctaaagtggacaagttatatgtttaccgcacaactgctggagcgagggatgatgcaccaaattttgttaagatcctacagagctagccgcgactacccttatatcttcccaccttgagagatggtcggtggaatccggcatgcctggggccagggcaacagtggtaagttcttgaatcgtctccccttttgcagggtcaggaaaagccacactggcctgcgcccttatcgtggagcaacacgaccgggaatccatcatcatcctctgtaccaccgcccccctccctttcagtgtctggtcatatggccacccaggcccccctttattacctgtgaattctcccactcgagaggaggggaccgaacggataactttttctagccatgtaacatctctagtgtacttgtctccatttgcttttgacattggcacggtggattgtgttgctggcgtcgctgttgtagtgttttgtttcgcaaacctgagaattatcgggacattccggggacgacgctctgtttcttgctcctgtgaatgcatggactgcatgtaatatttgatggccttgcaggatttatcgtacacacttttcgcccttgcata

SEQ ID NO: 11746 - DNA, 1173 bp, Zea Mays
ctctggtttaggataggatctgaatgcccaagtgcctcagaggagagtctgcgtgtgtggtactggtagtctggtaatggtagagcaaggaaagtaacaaaagctcgcggttgtccagaactggaatttattctgcgtctgaacatagttgtatgactgtatgagttgaagctttcagtatgtgcatcgatggatgatgatagattcaaagactggtagcaattctacaaatttaggacgacttatatagaatagaaggctagctattgttagtaaatgtttggttatgtatcaagctatgttgtagttatgttcatgcttgagcttgacatagttggaagctaataatctgttgtctatttctgatatgtgcctctcttttttattgatttcagctatggagctggctctggccctggaaaagctggtcaatgagaagctgcacaacctgcatggtgtggcaacaaggtgcaatgatcctcagctgacagacttcatcgagagtgagttcctcgaggagcaggtggaagccataaacaagatctccaagtatgtcgcccagctgaggagagtgggcaaggggcacggggtgtggcacttcgatcagatgctgcttgaggaagaggcctaaaaagaagaacggacagatgaatgaaggaaacaagtgtgtaatgttgatcaggcggaggaataataatgggtcaactgacaactctgggtcggtggatttgtagttggtttgggttttttagttgtagaacggtgttgccctcctagagagggatgaacacattatgcatgcgatgtgtcagttcggtcggtgctatgctcgttgggatttgattgtcggaaataaaacatgggtgatgaatgtgtaccctccctaatctatgaagttgagaaagccctgcgggtgtaggtggatttgtagaggtttttcttcagttggttaggttcgctgttgcctacctcatttgcccctaatcatcatcgccgtaatttatttataataaaaaagatccagcttttccccctctcatggctgatttgtagaggccgcgctgtagtcggagactcgaggaggagcccgaagcggtcagggagctcgtgtaggactgtagggatgaaaatcatcgaaaacatatatttattcagtttatttatagaatctgc

SEQ ID NO: 11747 - DNA, 50 bp, Zea Mays
agaaagaatgtcaagaagaagaagcctcaaactaaggagaagaaaccgta

SEQ ID NO: 11748 - DNA, 785 bp, Zea Mays
tttatgagaaggcttgactatctatttaccagaacacccaaggaactgattctgatagcgatccgaacaatactactgtatttgttggcggccttgacccgagtgtgactgacgagcttctgaagcaaactttcagtccatatggagagcttctctatgtcaaaatacctgtaggaaagcgctgcggatttgtccaatattctaacagggcatcagctgaggaggccataagggtgctaaatggaagccagttgggaggtcagagcataaggctctcatggggccgtagccctgcaaacaagcagcctcagcaagagcagagccaatggagcggtggtggctattatgggtatccccaaggatacgatccatatggctatgctcggccccctcaagatcctgccatgtacgcctacgcagcatatccagggtatggaaattaccagcaacagccaccacagcagcccccgccacaacagtaatgatgtcccgagagtgatcatttgcaagctggtcgcaaagtagctggggggttggggcgcagcaactttggtgcgttggcatgagaaattttgcggcggttgcttgtgttgtgttgtattgttccgacgcccttgtacacgtagcctgtgttgtaactgaatttttgccgaggccttatgagtgactagtgtttcaactgtaactggattgcacatttttgtcgcaaggaatgtactattattgtgtggctcgtgccgctttgaacgctgagtcccggtattaatttttcttcatgctcttat

SEQ ID NO: 11749 - DNA, 1789 bp, Zea Mays
tgcacggtctgttgcctcatcagggtggtgactctggctccaaaagaccaaagtttgagcaggatggagcaggagatattgttatggagccacacttaaccgaggataaacctgtgcggatagaccaagaatcatcgtcaacatctaatagggatgctgaggcaagcacatctactagcatgaaacctgttaaaactgaagaagcaggagcagatcttcttcccaaagagatgaatattatgacaattagcgacgataaagctgatggccataatgataaggaaggtgagggtgttacacttgatgggactggaacagagacagggcagataattgtgacaacaataggaggtcacaatgggaagccaaagcagaaggtctcatacatggcagaattggttgttggtactggttcgtttggtattgttttccaggcgaaatgcttggaaactgacgagacggtggcgataaaaaaggtgttacaagataagcgctacaagaatagagagctccagactatgcagttacatgaccacccgaatgtagttcagctgaagcatcacttcttttcaacaactcaaaagggagaagtttacctcaaccttgtacttgaatttgtatccgagacagtttatcgtgttgccaaatactacaaccggatgaaccagcgtgtacccataatatatgttaagttgtatgcatatcagatgtgccgtgcgcttgcttacatccatcgagttgtcggtgtgtgtcatcgtgatattaaacctcaaaatctactggtcaatcctcatacacatcaacttaagatttgtgattttgggagcgctaaaaaattgggctcctgaactaatatttggagctacggagtataccactgcgatcgatatctggtctgttggctgtgtagtggctgagcttctgattggtcagcctttgtttcctggtgaaagtggtgttgaccaactggtggaaataataaagattttgggtactccaacaagagaggagatcaggtgcatgaatccaaattattccgaattcaagttccctcagataaaagcccatccatggcacaagctttttggtaagcgcatgccacccgaggctgtcgatctcgtgtcaaggctgctccagtactcaccgaacctgcgctgcactgctgtcgacgcctgtgcccatccgttcttcgatgagctgcgggaccccaaggcttgcctgccgaacggacggccaatgccaccgttgttcgacttcacagcagccgaactcgaagggctccccgccgagcttgtccaccggatcgttcctgaacacatgaggaaggaagtgaattaggtggacggacgtactggggcaaaaaaaaaaaaaaaactccctgtttctctgttggttctgagagatgtgtgagggcacggatatggaggagcggtggtgtattgtaattgtaaagagggctgaaagaaaggtccctctggttgggcgtgtcaccaaagagtggccctagaggcaaaccttacgtttgctcgttgcccttggtgtgtacccagatgtgtatcgatgacataggctggctgctgtatcatcatcagggttgacgctgaacaagagaaattcaagcagggtgctgctagctcgcttcctcccgtagctggaaaccccagaatgccagtttccatcactgcacgtcgtcgcgctgtccactggtgtcccgtaagcatatagagctctgccggctccgctattggcttgcgtgtgtctatcgataatgacttctacggacgctacc

SEQ ID NO: 11750 - DNA, 609 bp, Zea Mays
cctcaccacaattggaactaaaagtaatgaaggaatatgtgcagaagttcattgattgccaagtcaaggatgtggcagagtttgaagttgagcgagatgagctgatcaaagtccacgaggacaagaagttgaagctcaagaaagaatacatggatctggagctggagctggagaaggagtttgacgcagccctgacgggcctgatggagaagcataagccagataccttcgaggcctccagctcgtaagggggcttcagcggctaagcgctttccttaggccccagctaagcttggagcagtctcgtacatgctcctgcttgcttatccatgaaataatgcctggacagtctgtagatgttgcgaaaacatggtgccccctgtggttgccgcgtgtgtagtaagtatctctcagtcgtagtgtggttgaagcatctgaactcttgagcggtttgcctgtgatggcatatgggtcaaactacaactggagtgtgatatctagtttatatggtccagcgctcttgttgactgcgggtggtggtttgccccggataatttactgattatgtctgctccgatcgtcaaagtgcctctttctgttttttttctt

SEQ ID NO: 11751 - DNA, 1079 bp, Zea Mays
agatgatgttgactgccgcttgtgagaattggtcttcgtgtccttactcgacccatgccagaccagctacctaaaatctacaggaacctgggggagaacttcaatgagagagttctgccttcaatcattcatgaaacactcaaagctgtggttgctcaatacaatgccagccagctgatcacccagagagaggctgtgagcagggagattaggaagattctgactgagagggccaacaacttcaatattgctctggatgatgtgtccatcacaagcctcagctttggaaaagagtttactcatgccattgaagccaagcaggttgctgcacaagaagctgagcgtgccaagttcattgttgagaaggctgagcaggacaagcgcagtgcagttatcagggcacagggtgaggctaagagcgctgagttgattggccaagccattgccaacaaccccgccttcctggctctgagacagattgaagctgccagggagatctcccacaccatggcggcctccagcaacaaggtgttccttgattccagggaccttttgcttggtcttcagcagctgaacgtggggggcaagcaaaagaagtgaagcggtcgtccccaggccatcgcggatgagagtagtttcaggcgatggttttatctgttacagaatgcgcatgcgcgggaatgaacaaagtggcaccatgttgcagtctgtatgtactgacaagtttgtctatcgatctttgattctctgctcttgtaagtcgtgactgatgaatctgttgttgcaattgccttcctggaggcttgctctgatgcgtgtaacagccattccattgctcgtagtcgcagacgtaattcagcgtgtgagttcaatcaggacccgtgtgactggttgtggcatggtggtagcctggcccgacttgtctagtatgtggagccagatttcatatatccaggctaggctcatgctcatatttatgtttggttgtttgcgttcaggtcggataaagatatgtgtttggctgtatgcatcaataccaagatcaaataaagtaaataaataaatcttcaaaattaaat

SEQ ID NO: 11752 - DNA, 1625 bp, Zea Mays
gctcatactccttttatgataccatgaatcacttctgtcctgtgaaaatggcggatgaactacgctcaacgtctgtgggtcagaagttccatgggcagtccgtgctgttgagcagaatctcttcctattccgccatgaacaaccctgtattcaacaatgcctattctgcttacaatgtgccccagaggtcatatcatgggatgaatgcaactgctggactctcatctgtcatggcaccatctcctgtctttgcttctgccccaaaagagaaaggcttttctggatttatgatcgactttatgatgggtggagtttctgctgctgtctccaagacagctgcagctccgattgagcgtgtcaagcttttgattcagaaccaggatgaaatgctcaagactggcaggctttctgaaccgtacaagggtattggggactgctttggccggacaatcagagatgagggttttgtctcactgtggagaggaaacacagctaatgtcatccgttacttccccacacaggcattgaactttgcgttcaaggatcacttcaagcgcatgttcaactttaagaaggacaaggatgggtactggaagtggtttgctggaaatctggcttctggtggagctgctggtgcttgctctctattctttgtctattctctggactacgcccgtacgcgtttggccaatgatgccaaggctgcaaagaagggtggtgagaggcagttcaatggactcgttgatgtttaccgcaagacccttgccagtgatggtattcgtggcctctaccgtggattcaatatctcttgtgtggggatcattgtgtaccgaggtctttactttggtatgtatgattccctgaagccagtgcttcttgttggtaccctgcaggataacttcttggccagcttcttgctcgggtggggtataaccattggtgctggccttgcctcctaccccattgacactgttcgccgtcgcatgatgatgacatctggtgaggccgtcaagtacaacagctccttggacgctttcaagcagattgtcgcaaaggagggtaccaagtccctcttcaagggtgctggcgcaaacatcctccgcgctgtagctggtgctggtgtccttgctgggtacgacaagctccaggtggttgtcttcggcaagaagtacgggtctggtggtggctaaggatgtataatgatgatgacgacgaacaacaaacatgatgttttaggtgcctcctttaagtaaacatacgtacggaccctcgacaccattttaagttcgctctcgcagaggctggtgagtttgtagcgtggctgtgaccgcacctctttttatgtcagagattggaaataagtgacgttagaaattgctgtcttgctgcatcagttttttatactccgttttttgttttgcgcgtgcaaagggttgctcgaatgtatctatgtaggtttcggaatcacagcttactatgtttgatgaaggtgtatgttctgtgacctttggcagcatcacttcatctgtctagcgctacatgattttaaggatcatctggtattattacggtaacactcgatgtttgatgggggtagtgaatgctcatatgagtgggttcgagag

SEQ ID NO: 11753 - DNA, 187 bp, Zea Mays
ggagaatgcgcagcgcgagatttgtagcgggtttggactctggaggcgctcgcgcggtgggttttgaccgaacacgaacactcagccactcaggtctagcaggtcttgggttaggtaggcgcggcgaagcacggagcagcggcgtctccactcgcgccgcgctggggtggtgccgtcgtgagaggtg

SEQ ID NO: 11754 - DNA, 87 bp, Zea Mays
catcatgtacacggcaacacagtataaggtaaaaagaatttacaagagagcaagcaataggtataagtattataccggcttaagatg

SEQ ID NO: 11755 - DNA, 1620 bp, Zea Mays
aaaaagcaagcattaaataagataatttgctactgaagttcaaaatgactggtagccaaccaaaaacagtacttatttttaaaaaaggaaccagctaaaagcaaactctgaggcaacacgttacaccagtgcggcgcggtgacgaatatacgagtgggatccatttcatacagcagggcgcaccagactcatcttcaggaattggagccagtgctactgttatttctgcttataaccttatcatggcagttcatgtattggttcacaatgagccggtaacgcctgacgtaccatgtcgaacttccccagaaacttctttttttttttggaaaaatttcccaaaaaaacttagaagcacttcatgtggacaatgcccggaccagtttcgtcatactctcccttggagatccacatctgccaacacatgctgagagaagccaaaatagagccaccgatccagacactgtacttcctttcaggtggcgcaatcactttaaccttcatgctgctaggagccagggacgtgatctccttgctcatacgatcggcaatcccagggaacatggtagatcccccactgaggacaacgttaccatacaaatccttcctgatatcaacatcacacttcatgatggagttgtacgtggcctcatggacgccaggcgattccatgccaacaagggatggttggaacagcacctcggggcacctaaacctttctgacccaatggtgatgacctgaccatcaggcatctcgtagctcttctcgacagaggagctgctcctggcagtctccagctcctgttcataatcaagggcaacgtaggcaagcttctcctttatgtccctgacaatctcccgctcagcgctcgtagtgagggagtaccctctctctgtgaggatcttcattaggtggtcggtgaggtcacgccccgcaagatccaaacggagaatagcatgaggaagtgtgtatccttcatagattggaaccgtgtggctcacaccatcaccggaatccatcacaatacattgctgggcattcgaaggtttcaaacataatctgcgtcattttctctctgttggccttggggttgagaggggcctcggtcagcagcacagggtgatcttcaggcgaaacacggagctcgttgtagaaggtgtgatgccagattttctccatgtcatcccagttgttgacaatgccatgctcaatcgggtacttcagtgtcaggatgcctctcttggcctgagcctcatcacctacgtaggcatccttttggcccatgccgaccatgacaccggtgtggcgtggtcttcccacaatgctggggaagacagctcttggcgcatcatcaccagcgaaaccggcctgtaaatattgaggagttgagcaacaattaggtcacaggagtagagttgctttgttggaaaagacttctgaacgagataacaaccttgaccattccagtgccattgtcacatacgataggctggatatcctcgtcagccattctcaactattctgtaacagaccaaagttcagcgttcagtacacattcatagaaaaatgcagttatgcagcctggtcggggaatcaaaatacactttctgctcatggtt

SEQ ID NO: 11756 - DNA, 1104 bp, Zea Mays
gtgagcagagggcagagagggatggattatcggcaagcctgcaattctactgcacacctcagatgctggcgagagctgggaaagaatacccctgagtgcccaacttcctgggaacatggtttacataaaagctactggggagcagagcgcagagatggttaccgatgagggagcaatctatgttacctctaaccgtggatacaactggaaggctgccgtgcaggagaccgtttcagctactctgaacagaacagtttcaagtggcattagcggtgcaagctactacactgggactttcaacacggtgaacagatcggccgacgggcgctacgtggctgtgtccagccgagggaacttctatctgacgtgggagcccgggcagccgttctggcaaccccacaacagggcggtggcacggaggattcagaacatggggtggagagcggacggtggactttggctgctggtgcgcggtggtggcctcttcctcagcagaggaaccgggataactgaagattttgaggaggtgcaggtgcagagccgggggtttgggatcctggacgtgggctaccgctcgcaggaggaggcctgggctgctggtggcagcggcgtgctgctcaagaccacaaacggagggaagagctggatgcgcgacaaggctgccgacaacatcgccgccaatctctactccgtcaagttccttgatgacaggaaaggcttcgtgctgggcaacgacggcgtgttgcttcggtatcttggctgacattctatgtatatgtgtgtacagcgaacggcatgtgctgctgctactactactgtaaaaggctgcttactgtgcttgcgttctctcttctgcaacccaaattgagtgtaaagatgcatgtgctgcttgctaggaacttgaaaaccttgtatacccgtatctactatctatatatatgctaccttgttgcaaacaaccctcaaaccattgagaagctctccattctcaatgcctgggacaaatcattctactcaatctatttgcatttttctacgaagacccatattaacaaaggccatctttcagagccaataaaattccctgcatattgcaatcttgac

SEQ ID NO: 11757 - DNA, 641 bp, Zea Mays
ctccctgaatgtacttcacatgatgattgttggcatcgagatcccgaagtacgtcgacacagttactccccagtacaagccaaagtttgatgctgtgattgctgaattaaaggaggctgagaaagagcatcagaaggagtcagaaaggatagagaaggaacttgctgaaatggaggaaatgaggaaaaagatcagtacaatgacagcagatgattactttgagaagtaccctgaactcaggaagaagtttgacgatgaaatccgtaacgataactggggatattgaagagattggagagaactcttatgatgccatttccatgtccgtgaagaaccaataattttcctgtgccctgaattgggtggtttccatagcatgtgcacggggtttgggtggaatgcctacagaatcgactgtgtcaagctttcttgattccgtagaaacatgttttgtttgacctcatcatagaggatctccgcttttatcgtacaaagattgtgatatgttcttagcttctttctacctgaataagaggatttctgcagacccttttccaactgactttctgtgacgcattggtctggatgcttaatttttttgttcggtgcaagtgtggcacttgtcctacgttatgacctgt

SEQ ID NO: 11758 - DNA, 83 bp, Zea Mays
gaagctgcggctaccatcggaacaatcggagaggaagtagtcgcatgcggtcatgaagtcccgcatggcactggggttaccga

SEQ ID NO: 11759 - DNA, 76 bp, Zea Mays
gtcatcagttgatcttctttcttcgtatagttcccgagaatttcattgcacattgtttctatcagctccaaccatt

SEQ ID NO: 11760 - DNA, 394 bp, Zea Mays
aaaatttggatcgtctcgttcccggctaacctggatttcatgatcttcaaccaccggggaagagcgctgccgtcagactcagacctgaagctcaagacatagacatgccgttccagaatccagatcttgttccttatttcccttgtaacctggaggaggttccaattttgtgcccgtttgtttaggggggaaagaacttttcctgaattcagatcacaagtagcttatctatgctgtaactcgataatttgtggcgtcttaatttctactatctgtatggaggtgattcaagcttttgttgtattccgagcagatcaatcctgtgattaatcagtagcttttgttacccttgctgacgttccagttaacgaaaactaagagcctgtttggttgg

SEQ ID NO: 11761 - DNA, 566 bp, Zea Mays
caaactctcaacatatgccatttgctggagccctatgaccttgcaacacagactttgatttcccattcaccccgacaaagtatattccattctatggaggagcagaataccatgactatcatcattatgtaggaggccagagccaaagcaattttgcttctgttttcacttactgtgattacttatatggcactgacaaaggttacagattccacaaaacatacctagcaaagctgaaggatctggggcataatgatggccagaaaggagacggcagcggacccagctatgtgaaactggattagattgcaagatatagtgcatcttgagtgtttctatggtcatcgacttcactgtggcatttcgaaatgggatattgctgagttgggctggtcacgtgtgttctcatttctgtagcaggcatacagctttcagctctgccttctttcttttttttttctagcgtttatgaaattctatggaacttgtacgctgacgaataacaacgcaactctcacgaataacaacgccaattcttaaagttcatcgagttcgctccgtgcttt

SEQ ID NO: 11762 - DNA, 584 bp, Zea Mays
cttttgtgtgttactctcatctactacttgaaatgactacttcaaggcgccttgctgacaggaagaccgcaaagttccagaagaacatcaccaggaggggttctgtgcctgaaaccactgtcaagaagggaaatgactaccctgttggccctctagtgcttgggttcttcatctttgtcgtcattggatcatcgttgtttcagatcatcaggacggcaaccagcggcggggtggcttgagagccggcccacatctaatccccagtatagagagttgcttgttatacatgcatccagctaggattgggtagcagctaaaatgttaaacgtgacaagactgccctgcattccgttcatttggtgggccttgaatctggaactgaaccataaggcagaatcatgtaccttatataaagtgttaaatgggtaactggatctcagtgtttcatttaatctttccccggtgttggattttttgtgtgtgtgattctaagatactatgcctttgttcacctgtgttggcttgtgacaattgaagtttcagtagctgcactcaacatagcccctgtttgttttggttttttg

SEQ ID NO: 11763 - DNA, 75 bp, Zea Mays
caccacctgaggaacatcaggcagacagctatttctattttgacatctgtggaactgagcctgactcaccagtaa

SEQ ID NO: 11764 - DNA, 677 bp, Zea Mays
aaggttgaaaagtctccaaaagcgccgagtaaaaagatctcgccccaacaaaggagctagagaggacacggaggtagagagagacgaagctagagggacgcaaaacaagctagctaagctaggaggaagatgggtcgcggcaaggtggagctgaagcggatcgagaacaagatcagccgccaggtgacgttcgccaagcgccgcaacggactgctcaagaaggcgtacgagctgtcgctgttgtgcgacgcggaggtcgcgctcatcatcttctccggccgcggccgcctctttgagttctccagctcctcatgcatgtacaaaacactcgagagataccgcagctccaactactcacaagaagtaaaaactccactggacactgaaattaaataccaggattatctcaagttgaggacaagggttgaattcctccaaactacacaaagaaatattcttggggaggatctgggtccacttagcatgaaggagctcgagcagctggaggaccaaatagagatatctctgaagcatatcagctcaagaaagaatcaaatgctacttgatcagctctttgacctcaaaagcaaggaacaagaattgctggatctcaataaagacctaaggaagcaggtaatgcaatggcctccaaacatctctgtgtatacatactggca

SEQ ID NO: 11765 - DNA, 95 bp, Zea Mays
aaaaatagaaaaaaagaaaaaaagaaaaaagaaaaaaaaaaaaaaaaaatatactcaaaaaaaatattttataaaaaaaaaaaaaaaaaaacaaa

SEQ ID NO: 11766 - DNA, 1160 bp, Zea Mays
agagaatatgctctgaggtccttcaagagtgggcaaactcctattttagttgcaactgatgtggcagctcggggcctcgacattcctcatgttgctcatgttgtcaactttgatctccccaatgatattgatgactacgtacacaggattggaagaactggaagagctgggaagagcggacttgccactgccttcttcaatgataataactcatcactggcaagatctcttgctgacctaatgcaagaatctaaccaagaggtacctgcatggctattgcgctatgcagctcgtccttcttatggtggtggtggtggtgggaggaaccggcgatcagggggagggagccgctttggtggccgtgacttccgcaatgattcttcgtcatttggcaaggggggatcccgtggtggtggtgactactatggtggaggcagcagtggtggttatggtggtggcggacacggtggagctggggctccgagtgcctgggattgatgttacagttgctcccaagtagaggggtctgccaagtttaggtcactttttactctagttctatttaggtatacatttttggtaggagctgttatacagcaacaagtacaaggtgaatgtggtcatcccctttcttcttctggttgctactggctgcagtcttaatcttgcagatgttcattacgaagagggtcttgaggacattcaagcacacgagattcctagttaggtgaaattccttggtagggatagtagctaggctctgacaagtagtgcttggtgccctttgctctttttccctttgtcagcgtcgaattttggtggtcggttgtaaagcttgtgttgagggggcttttgcggcttgatttttgtcctggattcgagttttgacaccggaggttgaagaagcggtaggatgatggtagtcctttagatcctgttgtaatgtatttaactgtgaggtgaggctggacacaataaattctgtaggcgtgtttagaggaagaagggggaagttgtgtgtgatggtttcttcagagaagattcctgctactgtgtacttcgaatctgtttttggatggagttaaattgacattatcgatgtcgtccaaatgctgtctcatttactttttgggtgtaatgtttccatgatatgctcgtgc

SEQ ID NO: 11767 - DNA, 231 bp, Zea Mays
gccgagttctgtagctagagcttgtaacccgagcgggggcgttaaggtggcgtttgaatgctttgcgataatttctgggccttgggctcgttgtgacattggccggcttgcccatcccaagttgctcactgcccactttcaacggtggcaggataacaagccgctgcactttgagcccggctcaggcccagaacctcactaagcaaaccaccatcttttttttatttttgc

SEQ ID NO: 11768 - DNA, 84 bp, Zea Mays
gagtaaggctttgaaaatgcagcaggatctggaagacaaaaacacgaggttataattggagatttagagagcaaaataaaagag

SEQ ID NO: 11769 - DNA, 431 bp, Zea Mays
ccggtacgctagatgattatgcgagctgaaggacatggatcagagcgaaccataagagggtatcggtggattaatcttgtggatgcatcaagccagcaacataatggaagatgctcaccaagtggtcgtcaattaacaacactaacatagtgttatcccaggttgtaattttgttctgttgtggatggtgctaagtgccggtgggctcggccttcttatataagtatatcccatctttagcttctctatcgaggattgtctcttaagctagcatgtattttaaaacttataaatgttttatacattcaaattgtaatctttttgaatcaagttcttttgtaatcaactccgatgatatatattgtaatcttgttataacttgtaaatgttgtaacttgtaaccattctgtaataaagaatttccgctgcaa

SEQ ID NO: 11770 - DNA, 1849 bp, Zea Mays
ggtgctcatgtggttgaagacgatgtagatgaaacaaaaagacacttgaacgtggttttcatcggccatgttgatgctggaaaatcaactactggaggacaaatattgtttttgagtggtcaagttgatgataggaccatccagaagtatgagaaggaagcaaaggataaaagtcgggaaagctggtacatggcttacatcatggacacaaatgaggaagaaagggttaagggaaagactgttgaagttggtagagcccactttgagacagaacacacaagattcactatcttggatgcaccgggtcacaaaagttatgttccaaatatgatcagtggtgcatctcaagctgacattggtgttctggtcatatctgctcggaaaggggaattcgaaacaggttatgaaagaggaggacagacccgtgaacatgtactacttgcaaaaactttgggtgttgctaagctggtagttgtaataaataagatggatgaacctactgttaaatggtctaaggaaaggtatgatgagattgaagcaaaaatggttccattccttaaatcttcagggtacaatgttaagaaagatgtacaattcttgccaatttctggtcttgtgggaaccaatatgaagaccaggatggataaaagcatttgtagttggtgggatggaccttgtctttttgaagttctggaccgtattgaaattcctttacgcgaccccaaaggtccagtaaggatgccgattattgataaatataaggatatgggcactgttgtaatgggcaaaatagaggctggcactatcagagagggtgacagtttattgattatgccaaacaagtctcatgtgaaagtcattggtttgaacttggacgagagcaaagtacgtcgtgctggacctgctgagaatgttcgtgtcaaattgtccggagttgaggaggaggatgtaatgtctggttttgtactttcaagtgtcgctaatcctgttggtgccgttaatgaattcatcgctcagttacagattttagagttgcttgacaatgctattttcacggctggctacaaagctgtgttgcatatccactctgttgtcgaagagtgtgagattgttgaactcatagaggaaattgacatgaagaaaaagaaaggagatccgaagaagaaaaaaccaaagaggaagcctctttttgtgaagaatggtgcaattgttgtttgccgcattcaggtgaataacttgatatgcatagagaagttctctgatttcccacagcttggaaggtttacacttagaactgaagggaagacggtagccgtaggcaaggttgttgatgttccgcctgctggcagcccaacattctgagcttaagccaattttgaacaggatggataatcatgaagcagtgcgttgtcttgagatacttttctttgggagaagtgagattagttgagcataggttttttccgagcccggcttgagaatggtctatgccttaatggtttaggcaacaagcctgtttagattggttccataatgttacatctctggttacatgtgaggtataatcagtatggatgagtgttccaaccttaatgcactgccaaattgtggtggcatttttgcgtacaatgctgtaactgtacagttgtgtgtgaagtcaaatgggcaggctgcattactcggatgtgcagcgtcgtgtcacacctggttttaagggtaaaaccgaatgcataacatatgtgtgctaggatctattttaacatatatgttgacatcatgagtgtaatatatctaaagaacaatgcataaaagcgtaaataaagattatattaacatattacacttgaac

SEQ ID NO: 11771 - DNA, 69 bp, Zea Mays
cggcacatgctccatcccagtctccctccccaccaccgcctggctggcagagggatgcggctgcaagcg

SEQ ID NO: 11772 - DNA, 703 bp, Zea Mays
ggcagttccagaagaaaaaaaggtctatcctggaaataacgttggaatgggcaaggatcacacactcttttctttgatagatggactcgtcaagtttgagaagtatgggccggacaagaaaaaggttagtgtttacccatatgagaaggagcctgaaaacccaaacagttacagagcaaggaagagagagtacttccgcatgcggcgtgaacggaagaaggcgagagcggagggcgccgctgagcctcagttggtactagctgctgttgatgaaaactctgaggtcagcgcggactgctgataagtttcctgtgtggtgtttctctttttcacagcccttgttacactttttcttccttaattgtaagaccacatgatctataaaggtcatatttacatgtgttgtttagataaatggatatgttctacttgtactttttgtggggtagttgtgctttagagtcacagtgggggtctattccaacttcctagaccactccacgtagggcgtgtttggttcggcttttttctgaatagcttttctgaaaagctggtggttagaatttaggtgtttggttcgccagctgtgcggaaaagctgttcgttagaatctaggtgtttggatacacagattctcagattgcagattctgtttgaagaaactatacacattaacaccgaaccaacaaaaggtcattacata

SEQ ID NO: 11773 - DNA, 639 bp, Zea Mays
cccgcccaccatttcaaaaacatgaagaaaaaaaaagatgctgcattttagttgtgttgacagttgtcatagtagtgctgctctacttgatcatttctgctttctgtggaggcctttccttgtcatcatgcagatcatgagtaacacaccagatggctttgcccctcccttaaatggagggtagaacaccatggaatgatgcctgctgtgttgagcaccggagcttccggaggcaaaaaaaaaaggagatcgatggataccactgtggtttccagtaacttggatcagtttgtacagtggacgagtggagttggccgttgctgtttttgatgtcgccatggttgtgggtgaactcaaaccttaaatcgtggtgtgcttagcatctttcttggcgtgtcaaactgtcgttgtgacttgtgagggatgggactagtgagttgggttttgtagagttacttggttatcaatgtgcagacatatatgtatgccgcgatgagtgttagtacatgcctactatggttatcggtgtacgaaagtgtcttagctgctgttgtttgagactgccatggatggatgtggttgtgttttgaaggagctgcccttgtggccatgtgatgaataaaagcacgtaaagcaagc

SEQ ID NO: 11774 - DNA, 159 bp, Zea Mays
tacgcacgaaccagagatgacgatggagattcacacattgctgccgtgaccgtgggacagattttgtggtggcgacgagacgacggcgtctttctcgtctttctcagcgacagtgcgtcgtcccagtacgttgttgcagcaaaccgtttctctttcaac

SEQ ID NO: 11775 - DNA, 2341 bp, Zea Mays
tgcagataagtccctgatccggtccgatgatcccgagtggttcttcttcgcccccaaggaccgcaagtaccccaacggtagcaggtctaacagggccaccgaggcgggatactggaaggctactggcaaggacaggataatcaagtccaagggcgacaagcgcaagcagcataccatcggtatgaagaagaccctcgtcttccaccgcggtcgtgcccccaagggcgagcgcacggggtggattatgcacgagtaccgcaccaccgagcctgagttcgagtccggcgagcagggtggttatgttctttatcgcctcttccgtaagcaagaggagaaaactgagcgctccagcccagaggaagtggatagaagtggctactcacctactccttctcgttcttcacctgacaacctagaggcgaatgaggaagctaatacaccattaaataaggaatctccagaatctgctctgcatgaaagcccgattgagctgccaaaatctgttgaaaccaatggtggttcaatgacaaggtggctggcggacagaaatgataacttgatggttactgcaccagatgtttcccatatacctttccacggacatgctgctggtgtagctaaggttgatccttctgttggtgcttcaggccacttagttaatccccacaatggaaatgatgattataacaaatttgtgtctgatttcactcccattctaccacttgaaaatgcattcttcactgatatacaacaaggagcttttggttttgatggcatcatgaatcctcttgatccccttgatgctttcttgaatcaaacacttgttgatcctgatgaacattcatcaacaacatcaaaagttcagtatgattctgacattccaacagaatttgagaaccattggaatatgaaggttgagcctcaagatgatcaatgctggtgggcaaacataggatttgagccagacgaaccaaatcctctgcttccttgtgacaccactgaccaagacatactttctgttgactctggtgctgattccttcaatgagcttttcaatagtatggaagagactggaattattgttaggcctcaacagttggactccactgtgcaaccaaaccatgtgttcgctagccagggcaatgcagcacggaggctgcggctacaggttgagtctagggagatcataactaaagatgagagtgaagatgaagtatcatgtgttctaactccagactgtttgaacgattctgttgaggagtccactgcagagaaggatgtggcttctgatggggatgaggctgagtcaacagggattgttattagaagccatcaccctgctccaagatcaagctcagagagttcattcactcaacagggaactgctatgcaaaggctgcggctacagtcaggccttaacaaaggccagcgtcctagtactgatgattcatcaagctgcattatagacgaaccaggaagtcagcacaaagcagaaaaagcagagattgaagaggatgcgagtacaaacctcgctggaagtgctgatgatctacctggtaatatccatgatgatgagcaaaagaacatccctgaacatgccaaatctgttctgaggttgcggaagacttctgaggaaggcaacaaggatgtcaagcaggagagttgtctcgagccacacgtgagagcaccaatgcagaagggaggcttccaatcatacatcatctggctggttcttccggtggctctgctcctgcttctctgtgttgggacatatggatgggtatgaaatctatcctggtgcggtgcaaggcatgacattttgcgcacatgggttcctggcgtcaacctggtgtgcggtcttctgtacataacctgtggcatcctttcaacagccgtaccctgcagtaagacatcccggcattgccaaggcagctgaaaaataaataaaaaaacaagtggtagaaatgacaaggtggaaaagagcgaggtgtgttattgttggttttagtacatcgtagtcttcttttgctgttgttgtagatgtcttgctaatgttgtcgctgttgtgtagttgcaattcaagcccagggctgccagttttatttcctaatgtaatgtagcaagagcgagaccctgttagacgggtgcgctgaaattctgaacctctgtaatatctgatgttcttgtggatacctgtttcagaattttcggttcctgaacccagttactgatggcttgttgatctgttggcgtgttcgaattcgtttggacatgccacagcatggtctgaggggatacaaggactgaatgcgttggtttataattttataatgaaatactg

SEQ ID NO: 11776 - DNA, 231 bp, Zea Mays
ctgctccgtcaccgatcacaaacaggcaacagcgaacgcggagacgtgagacggggaacaaggagcgaaggaacgaggaaaatagagggagactttcgccgacgaggaggcggcaggaaccttggatcggagcgcgccaagaggaagggtggacgcgaggcggcggaggagcgggattcggggtaccgggctaaaaccctagcggacgaactgctgggatgtggactgttg

SEQ ID NO: 11777 - DNA, 197 bp, Zea Mays
  misc_feature (1)..(2): n is a, c, g, or t
nnatgaatcatttactaaaagctcccttttgtatacatccaaagacaggccgtgtttgtgttccgattgaccccagtaactgtgatgattttgatcctgcggctgttccgactctatcacagcttttaggagagctgaatgctactggttttcagacagatcctgaaaataaagtaaaggcgttctagtgccaagat

SEQ ID NO: 11778 - DNA, 96 bp, Zea Mays
cctggccacactactcctcctggtcctctcctgcggtagcaataacccactcggctgtctatcccggtggcagggatggaggccaagtcacaccac

SEQ ID NO: 11779 - DNA, 64 bp, Zea Mays
tcaataatcaaagactctgtttgtagaaatgcttactaatagtgaatccttaaaagtctagttt

SEQ ID NO: 11780 - DNA, 382 bp, Zea Mays
aattgcctgtcgggacgaggaggcctagcaggggagatgcgatgcgaggagctggtgccatagtgggctactggtcactgccggcgcgttgtgcattgccctggtccccgcctccccggaccggaccccggccgccccctcccgcggtcccgcccggcctccgctccggactctcttgcatatgggactgtgagatgacccgccgcgcgccgcgtaaaaacctctgggcatcgagccacttccgggcgtggcagtggcactagggtcggtgcaggcacatcgggggagggcggctcggccagggctcagccgttgctgctcggtcgggacagagaggagcgaggcgagggaagggaggagaggtgaggggagagagaagagg

SEQ ID NO: 11781 - DNA, 217 bp, Zea Mays
gcggctgcatggattatacttgggatattctcgctcatcagacttcaagctgattaccttctcgttgttggagtttgcttgagcctcagcattgcaaatattattgggttcaccaaatgcaataaagatgcgaagaagaacatccaggattggacaaggagtgcacttctatcaggcttgtaggaggaaattgaaatgaatcaaactggatggattg

SEQ ID NO: 11782 - DNA, 566 bp, Zea Mays
gcaacacgacaagactggaaagtgggagtggaaattcgagaacaagccggtaaacatatactatgaggaacatgagcaggaggttgctgagaatatgaagaacattctcatgatccctacgatctctgatgtgagcactgtggaggagtggagggtggttgccaaagatattgttgggcggaaaggagaacttggctaccgtgttacaattgtcgattggcctggtcttggttattcagataggccatcactgaactacaatgctgatgtgatggagagctttctggttgaactaatgaattcaccaaacagtccagtcgcaaatgcagatgatgaactgatcattgttggaggtggtcatgcagcaaccatagctgttcgtgcagctggtaaagaccttataaaaccatctgctgttgctgctgttgcacctacttgggctggaccccttcccatcgtatttggccgcggttctgatatggaaactagatacatctggtgtagcatcctgataggcatgaaaggcatacagaattctgtaggttgcgaagccatcaagacaataa

SEQ ID NO: 11783 - DNA, 1212 bp, Zea Mays
ttgcattcctgatgcgcgagcaacccaattgctggcctcacctctggttctgaaggttctgccataccctataaacatcaccacagtgcagtttgccgttggaagtgccattgctttgtttatgtggatcaccggtatccttaaaaggccaaagatttctggtgcccagctttttgctatccttcctctagctatcgttcataccatgggcaatcttttcacaaacatgagccttggaaaggttgcggtgtcatttacacatactatcaaggccatggaacctttcttctcagttctcctttcagcaattttccttggtgagttgcctacgccttgggttgtgttgtctcttcttccgatcgttggtggtgtggcattggcatcccttactgaggcctcctttaactgggctggattttggagtgcaatggcttcaaatgtaaccttccagtcaaggaatgtgctaagcaagaaacttatggtgaagaaagaggaatctctcgacaacattaatctattttcgataattacagtcatgtcattcttcctgttggccccggtaaccttacttacagaaggtgttaaagttagtccagcagttttgcagtctgctggtttgaacttgaaacagatatacacaaggtcattgattgctgcatgctgcttccatgcataccaacaggtgtcatacatgatcctcgccagggtatccccagtcacacattcagtgggcaattgcgtcaagcgtgtggtggtcattgtgacctcggttctgttcttcaggacccctgtttctcccatcaactcactcggtaccgggatcgctcttgctggagttttcctatactcgcaattgaagaggcttaagcccaagcccaaggctgcttgatcatagacctttgcaggtccatccaatagaacttttgaagttatgctatgccattggaatgattagtgagtgccgtagttagaatgatgtttaaagaagagctaccacttcagcagataatttgtgacttgcttgcattttttggacggatttgttcgtgtattaataattttgcagtgacgatacttctgttgtgctgtttataatcttctgaaactgaactgagttgttgcattggactatcttcaatcgtgacactaatttaatagagtagacacgaaaaaaaatactttggtggaaaggtaatatttggaattatgttt

SEQ ID NO: 11784 - DNA, 1532 bp, Zea Mays
tatttgttgcagccgcctgccgccctcgtcccgtgcgtccccttcttaaaccttggcagtgcaagcccaggcagcctcatcccctcagtcctcagtccctcacacactcactatacactgctctgctgcagcaagaaggaagaagctagcgcctccctagctctcgttgtcagcaatggccaccaccgccgcgtccagcctcctcaagtcctccttcgcgggctcccggctcccttcggccacgcgcaccaccaccccgtcgtccgtggccgtggccaccccgcgcgccggcggcggccccatccgcgcgtccatctcctcctcccccaccccgccctacgacctgacgtccttccggttcagccccatcaaggagtccatcgtgtcccgcgagatgacccggcgctacatgacggacatgatcacccacgccgacaccgacgtggtgatcgtgggcgccgggtccgcgggcctgtcctgcgcgtacgagctgtccaaggaccccaccgtgagcgtggccatcgtggagcagtccgtgtccccgggcggcggcgcgtggctgggcgggcagctgttctcggccatggtggtgcgcaggccggcgcacctgttcctggacgagctgggcgtgggctacgacgaggccgaggactacgtggtggtcaagcacgcggcgctgttcacgtccaccgtgatgagccggctcctggcgcggcccaacgtgaagctgttcaacgccgtggcggtggaggacctgatcgtgcggcgggggcgcgtcggcggcgtggtcaccaactgggcgctcgtgtccatgaaccacgacacgcagtcgtgcatggaccccaacgtgatggaggccaaggtggtggtcagctcctgcggccacgacgggcccttcggcgccaccggcgtcaagaggctccaggacatcggcatgatcagcgccgtgcccgggatgaaggcgctcgacatgaacgccgccgaggacgagatcgtgcgcctcacgcgcgaggtcgtgcccggcatgatcgtcaccgggatggaggtcgccgagatcgacggcgccccgaggatgggcccgacgttcggcgccatgatgatctccggccagaaggcggcgcacctggcgctgaaggcactgggcaggcccaacgccgtggacgggaccatccccgaggtgtcgccggcgctgcgcgaggagttcgtgattgcgtccaaggacgacgaggtcgtggacgcctgagcgagcatccacgcgccagcatgcaagcagcgtcttatctgggccggcgccatcacggggtttcttcttttaatctgggactttgttgttgttggacgaatgaattcccttcgatcggttagctttaatctgtctcgttagtgtgtcgtgttcgtgtagcaccatgccacagctacgccatgccgtgtgctctgtcacgtgggggccactcgtggggtctcctgctgctgtcagaacgaataagagaagatggaattgtgatagaagggcgcccagtgcgccaacgttt

SEQ ID NO: 11785 - DNA, 1139 bp, Zea Mays
agtacatgcgtatgcgtatcaatttcagaagcatcggccggtgcttattttgatcaatcgaaacacaacagcaacatctattgccaaccgtcgagtcttgtaatatcaaaagacattaaaattgcacgtacataaggctcacacaggaccggaccggaccggagtacttccattatggtagcacagcgtacgactccctcccttaaccgctacttaaacaacaagcaatagtgcaatacaaacgaacaaagttcaaacgtaccttcagaacggtatagtaacacttggtgcatgcatgcaaatcgaccgactgcgtcctataccatatcatatccgatccatcatgcatcggtgaagtgcagcactgcactggtagatagcgaagcgagcgatagatagatagcagccattgcattgcaggtacgtgctaggcgtccatgcgcgccgggtactggtcgatgcagtccagccaggggctgcgcgcggggcggcgcacgcggcggacggcgcgccacaccgcgctgttgcacttgaagcccgacccgaaggcgagctgccagacgcggtcgccgcggcggacgcggcgtcccctggggtggtcggcggcgccggcgtggaggccttggacgggaacaggtggcggaacagcacgcccgcgaagaagagcagctgctcggagaagggcagcaccaggggccccagcgtggtgatgttggtcttgagcgcgtggccgcccacctccagcaggtcgtaggtggcctccccccacaccttgcgccacagctcgtcgcggctgaggctgcccagctcggcgccgcacaccagcacgatgacggggatggtggccaggtacacgccgtggctgatgaggtagtggtacccgaggcgcacgtacttgaggttcaccgactgcaggaagtccggcaggcggcggcgcacgcgcaccgagaaggccggcgagccggcgtccgggcccgacggctccacgccgcggttcacgatctccgtcgacagcagcgcctgctcctcccgcgccatgatggccgagcgatcgatcgatctatcgaccgaccgaagctagctcgcgcgcgctgctgctgcagctggtatggatccggggcagtggtggtggtagtgag

SEQ ID NO: 11786 - DNA, 1550 bp, Zea Mays
aaaaaatgtcggtaatgaatatttcttcggatattggctttcaagactaatgtcccgcgcaatgctaatatggccaaactccaagcaggatatttgtttcctgagattgccaggagaagagccgctcatttgctgaagtttccagatgccaaaattataagccttggaataggcgacactaccgagcccattccaaatgtcataacaaatgccatggcagagagagcacatgccttgtcaacaattgatggctacagcggttatggagctgagcaaggtgaaaagaaactcagagcagcaattgctgcaacctactatgcggaccttggtattgaagattcagacatatttgtctctgatggtgccaaatgtgacatatctcgcttgcaggtcctttttggatctaatgtgacaattgcggtccaagatccatcataccctgcatatgttgattcaagtgttatcatggggcaaactgatttatatcagcaagacgttcagaagtatggaaacattgagtacatgagatgcggtccagaaaatggattttttcctgatctgtcaactgtccctaggacagatattattttcttttgttcacccaacaatcctactggtgctgctgcatctcgggaccaactaaccaaattagtaaaatttgcaaaggacaacgggtccatcatagtctatgattctgcttatgcaatgtacatatcagatgacagcccaaagtctatctttgaaattcctggagcaaaggaggttgctattgagacagcctcattctcgaaatacgctgggttcacaggtgtccgtctaggttggactgttgtccccaaggagctccttttctcggatggacatccagttgctaaagatttcaatcgcatagtttgcacttgcttcaatggtgcatcaaacattgcgcaagctggtggtttagcctgcctctctccagacggtctaaaggctatgcaagatgttgttggcttctacaaggagaacactgaaataatcgttgagacatttacatcactcggattcaacgtgtatggcgccaagaacgctccatacgtatgggtgcacttccctggccgcaattcgtgggatgtgttcgctgagatcctggagaaggccaatgtggtcactactcctggcactggatttggaccgggtggcgaaggctttgtgagggtcagcgcgttcgggcacagagagaacatcattgaagccgcaaggaggttaaagcagctgtataagtgagcaccgatgcagcttctgtgccctcctagacagatgtatcaataagaacacatcagggcaccaaaaatcgcttggtgaagctgccagaagatgttagattttgaacttttttttttaattctcgtgcggtgtctacattcaaaccatttcgaactctagacaatgcttgttgtaatcctgagacccttcattcactggtgaagttgtgattgtcttgtctgtgttcatttttgtgtcctgctgttgctgtttcggaataccgaattcctctacgatgagtcgtcgac

SEQ ID NO: 11787 - DNA, 114 bp, Zea Mays
atcctaaatatcagttttgtccattactgcaggcagcaaacaaaatcaatagggattctgctgtccatagctcactgctccaaaacagtccaaaatccttggatattttagtgg

SEQ ID NO: 11788 - DNA, 1607 bp, Zea Mays
ttttatggaaattacatcagaactttacacatcatggactagattgttaatggacctcgttctgttgaatctccggacgacaagtttgaagtattctatattgactatggcaaccaagaggtggttacctacagtcgtttacgacctgtagacccatctgtttcctcgtctcctgctcttgctcagctatgcagccttgctttcataaaagtgcccagtcttgaggatgactttggtcaggaagcagcagagtatctaagtgaatgtttgctcagtagctcaaagcaataccgggcaatgatcgaagaacatgatacttctggggggaaatcaaaaggacaaggaaccggaaatgttctcattgttactcttgttgatgcggagacagaaagtagcataaacgctaccatgcttgaggaagggcttgcccggctcgaaagaagcaagagatgggacactagggagaggaagacggctctccagaacctggaacagttccaggacaaggcaaagaaggaaaggctgcggatttggcagtacggagatgttgaatcggacgaggacgagcaggccccgcctgcaaggaagcctggaggtcgtcggtagagactgggcagtgtaaggctgcagtctggcatgctatgaaagttttggacaaccacaaatgttggactctgccgggagttatagatgaggacttactgaggggtaccgtatttatattcggttagaagaagggaacttagcgaggcgaaatcacttttgatattccgtttttacaggcgaaactttctctgttttagcacttttgatattccgtttttacatcgcaagttataaggttaaagatgcattgtttctttttctctcaacttaataaggttgtgtctatgcgctgcggttctttgtagtcagaatataatattgagaagtgcagtgaattaagttaaggattgcatttaattattccagtgtccgtgcagtgacgatttctctcgtacgcatttactgattgttttttttttttggcttgatggtagctttcttcttggacaaaatgtctatttgcagtatatacttagcctgcctctgctggcgctgttgcttgatattccgtttttacaggcgaaacttttgaagctatgcttcgctctgagatagaacatcaatcctttcaagtgctaaacttcacggaggctcgatctcatgaatgaccgaatcactgacctcgacaaactcaaagaggccaagggcttggcggccatgcaagacacgtctgagataaaagttgtgctgttgacgatctagtgctacgcaagatccaaagtatgaaggacaaacataaactgtcacccccttatgagggtcctttcatcatctctgaagtacttcggctcgacgcttattgactccagctagaagatgacacaatcaaccgtttttacgtgtaacttctccattttttgcaataagtccatctcgaacaactccaccgccatgactgagatgttgggggcctaacatcatgtatcaatacattcatatggagctgttacaagaaaattcatatctcgcaaatttcgtcttgaatacttcttgaagggtaa

SEQ ID NO: 11789 - DNA, 108 bp, Zea Mays
gaaacaagaacgaaaaaaaaaaaaaaaaaaaaaaaaaaaaaaaaacaaaaaataaaaaaaaaaaaaaaaaaaaaaaaaaaaaaaaaaaaaaaaaaaagcaagagtcat

SEQ ID NO: 11790 - DNA, 801 bp, Zea Mays
cgcgcaaggagacgctctacgcttagcgttcgccttcctcgaaacttcaggctattagaggagctcgagcgtggagagaagggcattggtgatgggacagtgagctatggaatggatgatgctgatgacatctacatgcggtcatggactggtaccatcattggccctcacaatactgtacatgagggtcgcatctaccagctgaagttgttttgtgacaaagactatccggagaagccaccatctgtcagattccactcaagaatcaacatgacatgcgttaatcacgagacaggaatggttgatccaaggaagtttggtttgctagcgaactggcagcgggactacacgatggagaacatcctaacccagctcaagaaagagatggctgcctcgcagaatcgaaagttagtgcagcctccagaagggacattcttctaacgaagtgttcacttggcccgtcatgggatccaacagtaattgaaacttttatgggctaaaaaacagcgtctacatctggtgcccctgcctgtctttgtgattttttatgacttttatgttcttgtatcgtgaaccgcagtgaacaacggttgttgcaagttccagggatatctttggaagtggtaaacaaatgcgtcttatttctatgtaatattagaccccgtgcgtgtgtggtttcaaggtacagctccctctcaactgttgccgtgcattccgtcgatttgcttgacgtctttcgtccacatgtgcccagcagtattctctatgctcttgctttcctgtcatacttccaactggcac

SEQ ID NO: 11791 - DNA, 1143 bp, Zea Mays
cgctcgcgggatctcgatcgtattgtagtattgaaccagaagacattccgccccaagaagagcgctccatcaggcagcaagggagcacagctccgtaagcacatagatgccactctcggcagtggaaaccttagggaagctgtgaggttgcctcctggagaggatatcaatgaatggcttgctgtgaataccgtggatttctttaaccaagttaatatgctgtatggcacgctcacagaattctgcacacctgagagctgcccaacaatgacagctggcccaaagtatgagtacagatgggctgatggtgtgcagataaagaaacccatagaggtatcagcaccaaaatatatggagtatctgatggattggattgaaggccagcttgacgatgaatccatatttcctcaaaaacttggcacaccattcccaccaaacttcaaggaagtagtgaagacgatattcaagcgcttgtttcgtgtttatgcccacatataccactcgcatttccagaagattgttagccttaaagaggaggcccatctcaatacctgtttcaagcacttcattctgtttacaaatgagtttggcctgattgacaagaaggagctggctccactccaggagctcattgaatccatcatcgttccttactgagactacggtgtagtaaacgtggatatagagctctcagtgcagatggctgtgaagtgtccatccgtgacagaacttcactgcatagagctatatgtgcatgtacctgtgtgtttctaaatgatcatgtattggccatgtaagtgtgcctgttatcagttatagaagggtgatgatgatcatgtactgcaaaaagagaaagcacaagaatgtgttggattgatgtatgcagtgtttattttcctcctggttgtggaaccgtcagtttgtctgcttattgctagacattctctccgttctataaattgtaggtcgttttaattttgctccaactttgatcaagtttacatgcaaatatttcgacatgcaaaaccaaataaatgtattgtcaatgctcaaacgatttaatgtaactactctcatgtactagatgtttgatcgaatcctttataaatttagtcaaagttaaactagtttatttgtgtttta

SEQ ID NO: 11792 - DNA, 150 bp, Zea Mays
caactgtttgtcaaacctccctacaggtttcgagggcttattctctgcagcacctcaatatcggtggaacgttcatcacagatgaatccctctacgcagtcgcaaacagctgcgcaaatcttaagatatgctgattattgaatccttgtt

SEQ ID NO: 11793 - DNA, 79 bp, Zea Mays
gtagtgctggatgtggtcgaatccgttcagagcttcacttcgacgaccaccagatcgatatcgggactcgacgaacacg

SEQ ID NO: 11794 - DNA, 1041 bp, Zea Mays
ataggagcccatccactccgatccagccatccgactcggttacaacagtccacatcccagcagttcgtccgctagggttttagcccggtaccccgaatcccgctcctccgccgcctcgcgtccacccttcctcttggcgcgctccgatccaagagatggcggtgccgctgctgacaaagaagatcgtgaagaagcgggtcaagcagttcaagaggccccatctcgaccgctataagtgccttaagccaagctggcgcaggccaaagggtattgactcccgtgtcaggaggaagttcaagggatgcaccttgatgcccaacattggttacggctctgacaaatcaaccaggcactacctccccaacaagttcaagaagtttgtggtgcacaatgtctctgagctggagttgctcatgatgcacaacagaacctactgtgccgagatcgcccacaacgtttcaaccaagaagcgcaaggagattgttgaacgtgccgcgcagctcgacattgtggtcaccaacaagctcgccaggctccgcagccaggaggatgagtagtctggtttcttgtcacaacggccaaatagatcctgccattcccggctgtaggaaactactctgctttgtgccttgttagtacttagaataccagacatttctacatttttggtaccagtagcgacttctatgtggcatattctactgttatcttgcgtcttaattacctgcacctcatggtttcattggtgtcgtatgtcatccttgcattggtgggcaattcatggccgcgcagggtgcgcgtatggtggttttgcttattttatccagtctatgggtagcaaagggattgttgtatggttgcatgacaagtttggtcaggtttgctaaaatgatggatttgtttgccctctaccatttgggctgttgctggctagcgcacaacactactggataggttaatgcaagtatgcaatgtactctatcccacgtacagtttttaatgcaaaaaatgcaatatacttgttatgatacaagagcctct

SEQ ID NO: 11795 - DNA, 713 bp, Zea Mays
gctgtgacgcatatatgatactaaattccactatctgcagtttgccagttagaaaagacatgtatggagacgacgagccttcacgccaaccagaaaggagcaatgaggctgccggcgcttacgcacaggcatgcatagatgttgccacagaattgaaccatccagttatagacatctggaccaagatgcaggaatttccagactggcaaacatctgcattgagcgacgggctccacttcaccccagtaggaaacaagatcctgttcgaggaggtggtgaagacgctggagacgagcatcggtttcagccaggagcggctcccgtcggacctcccgctgttccacgagatcgaccccaaggaccccatgaaagccttcggagcttagcttgggccttatcggaggagacgcacggtcgttggatcagccacgtctgctgcatttgagttcgtcgtcagtatgcccgaggcctgctgaggccattacaggaacagtgagctttaataagcggtgttttcagtaccgtttggttgtcagcgcatcacgtgttgttggaacactgtggttggataaaaaaatcataccctctccgtccgaaattaaaattcattttaccttttttataattcgtacaataattaattaatacatgtgttatatatatatatagattcattattatttatttgaatataaacataaacataaagaact

SEQ ID NO: 11796 - DNA, 101 bp, Zea Mays
aattgttgcctgcggcaaaggcaagaagattgcgctgttcttggattacgatggaaccctctcgccaattgtcgatgaacctgacaatgctgtcatgtctg

SEQ ID NO: 11797 - DNA, 668 bp, Zea Mays
ctgactataactggctacttctgctgcgcttgcatgcattcacacgccaacgtgcagctgatgtgcggcggcaccgtggtggccaacgcgacgacaagcatcacaggatccttcatcctcaccccggtaaacgctactcttggtctcttcagctccatgttgggcggccagtgcaatgtggtggtgaccacacccctggtcgcctgcaacgcgtccctggccggcgccactgggacgctcaccgcgcctctacagctccttggctccggcaccggcatcgccggcggtggcagcagcacaatcatcgcgaccattgctggccagcccttcacaatcatcaacgaaatgatcattttcaccacggggctctcctccttagcttaggtcgatcggctggtaacaagagctagcttcatctatctggtggtgtgtgttgatccgcgacgacaaggaactttatataaaatacgaataaatcggcatccagcaattcggatctaatgatcaagttaccatgctttcctttctagcgacacatcccgtgtacttgttactaagctaagctcatatatgtaatatatgtgtgggtatatataaatgaagtcttgcctgttgtggttatatatctcgtttgaacttattctgaagtgatgaaggaatgatgaaat

SEQ ID NO: 11798 - DNA, 1394 bp, Zea Mays
tgccagtgccagtgccacccgccccgcagccctaacttgctggcggccgcctataaaatgctggaacactcgcctcgccgtcgccggggaccaaaccaactcgagtcatcgagttccacagctctcgcgtcgcgcgcagccaatccctctccctccggcctacacagcccacaactcccttctccatctctctctctctctctcgcccgtgtcgccccctgtttgtgtacaaccccatggcgacccacgccggcgagaacggcagcgggcacgagaacggcggcgggcacgcggagtggcggttcgcgcgggcggcgaaggagggcgcgctggccgttgcgggggacaagatgagcatccgggcggtgcggttcaagatcagcgcgagcctggacgcgcgcgacccgcggcccgtgctgccgctggcgcacggggacccctcggtgttcccggccttccgcaccgccgccgaggccgaggacgccgtggccgccgcgctccggaccgtgctctggcggagcacctgtcgagcgaccttccatacaagctgtcgagcgacgacatcttcgtcaccgccggaggcacgcaagccatcgaggtggtggtctcagtcctcgcgcagccgggcaccaacatactgctcccgaggccgggctatccgaactacgaggcgcgcgcagggctgcacaacctggaagttcgccggttcaatctgatccccgagagagggtgggagattgacatcgacggtctggagtcgatcgccgacaagaacaccaccgccatggtcatcataaaccccaacaacccttgcgggagtgtctacacccgagagcatttggccaaggtcgcggaggtggcaaggaagcttggaatactggtcatcgctgatgaggtgtacggaaatctggtgtttggggacacccctttcgtccccatgggtgtctttggccacattgcccctgtgttgaccataggatcactgtccaagagatggatagtgcctgggtggcgacttggttgggtggccgtatgtgatcccaacaaggttctgcaagaaaccaagatcattgcatcgatcacaaacttccttaacgtttcaacagatccggcaacttttgttcagggagcgcttccccatattcttaagaacacaaaggaagattttttcaagaggatcattggtctgctagcggaaacatcagagatatgtttcagcggaataaaggacatcaagtgcatcacatgccctcacaagccagaaggtgaaactaaatttgtatcttttggagagcatccatgatgatattgatttttgttgcaagctggcaaaagaagagtccgtgattttgtgtccaggttacaagtattccatgcttaactgtacgtttggg

SEQ ID NO: 11799 - DNA, 769 bp, Zea Mays
aacttatttgtaaggaagaacactgaagctagcataagatgcagttaaacaaaaagggggagctttccttgaagctccagtttcagggagcaagaagccagctgaagatggccaattggtcattcttgctgcaggggacaagccattgtatgatggtatgattcctgcatttgatgtactggggaagaagtcattctttctgggagagattggaaatggggcaaagatgaagcttgtggtcaacatggtcatgggaagtatgatgaattctttgtccgagggactctgtttggccgacaaaagtgggctgagcccccaaacacttcttgatgtactggaccttggtgccatcgcaaacccaatgttcaagctgaaggggcctacaatgctgcaaggcagctacagccctgcgtttcccctgaagcatcagcagaaggacatgaggttagcgcttgctctgggagatgagaacgccgtcgccatgcccgtctcagcagctgccaatgaggcgttcaagaaggcgaggagcctggggctgggagaccaggatttttcggcggtctatgaggttgtgaagggcgcgggtggttctggatctggccagccgtgatagaaggaccatttgtgactgtgttagcccatttccatgccgatttgcaacatagcgacgtacgagtacgtgtgtattcgagatttggaaccagaccatacgttgcaaaagaaataataaatcaaagagatgatgctagcttgcacgatagtcttcagg

SEQ ID NO: 11800 - DNA, 370 bp, Zea Mays
tttttatgctccagttaggggccaggcgcaataaggaagttgttgggagatatgctgctggatagatcaaatgttgcagtgatgatgcgctatgttagttccaaagacaatcttatgattctgatgaatctcttaagggattcgagtaaaaatatccaaatcgaggcatttcacgtgttcaagctgtttgctgcgaataaaaacaaaccacctgaggtcgtgaacatactggtcaccaatagaaacaagctacttcgtttttttgctggattcaagattgacaaagaggatgaacagtttgaagcagacaaggagcatgtcataaaagattttttccctttgagtatgtctgaggttgtaattagtcatt

SEQ ID NO: 11801 - DNA, 462 bp, Zea Mays
ccgcaccgagctggagccgactcgccatcgtcgagtttttttttcggccctacttctgtctccacggctgccgacgagccgcgcaaccgaactcactgcaggaggactcgcacagatcggtgagcgagcaagcgagagatggctgggaggctaaccgcggcagggtcccgcatcctgggcggcggcggcgcacgcgccgcggcttccgccctccgacaccgcgccggcatgggcctccccgtcggccgccacatcgtccccgacaagcccctccccgtgaacgacgagttggtatgggataacggcacgcccttcccggaaccctgcatcgaccgccttgccccgcacatcggcaagtacgaggcgttggcgtggctgtgcggagggctagggttcttcgctgccctcggtatggctgctgttgtgaacgacaaggcctccaatataccatatactcccaat

SEQ ID NO: 11802 - DNA, 1650 bp, Zea Mays
aaaaagagcgggcagtactggtggcccgtggccctggtggggcaccactaggctgctacgtgttcttccccaaatcggcctcacagccctcactgttgcaaagtagggactagggagtacctgctctctcgctctcgcccatcccattgccttcatcatcaaatcgccaccgaaaattccccccaaaaaacaataagcacttgttcatcatcatcagagtaaacacagcagaaccctagcgcgccgttcctccgacgactcacatcccacccactcacccaccccatggcggccaagctctccaccagcgccgacgccccggcctcggtgcggctctccgcagcagcgcaggcggctgcgatccagccctcctctccgcgcttcttcttctcctcgctggccgggaccaacccggcctccccgcatcgccgcatcgccattgccgtcgatctctccgacgagtccgccttcgccgtcaagtgggccgtgcagaactacctccgccccggggacgccgtcgtgctgctccacgtgcgccccacctccgttctctacggcgccgactggggttccatcccggtctccgtcgctgacgaggccgacgctgccgaggacgccgccgccgccgccgagggcggcccctccgaggaggagctgcagaagaagcgggaggaggaatacgacgccttcacctctaccaaggcgcaggacctcgcgcagccgcttgtcgatgcccagatccccttcaagatccatgtcgtcaaggaccacgacatgaaggagcgcctctgcctcgaggctgagcgccttggcctgtccgctatgatcatggggagccgcggttttggggcctctcggaaaggcggcaaggggaggcttgggagtgttagtgattactgtgtacaccactgtgtatgccccgttgtggttgttcgctaccctgatgatgctgcagatgccagtggagatgcatcaggggcgacagatgagttgcacactgtaccagaggacgaacctgtttatcacgatgcgcctgaggtgcagaaagaaaactgaggcaatggccgcaagcagctgaagaacgaaggaaaacatggggcctgtagtgactagtgaggcgattctgtgtatctgaaagatgggactggctgtttatcttcgcttctgtatatcaactgcgtgtcatgatcagtggctgcttcgcgtttgagtttcatatcggagtcctagatcatcgaagtctttgttggtttgcttgtgagatgtttatgttgtgaacaccatgtagagtactcttctcgtaggtagaagctgccttgaagatgcttatgcagttatgctggggtctgggctctcttgtcttgttttgcggagccggtgatgagctttatgttctcaaatggtagttatctacacggtattatgtgctctgttcagcctgtttactgtattgcatattcgtcaatggagaatcactacttattattccctgtatactggataaaacaattgtttagagctagtttgaaaatcttatttttctatgggattttcattttctcttgggaaaattggaatcctttgggaaaacggtgttttcaaactagccctatctatgtttgcatgctctatatttttgtgaaaaaaaaa

SEQ ID NO: 11803 - DNA, 351 bp, Zea Mays
gttagtccctgttgtgctgtcaccttggaactcttcaccactaggatagctaaacctgaagacgtctgccttcctgccctttatttaagtgctggttcggtgaagatttccctctgccttggtgttctagccaaagcttgcagtggtgtgagggattcatgtgtattgcaagacagagctcctctcccactgccaccaagttggcactgtccagagctgtgtgcgctgtcttcctgtgtttgtgatgaccacagccaccaagttcaccacaccatagccagaacattctagggagttgttagcctgtatgaagcttgttccgtaatcatctcagaattcccagaagaagaa

SEQ ID NO: 11804 - DNA, 115 bp, Zea Mays
ctctctcccaccgctctgtacgcatacacgacacggggactacttgcttcgacttggcgtatccacaggggagcgatagggctcgagttttatgcgccccgccagtgaagtccgg

SEQ ID NO: 11805 - DNA, 1476 bp, Zea Mays
cgaaaaagcgcgagaacgaaaggaatgaggcgaggaagaaagtatcgtcatctatcctaaggccataggatgtgaggctgcagtgaacgccgctccgcgtctccagagggctctgctcctcctcttcaatcccactcccgccccgatggccacctcctccgtgctcccgctccacctcctgtcctgcgcgcgccgggccagcaccagcaccagcaccgccgcgcgcgcctccgcggccccggcggtggcggcgacgaccgcgcagtccctggaggagtcgttcgggcggaagggcctgcggttcgtggccgacccggccggcgggcccctcgccgcggagctcagcgtgcggaacggcagctcgctgcatctccgcctcggcgacggcctcgtcacgtcctaccggcccaaggtgtactggaaggacgacgggtgccgggaggtgctgcacaccgtggcgggcaagggcggcgtcggcctcgtcctcaacgacgcgacgtcctcgtccgcccagccgtcgctggtcgacggcgccgagtgggccgtcagggacgccgactccgactcctacgacgccgtgcaggtggagctcgggtgcaccatagggaagctggacatctcgtacgtggtgacgctgtactcgctgagcatggcgacggcggtgatcgtccggaacacgggcagcaagccggtggcgctgacaggcgcggtgctgagccacatcaagttcgacaagcgaggcggcacggccgtggagggcctccgtggctgcccctactgctcctacccgccgccggccgcagccttcagcctcctgtccccggccgaggccatgaagcgggaggaccctggctggttcggcggcgccgaggagctgcgccagggcgtctggaccgtcgaggaggacctctacaccacgctcaagaagaaggtgagccgggtgtacgccgcgccgccagaggagaggaagaagcgcgtctacagcaccgcgccgtccaagttcaccaccatcgatcagtatagcgggctcgggttcaggttggtgaggatggggttcgacgacatgtacctctgcagcccgggaggcatgtacgacaagttcggcaaggactactttctgtgcacggggatggcgtccatgttggtgcccgtcgtcgtcaaccccggcgaggagtggaaggcggcgcaggtcatcgagcatgacaacttgtaacttcttcttcttcttttggtcaacggaattacagaatcgaatggcgcgcggctccattctcgaatacatgtcgatggtccgatctccagtgagatatatacatcaatacagatagttctttccatgggaagtgttaaacattgaatgtaaaatgagaaagtgaatgagaaaactatcatttttattgatcaaaaataaatgataaggccatcaaaggatcttctcgaaggcttgttgcacctacttctcaaatttctccacca

SEQ ID NO: 11806 - DNA, 519 bp, Zea Mays
atacgattagttgtccttcataacagtggatgcaggactttgaggcatttcagacagctgtggaatctgacaaatcatactccgctacatatacccgaagcctctctctggttcttgacgaattctacaataatttgcgctctgttggagtatctgcgatttctggttctggagtcaatacattttttgaagctatagaagccagcgccaaggaatacatggaaacctacagggctgatcttgacaagaggattgctgaaaaggaaagattggaggaagagcgcaggaaggagaatatggaaaaattgcagaaagatatgatgaaatccaaaggacaaactgtggtgctcaccactggtttgaaggaaaaaaattctgtttcagacatgatggatggtgctgatgaggaggaagaagaggaagcattggaagattttgggttttctgaggatgatgaagacgaagacgaaggagaagatgaggaggtggctcattttggcttttgaggctttgtcttgg

SEQ ID NO: 11807 - DNA, 371 bp, Zea Mays
tatgatctgccacccgtgatcgtctccgtcagcaaattttacacattgaccactggagcaaacgagaggaggtgggaaaagatgaaggataggctgcatactgttgtggattccttcaaaatcgaaaatagaatatgagtgcctgaattgctgtgttgtttttccttcgttgattcgctttttcttacataactgcagtgctgagatttttcagtagtaaataccgggattgtggattatgctgatcagtttcatttcgaaatgtttgttaccagacttgagcaacatttgtttgtactttatgtgtataataataatatcttgtttggatgtagatattggagcataaaattgggaattagaatcaatgt

SEQ ID NO: 11808 - DNA, 1860 bp, Zea Mays
cgagagtccattgatgggctggccggcctacgccgacgcacttatataaaagccccgaaccctagaggccagcagcacattcttccccgagtcgccgtcgtctgctccgggctgctgttctgcgcctccacaaggctttggcctctgttgtaagccatgggtaaggagaagtcccacatcaacattgtggttattggccatgtcgactctggcaagtcaaccaccaccggccacctgatctacaagcttggaggcattgacaagcgtgtgattgagaggttcgagaaggaagccgctgaaatgaacaaacggtccttcaagtacgcttgggtgcttgacaagctcaaggctgagcgtgagagaggtatcaccattgatatcgctctgtggaagtttgagaccaccaagtactactgcactgtcattgatgcccctggacatcgcgacttcatcaagaacatgatcacgggtacctcccaggctgactgtgctgtcctgatcattgactccaccactggtggttttgaggccggtatctctaaggatggccagacccgtgagcatgctctccttgctttcacccttggggtcaagcagatgatttgctgctgcaacaagatggatgcgaccactcccaagtattccaaggcccgttacgatgagattgtgaaggaagtttcatcctacctcaagaaggttggatacaaccctgacaagattgcctttgtccctatctctggttttgagggtgacaacatgattgagaggtccaccaaccttgactggtacaagggtccaaccctgcttgaggctcttgaccagatcaccgagcccaagaggccttcagacaagcccctgcgtctgcccctccaggatgtgtacaagattggtggtattggaactgttccggttggtcgtgtggagactggtgtcatcaagcctggaatggttgtcaccttcggtccaactggcctgaccactgaggtgaagtctgttgagatgcaccacgaggctctccaggaggcccttcctggtgacaacgttggcttcaatgtgaagaacgttgctgtgaaggatctcaaacgtgggtacgtggcctccaactctaaggatgaccctgccaaggaggctgctagcttcacctcccaagtcatcatcatgaaccaccctgggcagattggcaatggctatgccccagtgctggactgccacacctcccacattgctgtcaagtttgctgagctcataaccaagatcgataggcggtctggcaaggagcttgagaaggagcccaagttcctgaagaatggtgatgccggtatggtgaagatgattcccactaagcccatggtggttgagaccttctctcagtatcctcctctgggtcgttttgctgtccgtgacatgaggcagacggttgctgttggagtcatcaagagcgtggagaagaaggacccaactggtgccaaggtgaccaaggctgcaataaagaagaaatgatgcgtcctcccatgtgccctcgtttattttgtacttgtgcccgtatacttcgatctgttaaaatctattggttgtgtgccctgtgtctgttgtttgggtatctatactgttattttgagacatgttgacttgcatggtcatctggattgggttcgcatttctgagtcatttgtcttgacatgaaaatcttgctttttttcttgatcttaaaatctaggttgtctttgttgcggggttgattctaatattaaaggggacatttgggattttgcccatgacatcgttccctcgctaaaaatttaatttgtgggttcgtctatgcctatgaatcgagggtctgggcaaaattctgaagctcag

SEQ ID NO: 11809 - DNA, 1173 bp, Zea Mays
gtaatttatctttacaaagcatgcaataagatagaaactggcaatgaaacttacttgctcagaggaatatgctcaaatggtccagacgtgggaatcgtcccgcacaaatcattacttgaaacacaactttgagactagatattccagcgagttcccttgggatgggcccagtcaaatgattgccattgagacgcaagaatacaagggacttcaactttccaagggcaggaggtattgtccccgaaatgttgttcttgtacaagtcgaagcttattagattcttcaaattgccaagctcagaagggattgttccttgaatgttattcttataaagttccctatactgaagatgctccagtttcccaagctcaggcaccagatgaccagataagttcaaattaccaagatctctgcgggtgacgcggttgtcgcggtcgcaggtgacgtggaaccaggtgcaggggttgacgagcgtggggtcccagctctgcagaacgccgccggggtccctgaggctccggcgcagcgccgagagcgcgtcgccctccgagttggcccccgcgagcgcgagcacgagcgccagagccagggctcccgccgccttcgcccccgcccccgccatgctggagggcgccggatcggttggtggcgggatctggacgcggacggagggcagcagcgggcgggagaactgaggaagaaggggaacggcagcaggggcagggaggaggacggaacgcgagaggtctcgtctggtctgctttttctctgcctgcccggtccgtcgctggtgctgtggtagtggtaggagttgaaccacggaaccagccacacccacccagtccaccttttgtaccgctccgcgtctcgcgtcgcgtcgtgtcgcgtggctgctgctggcggcgaggctgttggtgttggtgctagtgaaagtggagtggggtggagcagaggccccacctggtggtgcgttgggtacttgggccacgcacgcacgcacgcctgctggaatcgagtggaaagcgagcgagaggggcagtgtcgacagccgttttcgaaaggacacgcagggcatggcggatcaggtcgcaaggtgcagccatggaggaggaggaggaggaagtgcaggtgctgcgcaggggggggggggggggggggggggggggggggggg

SEQ ID NO: 11810 - DNA, 823 bp, Zea Mays
gagataagaggactggcaagactaaaggttatggatttgtgagcttttcaaaccctactgacttggctgcagcaataaaagagatgaatggaaagtatgttgggaatcgccctattaaattgcgtaagagtaactggaaggagaggacagatgttgaggctctgcaaagacaaaagaatcatgtccaaaggaagcctaaaattcccaagaagagtgttcttcacaagtagagatatataggccctaccgagggtgaagggcagctcatggatgcgctgctgccttgggatgatgctacttctggaatgtcttcactctctgcactactggggggcggaaatcacgcaagggctgttgtttcatgcaaattgcaacgagctactgctgccatctgatgcaatttgtgctccgttttactgtttcccatagtttgcgttcatccatttgcggtgttggagtactgtcatggctactgactaaccaggccgagctgaacaagaaccaaatggaattttcagttttggtttcagcaagtaatagcatgacgtgttgtactatctatctcggttccagctcaaggttatgttcttgtccacggcatccacggccgccagcgtctaggaggccaggagggcctgcacgtacttgagctccagtcacttctccaccccttccccccatcacttccttaaggctctgcagctccagattaatttgatttgtattagcaatttatcctcctttttcaaaagaaagttgcaactgtactgtttctgtttcatgacaacactgcaacttaatgagttaatgacagaataaatta

SEQ ID NO: 11811 - DNA, 2027 bp, Zea Mays
gacctctacaccggatccgaatccaagccgaagctgctgttcggggaagcacacgacaagcacatcgctgctaccagaataaaggctggggaggaggaagcggcggcggcggcgctctcagaagagagggtgagatgaagactcggagctcagcgagaggggagccgaggcgtctcggaaatgcggctcttctggcgctcatgctctgctccgtcgtcgcgctctccctcatccgggggagattcgccccaattggagatgccatcaaatccgaggacgacgctgcggcggctgcgctcagtgtcagcaaggcggccgtcaacgttgacaccggcgacagcgccgacgaggccgccgccgaagctgctgctgaggagaaagagaaggaggaagtccagccgaagcccgctgacagttccggctccggttccggtggcagcgcagccaagccggtgtgctacgagacgagccgccgctccgacacctgcgaggcagctggcgacgtgcgcgtcgtggggagcacccagacggtgtacgtggactcgctggaccgggagtggaagaccaagccgtactgccggaagcacgacaacttcgcgctcgcccacgtcaaggagtggtccctgaagccgctcccctccggcgcggcgccgcagtgcacggtcaacagctcggccaccgcgttcgtgctgtccacgggcgggttcaccggcaacccgttccacgactacacggacgtgctcatcccggccttcatcacggcgcacccgctccgcggcgaggtccagttcctggtgagcagctacaagtcgtggtggatgaaccgctacatccagatcttccagcagatgagccggcacgaggtggtggacatcgacgcggacgacgaggtccggtgctaccgcagcgtggtggtgggggcgacgttccaccgggagctgggcgtggacgcgtccaaatcgccgccggggtactccacggccgacttccgcaagatgctgcgcgacgcgttcgggctggagcgtgccacggccacgcccagcggcgaccggtgggacatccggcgccgcccccggctgctcatcatctcgcgccgcccgtcccgcgggcgcgccttcatgaacgagcgcgccatggcggacatggcggccagcctggggttcgacgtgcggatcggggagccagacaccagcaccgacacgtccaagttcgcgcggctggtgaactcgtgcgacgtgatggtgggcgtccacggcgccgggctcaccaacatggtgttcctgcctgccggcgccgtggtggtgcaggtggtgccgtacgggcggctggagtggctggcgcggaacacgttcgcggagccgtcggcggggatggaggtccactacctggagtacgtggtgcagctggacgagacgacgctgagcgagcagtacccgagcgatcacccggtgctgagggaccccatggccatccacaagcaggggtggaacgcgctcaagaccacgtacctggacaagcagaacgtgcggccgcacctgggccgcctcaagaacaccttcctccaggcgctcaagatgctgccgcacggccgggacgattgataagtcaaattagttgattcacctggatctcagcctcagttatttagagggagtaaatgtataggttaatggtagctactacttttttcggcttatttgttttttttttgcctttatttgtttgtacgagtaagaggatgcaccagcgtagctgtgaatggcttcacagttctcagagacgaactagtagtgttaaccgttgatattttattattatatatgttgctttggtagcatggaacgtgattgcagtgatgtgctttgactaaggccctgtttgggtccgctagtttattagaaactggtttttaaaagttaaaagttcttcaaacaggtcaatttttttattcactttcctaaaatatagtttcagttttttattcaaaaacagaccagtttcttcagctaaaactagtttataagaaa

SEQ ID NO: 11812 - DNA, 1741 bp, Zea Mays
ttatctaatcttaatcatctcgcagctggcgacaggtggtggtggtggagatattggaaaaaggatcggtcatggtgggggtgatggtggtgatgatgatggtgacgatgatgactactttgatgattttgatgagggagaggaagaaggtgggcttttcaggaggcgaattgttgtacaagagctattcaatagggagttcgtagaagctgtgttgcaagaatggtacaagacgatgagtgatttgcctaccggtcttcgccaagcttgtgagatgggtttggtgagttctgcacagatggtacgttacttgtcaatatttgcaagacctacaaacgctaggtccttctcaagagctcttccaggctggctttccagaggtcttgttggaaggacacttgcagatccatcattcccacataaaatgtctttggagtttatagctaccattgcgtcatctatttggtgtgaaatgaatattcgcaaagagaggtttaaacaagaatgggatttggtgattgttaatgctttgactgcagcttgttgcaacttgatggttcttggacttttagcaccatgccgttcatatgcgagtacatctcgatttgacttccaaaatgcaattgagaaacttccgaacaacatatttgagaagagctatcctttgagagagtttgatctagcaaaacgaatcagtgcattcttttataaagctgctgagcttagtctggtcgggtttgtagctggctctgtgcaagggggtatgtcaatagtcttgtccgcaagaaaagaaaggaggttatcggtgactattccctctatcagcaccaatgctcttggttatggagctttcctaggactctatgctaacttgcgttatcaattgctatgtggagtagaccaatatatggtcaagcgcttcgatgttttgggtgtggcaatcttcttcagcacagcagcaagactgatgaatattcagattggtgaggcatcaaggaggacttggcttggcgaggaagctgatccacagtactcagatcgactgttgagagcatacaagagacctgtggaggttgacgcggaccaatcaaggtggtttatatccaaggatgcaattgtatctggccttggtcttctaggtatcaagcagggtggacctgaggcaacattttctaagtctcgtcgaaagagagtcatccgcaaaaaggtcacttcaggttgagtttagtggatttggatagcaatgctggaacaattttgcttctgttccactatgccagagggaggtctacccaaattatggtaaatgagaaaaaggtatcaagtcaaccagcacgtggtctgtcggcgaagggatcaaagggtttgttactgggaagggttagttaaaaggtgccaattactattttataatttaattgcagttatttaaggtaagaaaatatgttgttttcttgtattgctgtgaggcaaatagacacgtttagtggtagttttgtaagattgttaatgtactgactttacatgagaaatggattctgcatttttatatagatcaagtagctgccacatgcttgtatctatcttttgaggtcaattaggtcagggtcctgctttgttgctggttaggactacgcttttataaaaacttattttaagtacgaaggccgatctctgtggaagtttcatcgtgctatttccaagactactacattttctaaagaggaatgaacctcaatgg

SEQ ID NO: 11813 - DNA, 1178 bp, Zea Mays
acacctcaaatcacctcacacaacaagctgcaccgcagcaacgaacacgaaccttggcagaacgaagctgaagtagttcgctgtgaacccagtatggcaaacgcgccgaggatcctggccctcggcctgctagcgctcctgtgcgctgccgccggcccggccgccgcgcagaactgcggctgccagccaaacttctgctgcagcaagttcggctactgcggcacgaccgacgcctactgcggcgacgggtgccagtcgggcccgtgccgctcgggcggcggcggcggcggcggcggcggcggaggcggcggaggcagtggcggtgcgaacgtggctaatgtggtcaccgacgcgttcttcaacggcatcaagaaccaggccgggagcgggtgcgagggcaagaacttctacacccggagcgcgttcctgagcgccgtcaacgcgtacccgggcttcgcccatggcgggacggaggtggagggcaagcgcgagatcgccgccttcttcgcgcacgtcacgcacgagaccggacatttctgctacatcagcgagatcaacaagagcaacgcctactgcgacgcgagcaacaggcagtggccgtgcgcggcggggcagaagtactacgggcgcggcccgctgcagatctcgtggaactacaactacgggcccgccgggagggacatcggcttcaacgggctcgccgaccccaacagggtggcgcaggacgccgtgatcgcgttcaagacggcgctctggttctggatgaacaacgtgcaccgtgtgatgccgcagggcttcggcgccaccatcagggccatcaacggcgccctcgagtgcaacgggaacaaccccgcccagatgaacgcgcgcgtcggctactacaagcagtactgccagcagctccgcgtcgacccagggcccaacctcacttgctaggcgacggcgtccacgttgtacccatggctcctgctagtgctagctcgtccacaataaatgctcggcgtcgcaccctcgcgaaaagtaaaccaagagtttactgactagtacgagctagctagcatgcagtaataataatcatcgtaataataataataaaacgactgggctgagccactttgttcgacctgaatgaataatgaagcaactgctgaagctgaaacctgaaagttgacttccac

SEQ ID NO: 11814 - DNA, 965 bp, Zea Mays
ttccgccccgcgccgacggatctgatcgatcgatttccctggggaagagatgggtctctcctttgggaagctgttcagccgcctcttcgccaagaaggagatgaggattctcatggtcgggctcgatgccgccggtaagaccaccatcctctacaagctcaagctcggcgagatcgtcaccaccatccccactatcggattcaatgttgaaactgttgagtataagaacattagcttcactgtttgggatgttggtggccaggacaagatcaggcccctgtggaggcactactttcagaacacacagggacttatttttgttgtagacagcaacgacagggaacgtgttgttgaggctagagatgagctccacaggatgctgaatgaggatgagctgcgtgacgctgtgctgcttgtatttgcaaacaaacaagatcttcccaatgctatgaatgctgctgaaattactgacaagcttggtctgcattccctgcgacagcggcactggtacatccagagcacttgtgctacatctggtgaagggttgtatgaggggcttgactggctttccagcaacatctccagcaagtcttgaagcttttcggcagggctcctagcgagaggatgtctgaacaacttatggctgctttttttttacatattattactaagacacaagctacagcagatatagtacttgtgaaaaaaagaaacttctgagctcttttgagggattgatactagattggattgtgtttttgtttttgggtcgataccatcgcctgttcggttccacaaaattgactgtcaactatatttacctatgttcggagattgtatggtaaattaaattgacatgctttagcgtaggtctccaccgatccagtgttgtgctagatgtgagttgctagattttgtttatagatgagtatatgcttattttcatccatgcatgatttagagca

SEQ ID NO: 11815 - DNA, 973 bp, Zea Mays
tgcagcacgtctcctccttttcctcgtccacccggccatctccgcatccactaccgcaggccgcagcccagcaccggccgctctacgccggcacgtcctcgtttctgtccgaggtcatcgcctccgcaacttcgtggccggtgaggtcgcaccaccatggcgtcgctcctagcccggcaggcagcgcaggcgctccgcgcgaggcaaacggcgcagctcgggccggccgcgtcggcgatgcaagggcacctccgtacctacatgaacgcggggattcccaagcggttcaaagaggatgaggagaaagaacagcttgcaaaagatctcgcaaaagattggaatgctgtgtttgaaaggagcatcaatacattgtttttgactgaaatggtccgtggcttgatgctaactctcaagtacttctttgatagaaatgtcacaattaactatccgtttgagaagggtcctctgagcccccgcttccgtggtgagcacgctctcagacgttatgaatctggggaagagcgctgcattgcttgtaaactatgcgaagctatatgcccagcgcaggcaattacaattgaggctgaagaacgtgaagatggcagtcgccgaaccacaagatatgatattgacatgaccaaatgcatttactgtgggttctgtcaagaggcttgcccagtcgatgctattgttgaggggcctaactttgagtttgccactgagacacacgaggaactactgtacgacaaggagaaattgcttgagaatggtgatcgctgggagactgagattgctgagaacttgagatctgagagcctctatcgctgaatctgtcttccattatggttgataaactgggttcttccattttccatattttgctcaactagctgatgaataagcaaacgatgtatcataacttaggctcgtgggttgtgcttaccctagcatcagagggtaggctagcggggga

SEQ ID NO: 11816 - DNA, 78 bp, Zea Mays
tgtacctctgccaggtaccaagatttgggtttaaatgattaagctgagatcgggcgggtgacttgcacgagaagagag

SEQ ID NO: 11817 - DNA, 1712 bp, Zea Mays
ttataaaacctagctcctcaagctccagacgcagtcgaccgccgcagaccgggagtagtcgacgcgccgtcactgaatcctcagatcacggctagccgtaatcacgccactctgctgactcccggcgagcagtgtaacattttccttcagccatgggcaaggagaagactcacatcaacattgtggtcattggacatgtcgactctggcaagtcgaccaccactggccacctgatctacaagctcggcggtattgacaagcgtgtgattgagaggttcgagaaagaggccgcggagatgaacaagcggtcattcaagtatgcctgggtgcttgacaagctcaaggccgagcgtgagagaggtatcacaattgatattgctttgtggaagttcgagaccaccaagtactactgcactgtcattgatgcccctggacaccgtgacttcatcaagaatatgattactggcacttcccaagctgactgcgctgttcttatcattgactccactactggtggttttgaggctggtatctccaaggatggacagacccgcgagcatgctctccttgctttcacgcttggagtgaagcagatgatttgctgttgcaacaagatggatgccaccacacccaagtactccaaggcccgttatgatgagattgtgaaggaagtctcttcctacctgaagaaggttggatacaaccctgacaagatccactttgttcccatctctggtttcgaaggtgacaacatgattgagaggtccaccaaccttgactggtacaagggcccaaccctacttgaggctttggacttgatcaatgagccgaagaggccttcagacaagcccctgcgtctccccctacaggatgtgtacaagattggtggtattggaactgttcctgttgggcgtgttgagactggtatcatcaagcctggtatggttgttacctttggtcctagtggccttactactgaggtgaagtctgttgaaatgcaccatgaggctctccaggaggcccttcctggtgacaatgttggcttcaatgttaagaatgttgctgtgaaggatctgaagcgtgggtatgtggcctccaactccaaggatgaccctgccaaggaggctgctagcttcacgtcccaggtcatcatcatgaaccaccctgggcagattggcaacggctatgccccagtgctggactgccacacctcgcacattgctgtcaagtttgcggagctcattaccaagattgataggcggtctggcaaagagcttgagaaggagcccaaattcctcaagaatggtgatgctggtatggtgaagatggttcccactaagcccatggtagtggagaccttttctgaatatcctcctcttggtcgctttgctgtccgtgacatgaggcaaacggtggctgtcggagtcatcaagagtgtggagaagaaggatccaactggagccaaggtgaccaaggctgccgcaaagaagaaatgatgtgtctggctggttctgtgtttgcttgagggatacctagtggaaacgtaaaatatctcgtcttgttcacgtcattgtctgaactatgctcgcaacgtttgcctggtcgatttagaactgttattttcgttaaaaccagagtgttatttaagacttatccgaacatctggtgagccatatatggttactagttttgttactacccttaaaaaaaac

SEQ ID NO: 11818 - DNA, 878 bp, Zea Mays
ctttgcttgagtgcccatagatgcacaacaagaaccataattaaaggctgacaaatgtgtactggcatcttctggctttcaaggtgatattaaggctctgcagaagaacctagctgccagagaattgctgtaccaacaccagcataataaaaggatgagctgccccgccatggcacagctcctctccaataccctgtactacaagcgattcttcccatattacgccttcaatgtgctcggtgggcttgacagcgaggggaaaggatgcgttttcacctatgatgcagtaggttcctatgagagaaccggttacagtgctcagggaacgggatctactttgatcatgccagtcctggacaatcaactaaaatcaccaagtcctctattactccctgtcagggatgctgtcacaccattgtcggagtcagaggccatcgatctagttaaggacgtgttcgcatctgcaactgagagagacatctacactggagacaagttggaaattgtagtcattaacaaggccggtactatgcgcgagtatatcgacctgagaaaggattaagccaacacttcagttgtgctgcagctgtcatttgctttgaactttttttcctagtctggtgatttatgtctaaagctgttgcttcataggaacacttgtgtttacttgcatatgtaatgtacggtatgtaccaggattcagtgagttttttttctgttgaaacaaattgcttggatactgaaacactgtatttattgcctgaattgtctattttagttttcgtatttggtaatttagggaccaaaatagaataaaatagagggactaaacattagtccctagaaaccaaacacctctattaaaattatttggtttc

SEQ ID NO: 11819 - DNA, 629 bp, Zea Mays
caaaatcctatccccttaatcccgcccgccaccctccgcggcggctcatcgtcgttagctcagggattaatctgccccacgcggcctgggtggggacttacttcctgcggaactactacaacctgctgcaacaaacccccgatgtcgtccaccagttctacagcgaagccagcaccatggtccgcgtcgacgacctcaccggcaacaatactgcaacaaggagctgtcgttcagccattgccaagccgagagcagaagcagaagagaaactgagaagaacccagcttagatcagactgaagaactagatgcggtggacgccttcaagacctgctgacatgagggctgctagtcagagctgctgtttttggcctgttctttgacatgagggtacccaaaaactctagttgctcgtgggtgtcaactttttattatatgttgttatgtttgtgcaaaatcaactgaaatgtgaagtcaagtggtgatgctgtgaactgagtttagtgttgtccacttagtttgtatgatcactggaatactagttgtattcatctacggaatatggaattgtgtgctcattcctctgttctagtatcttttgcaattttcaataaaattattctctgcaca

SEQ ID NO: 11820 - DNA, 653 bp, Zea Mays
gttgcgcgagcccacacgtcagatcttcttgtgtcgcaagacaggcccacaaactgggactaatggttcgagagtcgagacttcgagtgccttctcccttataaaaccgaacgcccagggccctccatgttcaatctcgttgtccgttgtactctctctctctattcgttccccgcctcaccccgagccagccgtctcgctagggtttcgccgccgccgccgccatgcctcgccgcagctcaggaaggtctgccccacgcccagctccccgtgctgctccagtgaggaacccgccacagccagcacgccaggctcctcctccagctcctgttcgagatggtggtggctccatgtttggaggaattgggtccaccattgctcaaggtatggcgtttggcacgggtagtgccatggcacacagggctgttgatgctgtattaggtccccggaccattcagcatgagactgttgcctcagaagctgctgctgctgcccctgcccctccagtgatgaatgctgatgcttgcagcatccattctaaggctttccaagatccgcggtcgttcgttctcacatgggctaccgtgccgctgtgtatgtgtggggcagtggttctggggttttctacaatgtcggggctgccttacaacccc

SEQ ID NO: 11821 - DNA, 821 bp, Zea Mays
ctttcttctcgtttcgccgctagatttgggattcctgcagcttcttttcttggcctccttctcgtccttgtagtcttgggttgagatcccaggattcagactggtgccattcgatttgatttggcgcggggtactttcctatggccgcctccatcgcggcctcgcccttctttccagggtcgccggcgccggccgctcctaagaacggccttggagagcgcccagagagcctggacgtccgcggcgttgcggcgaagccgggagcctcgtctaatgccgtgagggcgggcaagacgcgcgcccacgctgccgtccccaaggtgaacggtggcaagtctgcggtggcggatgtggaacacgagaccgtaactgtaccttcgtcggtgccgaggactttctacaaccagcttcccgactggagcatgctccttgctgccatcacgaccatcttcttggccgccgagaagcagtggacgatgcttgattggaagcccaggcggcctgacatgctcactgacacttttgggtttggccggatcatacatgatggcctcatgttcaagcagaacttctccattaggtcctatgagattggggctgataggacggcatctatagagacaatgatgaaccatttgcaggaaacggcacttaatcatgtgaagaccgctgggctgctaggtgatggattcggctccacaccagagatgagtaaacggaacttattctgggtggttagccagatgcaggctatcgtcgagcgttatccatgctgagctgggtattgtgtgattagttgaatgatggtttcagttgttcgg

SEQ ID NO: 11822 - DNA, 2053 bp, Zea Mays
tcttagatcaccacatcatgcaattcttggttcaatatcaaatgcatgttgcggagatggagacacttagggctggaatgcctcctgtttatgtaaaccacagtaatgatggtgggccagctgttagggatatacatatggagaacttcagtgtcactgttggtggtcgtgatctaattcaagaagccactataacacttgcttttgggaggcactatggacttgttggaagaaacgggactgggaagacatcttttctcagagcgatggcattgcatgcaattgatggtattcctaagaactgccagatattgcatgttgagcaagaggtcgtgggtgacgatacgacagctttgcagtgtgttctgaacgccgatgtcgaacgagttcaacttttgcaggaagaagctcgtcttgttcaacaacagaaagatttagagattgaggctgagtttgggcagagctctgacaagggcaaggatggttttgacaaagattctatcagcaagaggcttgaggagatatataaacggcttgagctcattgatgcggatgcagcagaggctcgcgcagcatcaattttggcgggtcttagttttactccagaaatgcaacgcaagcgtacaaaacaattttctggtggatggcgcatgagaatagctctagcacgtgctctgttcattgagcctgatttgctactacttgatgagccgacaaaccatcttgatcttcatgctgtgttatggctagaaacttatctcctgaagtggccaaagacattcattgttgtatcacacgcaagggagtttttgaatacggttgtcaccgatatccttcatctgcatggtagaaaactacatgcttacaaaggtgactatgacacatttgagaggacaagggaagagcaccttaagaatcagcagaaagcctttgaaacaaatgagaaggccagacagcacatgcagacattcattgacaagtttcggtacaatgcaaagagagcatcacttgttcaatcaagaatcaaggcattggagcgaatggaacatgttgatgcagttgtcagcgatccagactataaatttgaatttccaaccccagatgaccgccctgggccaccaatcatcagcttcagtgatgcctcatttggttaccctggagggcctaccttgtttaaaaatttgaattttggtatcgacctggacagccgcatagcaatggttggtcctaatggcattggcaagtccactatactgaaactaatttctggggatctgcagccaacttctggaacagtatttcgctctcccaaggttcgcatggctgtattcaatcagcatcatgttgatggccttgatttgacggtgaatccccttttgtacatgatgaagtgctatccgggtgtgccggagcagaagttgagggcacatctgggttcgtttggtgtttcgggaagccttgccctccaatctatgtacactttatcaggtggtcagaagagtagggttgcattcgcgaaaataaccttcaagaagccgcacatcattctccttgacgagccttctaaccatcttgatctggacgctgttgaggcgctcatccagggtttactcatttttcagggaggggtgctgatggtgagtcacgatgagcatcttatcactggaagcgtggacgagctttgggtggtgtcggaaggcagggtgaccccgttctcgggcactttcaaggactacaagaagatgctcaagtaacaaaaacatgtattatcgaccatagcctatatatctatatgcttgctattatgttgtattaccgtataaattttgggagtaaagcatcgaaattattataacacatacctaatgccgaaaggagaagatttctcacatttttagttcgacccatccgtccatcccataggatcctatttcgttcagcttttttctaattagattttatgagaatttgaatatcgcggagattacacgtggaggaaaataacgatgtccatagggtttaagatctagaaaatgatggatttctattcgac

SEQ ID NO: 11823 - DNA, 76 bp, Zea Mays
gcgatatatacgtgtagccacacgtttagccaaaatcgaaccctgcgacaatactttgaagatacgtatgatttat

SEQ ID NO: 11824 - DNA, 1345 bp, Zea Mays
tgtcggaactgtggaatgtgtttggaatgtaagaagactgataatactgtcctgtccgatagccaggatagtggtggtgaacttgctgaagtaaagggcggcattcaggagtgcctaatccaaggtctcaacactgggacgttggatttacaagtcaatggctggggccataaagctgcactagaaggtgagtacaaggagatctactcagaaaaaggtttgggcaaagttcagtggaaaccggccgagaacgaccgggcagccacttggtataaggtaagttgaaccacgaatacgagcactatagattttattcagttttggttgcaaccctcaccctcggtgtcactatgttcactgccatgccagagatactttgatgagccagatggagatgatcccgttgtacttgacatgagctcaatgagcaagggaatgatttttgtgaatggcgaaggagtgggtagatactgggtctcataccgaactcttgctggaactccttctcaagcagtgtaccatatcccgcgtcctttcttgaaatccaaggacaaccttttggttatcttcgaggaggagatgggcaagccggacggcatcctcgtgcagaccgtgacgagagacgacatatgcctgtttatctcggagcacaacccgggacagataaagacgtgggacacggatggtgacaagatcaagctcattgcagaggatcacagcaggcggggcaccttgacgtgcccccctgagaagacaatccaggaagttgtctttgccagcttcggcaacccggacggcatgtgcggcaacttcactgtaggcacttgccacactcccaatgcaaagcagatcgttgagaaggaatgcctcggcaagccatcctgcatgctgccggtggatcacacagtgtacggcgcggacatcaactgccaatcaacgactgccacgctaggggtgcaggtgagatgcggaggcggcaagaagggtgcctgagaacaagacggatgctgctaattgacgtttcagctcgtttgtttgttcgtcccttcggtttggcactgatgcttatgacccattggtctgccattgcaattgaaatgtggttggaacgtgcttgatcgggaactaacatgaaatgagtgaagggtagatgctgatctgaaaaatatgtgtgttcccccctctttccttccatgtcgtgttgtttcaggtaaccgtcacaatatatataggtggtcccctttggaatccggggattattccgtttgctgtatttttttctgtgaaaatgaactgattcctgtcaattttctatatgatttatgattcatctgaaattcctgag

SEQ ID NO: 11825 - DNA, 715 bp, Zea Mays
atttattttggagggaggcagtatttatattttcagcaagtggctataaagtgttcattaatacttttgattgcaagaagttcaaggacactgttgaagagatagctgaacagcaaggaaagagcgaggagaaagaaaatgatgaagtctccactgccgcttctgatttggcacagaagttaacagtggcagagcccagcaaggaggaaaatgcagagaaagaggaggctcctgcatccgatgataagaaggatgctaaagagtgaaggttgaaggcaaacaagggtcaaatggatgccattccattcatttcgtttccaaggttcagcttccccgcaaattttcattgtgttttctccgagatgaatgtttgtgttcggtgaaatcagagtcgtcagtcatctacatagcttttcttggttgatagactgttattttaagtcgcatgtttatctgggatggctggggtcagcatgtttgtacaattatttggagttgcttttggaatggtcgcggtttgatgagttgcctacagcatgagatgtcttttcgctccacttttatggttcattcgttctcaataatatgggatgctatacttgtgttgatccattatcttgatgcatcgttgtctgtgcactgcaacaacaatacccatctgaacacccctatcaataaaataccattttttttctttccatcccactaatctagg

SEQ ID NO: 11826 - DNA, 403 bp, Zea Mays
tactaatattgctaattgcatgttggaaacaagcaaggctttgaacttaacaacagcacttcgcacggagctactggtaacaggcgtgacattctgagcggcatgaggctagaggagacagttgagcacagcacagttgaccagaagagatagtcgccggaacaaaaaccttgaccagttccacagcgctgtagtttcgcagatgatgagcagctcggcatctcatgactgaataaacgcaatgcccgccatggagggagactccggtgtctttcttgtacctgaggtggttaagttgttactcgaatgctgtatcacgagtggtgtagtcctgctattcgtaatatttcgattaaccatcatgctattctgtctcgaacgatgaatcgggtgcatcctggac

SEQ ID NO: 11827 - DNA, 761 bp, Zea Mays
ctggttcatcagtatgtccaattatctgaaatctcaatggtatattttgtccaagacgctggcagaggaggctgcttggaagttctcaagggataatggacttgaaatcgttactataaacccagcgatggttattggtcccctgctgcagcctacactaaataccagtgctgaagcaatcctgaagttaatcaatgggtcatcgtctacatatcccaatttttgctttggatgggttaatgtcaaggatgttgccctggcccatatccttgcatacgaggttccctcatcaaatggaaggtactgcatggtggaaagagttgttcactactcagaactggtgaacattatccgcaacatgtatcctacccttcctcttccggacaagtgtgcagatgacaagccgtttgtcccaccctaccaagtatcaaaggagaagataaaaagcataggcatcgagttgattccactggagacgagcgtcaaggagaccatcgaaagcttgaaagagaaggggttcgctagtttttgactcgagcaagctgtgaaacataagtgttactgtactacgtgatgttgcattgtatacatgcatcggacttcgcagttcccaagctattttggtagctttggtctgtaagattacctaaaataaactgagccacgttgccacgctgtagcttttggacatgttatgctttgatcggattgagacacgtgatatatgatcgttgcttacaaatgtggtacgctctatctcc

SEQ ID NO: 11828 - DNA, 2493 bp, Zea Mays
agcgctatcgccaagtgcctttacatgattaccgcaatattggtattatggcccatatagatgcaggaaagacaacaactactgagcgcattctgtattacactggaaggaactacaagattggtgaggttcatgagggaacagctacaatggattggatggaacaagaacaagagagaggaataaccattacatctgcagcaacgactgccttctggaacaaacacagaatcaacattattgatactcctggtcacgtcgacttcactcttgaggttgaacgtgctctcagggtgctggacggtgctatatgtctctttgacagtgttgctggggtagaaccacaatctgaaactgtgtggcgccaggcagataaatatggggttccaagaatatgtttcgtgaacaaaatggaccgccttggagctaacttctttagaactagagacatgatcgttgcaaatttgggtgccaaaccattggtgattcagttgccgattggttcggaggacaatttccaaggagttgttgatctagtaagaatgaaagctattgtatggacaggggaggagctgggtgcaaaatttgaatacaaagacatacctgctgatctccaagagatggctcaagactatcgtgttcaaatgctggaaactattattgaattggatgatgaagttatggagaaatatcttgaaggaactgaaccagacgaggaaactgttaagaaactaatcagaaagggagcaatttctgccagctttgtcccagttttatgtggttcggcattcaaaaacaagggtgtccaaccattgcttgatgctgttgtcgattacttgccatctccacttgatctaccttcaatgaagggtactgacccagaagaccctgaaataatatttgaaaggcaaccaagtgacgatgaaccattttctgggttagctttcaagatcatgactgatccattcgtggggtcactaacatttgttcgcatatactccgggaagctgatagctggttcctatgttctcaatgcaaataaagataagaaagaaagaattggaagacttcttgagatgcacgcaaacagtaaggaagatataccagttgctgtgacaggtgacatagtagcgcttgctggtctgaaagacacaattactggtgaaacactctgtgacccagacaagcctgtagtgcttgaacgtatggaatttcctgatcctgtcattaaggttgctattgaacccaagaccaaagctgatgccgacaaaatggctactgggttaatcaagcttgctcaagaagacccgtcattccacttctctagagacgaggaaaccaaccagactgttattgaaggaatgggagaactgcatcttgatatcattgtagacagactaaagagggagttcaaggttgaagcaaacgttggagctccacaagtcaactaccgtgaaagtatttccaaagttgcggaaatacaatatgtccacaaaaagcaatctggtggatctgggcagtttgcagacattattgtgcgttttgaacctttggaagctggaagtgggtatgagttcaagagtgaaatcaagggaggggcagtgcccaaagaatatgtaccaggggtgatgaaaggattggaagaaagcttacccaatggtgtcctagccggttacccagttgtggacttccgggctgtgctggttgatggctcatatcacgatgtcgattcaagtgtcttagcattccaaattgcagccagaggagcattccgtgagggaatgaggaaagctggtccaaggcttctagagcctataatgaaagttgaagtgataactcctgaagagcatctgggtgatgttattggtgatttgaactctagaagaggacaggtcaacagcttcggggataagcctggtggactcaaggtggttgattcttttgtgccacttgctgagatgttccaatacgtcagcaccctccggggcatgaccaaggggcgagcgtcctacacgatgcagctcgccaagtttgacgtcgtcccacagcacatccagaaccagatctccgtggcaaaaacagaggaagctgctgcttagttttggttttccgtagatatatccatacagcaacaggagagcaggttgataggaaggacatcaaggtgtatgtagctttgtagtgtaaatctcttaaggcttgttcggatgattggaggggattgatatggattgagagagattttaatttactatggattgaaacttcctcaattcatatggattggactagaaccgaacatggtctaagggagcattatttgccattgattttgcacctgataataatggcctttgttgagttttcacaatgacaggacagttgaattatatgtttttggtttcctgctccctgttgagaactcagttctcaactttagtttggaaaacatagcacctgtaacaatataaattaatgcaagatggaaagaac

SEQ ID NO: 11829 - DNA, 685 bp, Zea Mays
gtaggctgagtgataaaaggctgtaaatctacatgacaggccaaatattggaccaaggaacaggcccatgaactcgctaaagcgcaggaggcccggctctgttctgatatatcgctccgccgctagggttttcagggatcccgcctcacaccgccgcaaggactcgcgacggacggagcaacggaggaagcaactacgcggcagccatggtgaacgttccgaaaaccaagaagacctactgtaagaacaaggaatgcaggaagcacaccctgcacaaggttacccagtacaagaaaggtaaggatagcctttcagctcaagggaagcgacgttatgaccgcaaacagtctggatatggtggtcagacaaagcctgttttccacaagaagaggtgcaagcactttgagatcggtggtgacaagaaaggcaagggaacctctctgttctaagcgtatcataaacttgctcagggtctcaagtatctgtcagaatttaccattacaaacaccctgtgcttagcttctgcatatgttcttttgtcacatctttttggtacgttgtagtttgtatgagaccaagctattgtttcgtgttattattatatttcatgaaattgtcaacatgaccgtttgcttgactgtaaacatagttctgagctttgggcaaacaaaataaaaaaaaatct

SEQ ID NO: 11830 - DNA, 1213 bp, Zea Mays
ggcaaccgaaaactgttgtgctgcatgagtggacctggctagtggatgcatttattctttgggacacttatggttatccaattgatttgactgaggtcatggcaatcgactatgggctaactgttgataagaaggggtttaatgcttctatggaagaagcgaggcaaaaagctagaaatgctcgtaacaagtctggagggaactctattgctatggatgcgaatgctacagcgcagttgcgcaaactggggcttgccagcacggacgatagcccaaagtttctgtggcccaaggaacatgaaagcgtggtgaaggctatctatactggctcagaatacattactacagctactggtgatggggactttggtcttgtgctggaaagtacaagtttctatgctgaacaaggaggccagatatttgacactgggagcattgaggggtcatttggaactttcaatgtgaacaacgtccaagtgtttgctggctatgttctacatattggctcatttacaaaaggttcgaaggttttgtctcttggagatagtgtgatatgcaaggttgattacaaccggcgcacactgattgctccaaatcatacgtgtacccacatgttgaactttgctctaagggaagtacttggtgatcatgttgaccagaagggttcaattgttctaccagagaagctaagatttgatttctctcatggaaaacctgtccagcctgaagatctgaggaaaatcgagttcatagtgaaccagcaaataaaggacgagctgggtgtgtatgcacttgaaataaaactagaggatgcgaagcgcataaatggtcttcgtgctgtgtttggtgaaatctaccctgatccagtaagagttgtatcagttggtcgcaaagttgaagatctgcttgcagatcctgatagcaaagagtggctatccatatcgactgaactatgtggaggtacacatatcacaaacacaagagatgctaaagcatttgcactcttatctgaggagggtattgcaaaaggagttaggaggataacagccgtgactgctggatgtgccacccaggctatggagttggcgtcatctatcgattctgatatcaataaagcatctcagttggagggagctttgttggaaaagatattgtgtccacctgttgtgacttgtgagtttaaggtggagggtgaaccacatacgtgccacga

SEQ ID NO: 11831 - DNA, 54 bp, Zea Mays
gcgtcttatttcacgatcataaaaccaatagtaaaaatagcgaatcagctcacc

SEQ ID NO: 11832 - DNA, 1090 bp, Zea Mays
cagtattttgaacattctagccctaccagcaactataaatcaatgcatgttgttaaacttggtgtcaatgttgatacgagtgacttggagcttaaacctcagggaagactttctgttactgtggtaaaagcaacttctttgagaaataaggagatgatcggtaaatcagacccttatgtgaaactgtatgtgcggccaatgtttaaggtcaaaacaaaagtcatagatgatgacctgaatccggaatggaatgaaacatttgacttgattgtcgaagacaaagaaacccaatctgttatttttgaggtttacgacgaagacaaacttcagcaagacaagagactaggtgtggcaaaactagcagtaaacactcttgaatctgagattacccaagacgccactctgaagctgctacattcactggatccaattaaaaataaggacaccaaggataggggcacattacatcttaaggtaaagtaccacccctttacaaaggaagagcagctggaagccctagagatggaaaaacaagccatagaggagaggaagcgtctgaaggaggctgggataattggtagcacaatggatgctgttggttctggtgttggatttgtgggtactggcattggcgctggcctcggtttcgttggttcaggaattggtgctggcgcaggccttgttacctctggtattggtgctgtcagcagtggccttggtaaagccgggaagttcatgggcaggactgtgacagggcctttcagcatgtcccgcaagaacggcagcagctctactgctccccagcatgatcaaccttcggcgtagtctgatgtacagtgaaagacaattgtcatatttgtgacagggttgccattctactctgtatacgtgctatacctaggactatacgtagcacttcgtttttgtttctgccactgcctggtgcctggttatatgaaatatgttttcgtcgttgtattgaaacgaggatctttcaaagtaaagattgctgtaaattgcatcagctttcccgaactatatgaaatttgtgcagtctgttgaagtaaaaaaagaaaagaaaatccactga

SEQ ID NO: 11833 - DNA, 145 bp, Zea Mays
cttggtgaccatgaactgccacagcctcgcggatcgagactgcttcgtcgtcagccaaggctggttgtctacgagaatgaacaccttcttgctcagtggagcgaagtagaggaacgcccgcgagatgtaggattgaatgtccctg

SEQ ID NO: 11834 - DNA, 3352 bp, Zea Mays
ttgtcagtgcagccaagcaaaacaatggtgcctttaaattttcatgcagcttccagtttttgtttgggttctgtagggaccgagattctggatacctcactcccttgattcagaatgactccactgagtcattgctccgttggcaatgtcagcctgtttcacatcggaagctacaggaccacccgagaaatccagataagaaggttccagggctcggcgaggtattcgagagtagcatcgccgtcgcctcggagactgctgcagccgcaaacagcgttccacctgatcagtatctacaagagaagaagctggtcctctccccagaggccaagaaccttgtccgcggcgaccgtggggactgatgtcactgtggaggatctgaatccgtctccctcggaggaagcctccgatgggaactctgaggctgcacctgacgccgttgatgcgagcgagcaggccgaggctagcacgggacaagcctcttctgctcgcaaattgggacgcaacatacggaagagcgagatgcctcctctgaatgaggaggatctagtgcctggcgcatcttttactgggaaggtgatgtctatcaagccattcggagttttcgttgacattggggcattcacagaaggccttgtccatatctccagagtaagtgatgggttcgtgaaagatatatcttctctcttcactgttggacaagaggtgtcagtgagattgcttgaagcaaataaggaaacaaagcgtatctctctgacgatgagggaaggcgatgactatgtcaagcctcaaaaagaaatgccgaaggctgcaaatggtgggcggagtgccaccgcaactcctaaaagctcgccaaggcaaacaagggaaaggcaggaactcaaggagacacttgagtcaaaatatgtaccagggcaatctctgaatggcactgtgaaaagcacaacgagagcagggacatttgtgacgttgcctgatgggagtgaaggattccttcccagagaagaggaagcattggcgttatttacccttatcggacaatctgcaatggaaattggtaaacagataagggttaaagtactgaatgttgcacagggtcaggccactttgacgatgaaaggggtggaagatgatgaagacgatctgaagacgctaaatatggagcttaagcgggactggtccagagggactaatgcgttcgagttggctttccgtaggaacaaagagatatctgcattcttggatcagagggaaaggaccaaagtgccggctgatacttcagtttctgctccggaagctgaaagctatcaggaggaagctgctccagaagatgaggaaagtagtgaagaattgagctctgtgtcagaagtagcaactgatgtttctcctcctgtatctgatgcctcctctcaggtgggaattcagtattctacttctgtggcaaatgctgctgaggaccaaactgtaggatctgaaagttcacctacaattagtgttgaactgtcctccaacgggaccccagatagctctattgtgtcttcagtttcagaaactgcagataaacctactgaacctgaagaatcttcagcggtagaagaggttcttgtaactgcaagcagcgaggcagggaaagaaccagctgctgacactgaggctgtaccagccttgaatgagaaaactggtgccgaggttgctgctgctgctggagttgcacaagcaagcaccacgacagccactatttctcctacccttgtcaagcaattgcgtgaggcaactggagcaggcatgatggactgcaaaaaggctcttgctgaaacagggggtgacatagataaagctcaagaattcctacggaagaaagggttggcggctgctgacaagagggctggcagagcaacagctgagggaagagttggctcttacatacatgacagcagaatcggggtccttattgaagtgaattgtgagactgactttgtgtctcgaggtgacattttcaaagagttagttgacgatcttgccatgcaaattgctgcttgccctcaagtgcagtacatctctattgacgacgtccctgaggagcttgtgaagaaggagaccgagctggagatgcagagggaggaccttttgtcgaagcctgagcagatccgggctaagattgtcgaagggcgtgtaaagaagaggcttggagaattcgcgttgttcgaacagccattcatcaagaatgacaaggtcacaataagtgagtggctgaagcaaactatagctacaactggagagaatatgaaggtcaggagatttgcccggtacaacctaggtgaagggctggagaagaaaagccaggattttgctgctgaagttgcagcccagacagcagcgaagccgccaccatctgctcctcccaaggaggacaagcctgctgaaacaacagaatccgccgagaagaagccggctgttgcagtttcagcctcgttggtgaagcaactccgagacgaaaccggcgctggcatgatggactgcaagaaagctctggccgagtctgacggcgaccttcagaaggctcaggagttcctgaggaagaagggcctctcatccgcagacaagaaatcctctcggctagccgccgaaggactggtcggctcctacatccacgacagccgcatcgggtgcatgatcgaggtcaactccgagaccgacttcgtggcccgcaacgacaagttcagggagctggtgaacgacctcgcgatgcaggtggtagcgtgtccgcaggtcgactacgtctcggtggacgacatcccggagagcgtcgtcggcaaggagaaggagatcgagatgcagagggaggacctgcagtcgaagcccgagagcatcagggagaagatcgtggaagggcggatcgcgaagaggctcggcgtgatggccctcctggagcagccctacatcaaggacgacagcaagacggtgaaggatctcgtgaaggagacggtcgcctcactcggggagaacattaaggtgcggaggtttgtccggtacaccctgggcgaggactgatcggtgtgaggtcgggcagcgatccctccgtcgcagcgcagcgcagccctggcatgagaagtcgggcacgtttttggcatgagaaggtctgtgactcggttccatctgtaattccgtatcacctgttactgctgttcgtggttcagaagagtaagaggggttggttagtatatccatcaaagcatatatatatatacaacattaaggcaaattgaattttgtatcttttatctgtgcttcgtttcaaaacatgatcgaattgtagcatggacgtatggtcttggccaatgtaattgtcttg

SEQ ID NO: 11835 - DNA, 388 bp, Zea Mays
gtacgcttacactgaaattggcagtgaaaactacttcaagactcggtggagtagtgtcaaaacgagtctaggacattcaaggagagtgacccgtgccaaggacgagaactgtgcgtcaactgtcagcatcggtggctacactacagccttctgcatcgcagtcctacaacaccagttccagccgctgccggaagagcgcgaataatcaatcaatcgatcgatcgagtttgcgatcgtgttacctcctaaataaaagttgtacacgcgaagtactactccagtatttacatgtatgtttctagcaggtgtacgtacgctactcctgaataaattgtggtgcacgcaataaataaataattaatgctcctggataaatttctgcctacca

SEQ ID NO: 11836 - DNA, 75 bp, Zea Mays
ggctcaatagaagagacaaacgagtaatgctcacaaaaatttgctaaacgtgagcgagtggttactcccttgctg

SEQ ID NO: 11837 - DNA, 1164 bp, Zea Mays
atcgtcgggatgtctgtgccagcatcagcccaggtgcctcacaccatacgatctgctgggagctgctgcttcaggtcgtcgcatcaactatctgcgcagaatctgggccgacatcgcaggtggcgggggaccggaaagaagaagatcctttccacccgtggcgtgcttgagtccagaaacggcgcacatcctggtggccttatgaagagaaggaaggtcgtggagcacatcatcctgctcagagccaagcccaacatctcagacgctgaagagaaagacatgctggactacctatacacatcgcagtaccagatgcgagggatactcgcggtctcgctaggccgcatcgaggaccccaacagcgacaacttcacgcacgctgtgttcatgcgtttccagcagaagcaagacatcgcggagttccagagtaacgcgtactactccaaagttgtcgacgagcacgtaaagcccgtttcctatggctcggtttctgtagatttcgagtccgaggtggaagacgacattatacctctctttcgcaggggagaggtatggccatggcctaaatcgatcgataccgttctttcttttttctttttcttttctttttttggcaacagaaagaagaagaaaaatgtggcaggattttaactacggcgtcgagtttatgctgctggtgtctttcttgaagactgcgtctagagaggcaacggaggacgcattagcgtctcttgacaagttgatcagccaatgcagcgcttctattgtgcaggcaacatgtggctgctgtttggatcgtccggataacgggtacagtcatgctgcagtaatccgtttcccatcatctgatgagttgaagctgttcagggagagcgaggagtacaaggatgtaagaactctgctcaaatggatttggatctggttctccacaagtgaagtaactcgtgtgtttggtggcctgtgcgttgcagatgtgggcgtccaagttccgcccgatcgtggagagatccctgcacctgcacttcaccgttgaccccgtggggaaccagctgatgtagaccaaccgagtggtcatccctatacatgggaccaagagcatctgtactgtacagtgtaaaacagagagatggggtaatatagaggataccgatagggtcaacaaaa

SEQ ID NO: 11838 - DNA, 189 bp, Zea Mays
cactatttagatttgtgctattcctgtttatatgcattcatgtgcattatgcatatcattcaggtacgtgaattaaccacgtgatgcggagaaccagagttgagtcgaccacaagataatgctgcgcgtgagcttctccacaaggtgatgctgatggacggacctgaagatggacagacgaaacaagtg

SEQ ID NO: 11839 - DNA, 87 bp, Zea Mays
gcataatatatgtacaggaaccttcggactcgggatgaagctgtacacaatatggagagcagggtcggaatgaaggttgaaccaacg

SEQ ID NO: 11840 - DNA, 610 bp, Zea Mays
ctgatttcggcggctaaggagtttgaaactgaactgaagaaagagcctggggaaggcggcgatcagcccccacctgcaactcccacagctgtaagtggcggggaggagaaggggcttgaggcatctagtagcaaggagagcgcgtgaggatcaggatctatctagtgttgtttatgaaaattgtattctgggcttctcgagttagcagttcatatccttttaaccgcatcgcggtttcaggccatgtagcgatattgtttgtagtttgtaccgggaataacatatttggttgagcttctacgtattgaagaaacaacttatctgtgaagctgacgcgaacaaattctatttattatctatttttagtttgttctgagaagcagctgttgtagaagtctattgtttggtacatattctgcttaaatatgtgaacaaaatgtgaaataagctgtacaaattctgcttaaatatgtgaagtctaatgtaaaataagctgcttggtacagatttacagttttttaagcagaaatgtatcgaacaagatgtttatgtaacatcttactagttcaattgtttcttaaaataaactaaaagcagagaataaacataa

SEQ ID NO: 11841 - DNA, 1555 bp, Zea Mays
caagcgagttcataagggtggcaaaagaacctcccaccgcatcggagggctccgcgcctccgccacgccgatggcgtcccagccgccgccagagcccgcaccggccgaggcgggtctggaaagcatggagggcctcgtcctcgacacggtcatctcaagagccggcgcgcgccccgcagcggcgctcgcctgcgccagcacgcgcctccgcaccgccgttgccgacgactccctctggcgcagattctgcggtgaggacctggggctcgacgctcccgtcgatccagagggccggcctcttccctccttccaggttgcatataaagtttggtcggagtcttttggcatgtaccctctacctatggtaaagagagtgagacaattctggacttcaatgaaaacttggttgtctgaaaactttcctgaggcatacaaaacgttatgcgaaggtgtttctgaagctcaattaaagtcagcagaggatgatcttggtttcaagctccctatgcccacaaagctgttgtatcgcttttgcaatgctcaactgccttttagtgaggaccatgacacaaataaaagcatttccacttatggattgattgggggctatgcgttttatgatcattgggtgaatgtgcatttgtcaccgcttgagcaaatagttgaagagacgaaggacttctatcgggagttccctgatgtatttcatgggcgcaaattcattgtagtggcaacttcatggtttcatccgaaaacatttcttctagattgctcaaatggtgaactttatgttggtacatacaacttaccgataggaggaatgcttccctgtgtgcccaaagcattgataaagccagcaggtaatgatctagcacaagatggactactcctgtggttagaagaacaccttaggcgtttacagagtggcatgatcaagacccgtatgctgatggcatcgagatatatcagcttatatccagaagcacctccatcatgcagttcagctgttacaaatggcattaaggtacgctcatctgctgtctttgtgccagaacatcctgggaggcctggggaaaaatttatgttcacttactcaattcgcatgtcagttccagaggcatgcatgctaggtggcgtgtactattcttcctgccagctttgctcccgccactggaccatcagatcgtgtgacagggttgtttctgatgtgagcggaggaggggttattggagagtatcctctactgttacctggtgaggatgagtttgtctacgagagttgcacgccactgccccaagtaccaggatctgtggagggctctttttcgtttgtgccgggcaagttgagccgacctgaagggaagccgttcgaagtcatggtggcgcctttccctcttgatgtgccagaatacatcttctgatgatcacagcagaaataaatgtatgtatggttgttgggaaaaagttcggatgcttgtaataaccttattggagtaatgtaaaataaggaaccgtgcgctcttcgtgtaaccagcgaaatgtgcctcgtacccgta

SEQ ID NO: 11842 - DNA, 2185 bp, Zea Mays
ccacctaatctggtaataaagaagaatcagccccccaccagttggaacctgtctgtatgcggcactgcggcgcccgtggggcccaccacggcgccgccggcagcgtcaccaacccccacctccgccctcccaccggcactcccctcgcctgctccacgacgcttatgcgctcgcgtcccgctctcgccgcccacctccggcgcctgctcctcctctctccctccgcccacctcatcatcatccgccgcgccatggcctccgccgccgccgcgcaggcgcagccaggtggcgccccaccggcgaccgcggagtacgaggaggtgctggggcggctctcctcgctcatcacgcagaaggtgcgcgcgaacagcgccaaccgcggcaaccagtgggacctcatggagcactacgtcaagattctggagctggaggagtcgatcgcgcggatgaaagtgattcacgtcgcggggaccaaggggaagggttccacatgcacattcaccgagtcaatcctgcgatcgtgtggcttccatactgggctgttcacctcaccacatttgatggatgttagagagcgatttcagctagatggggttaatatttctgaagagaaatttttgaagtacttctggtggtgctggaacaagttgaaggagaagactgatgatgatattcccatgccagcctatttcaggttcctcgcgttgctcgcattcaagatattttctgctgagcaggtagatgttgctgttcttgaggttggcctaggagggaagtttgatgcaactaatgtggttaaagcacctgtagtttgtggcatatcttcccttggatatgatcatatggaaatccttgggaatacacttggagaaatcgcaggagagaaggctgggattttcaagaaaggagttccggcctatactgctccacaaccagaagaggcaatgactgctctcaaacaaagagcttcggaattgggtgtctctctccaagtcgttgatcctctggagccccatcacctaaaagatcagcatcttgggctgcatggagaacatcaatatataaatgctggccttgcagttgctttggctagtacgtggcttgagaagcagggacataaagatacgttaccactcaatcgtactgatcccttaccagatcattttattagagggctatcaagtgcttctttgcaaggccgagcacagattgttccagattcacaagtgaattcagaagaggacaaagattgttctcttgttttttatttggatggagcgcacagtcctgaaagcatggaagtatgtggcaagtggttttcccatgtcacaaaggatgatacaaggctaccatcttctttggagcagtctcatacatctaggtctcaaaagatccttctgttcaactgcatgtctgtgagagatccgatgagattgcttccttgtctcctggatgcatcaactcaaaatggagtccactttgacctggccctatttgtgccgaaccaatcacaacacacgaagcttggttctaacacttcagcaccagcggagcctgagcaaatcgatttgtcatggcagctgtcacttcaaacagtgtgggagaagttacttcaggataaaggtataaatactacaaaatccagcgacactagtaaagtttttgattcgcttccggtcgcaatcgagtggctaaggagaaatgcccgagaaaaccaatctacttctttccaggtgctggttactggctccctgcatctcgttggggatgtcttgagaataatcaagaagtgatacgccgctcgaaatccaaactggaactggactatgatctatggtctctcccaaggctaacatgattagcaaggggagacatttgaacggtgcttgcttattggtgccaaccaagctgcgagcttcttgtgtttttttttgtggccacggtcgccttccactcgggaaaccaccgcgcccgttcttgtgaaggcatggaataggatgatcgtgccaccatagaacataactgggaaatgaatttgacatggaactgggacagtctgtatactcacaaaataagatcgcgtggggttttcttgttcaagtgcaaagaaaccagtcaattcttctccagagtagcaagaattcattcatgttgtgactttgatgatgtatccttgttctttctc

SEQ ID NO: 11843 - DNA, 77 bp, Zea Mays
gtaagttacagagtagaaacaaattctactactgtataaaatcatttcacatctcccaccccatgaatttgagatag

SEQ ID NO: 11844 - DNA, 2479 bp, Zea Mays
cctcgctactcaatcttcactgcagctgatattaactgtagtcggtccagacttcatcttgtgggatccacatggtctacatcctgccgcgctttggagctacatctttccttttcactgagtacaagtatgttggattattcatgggcatctttgcaatccttatattcctcttccttgggtctgtcgagggattcagcacgaagagtcaaccttgccactatatcaaggaccagacttgcaagcctgcccttgctaatgccatcttcagtactatagcttttgtgcttggtgcagtcacctcactagtttccggctttcttggaatgaagatcgcaacttatgcgaatgcccggacaactttagaggccagaaagggtgtcggaaaggcatttattactgccttccgagctggtgcagtaatgggcttcctgcttgctgccagcggtcttttggttctttacattgctatcaatttgtttggaatttattacggtgatgactgggaaggtctttttgaagctattactggttatggccttggtggttcttctatggctcttttcggccgcgttggtggtggtatttataccaaggctgctgatgttggtgctgaccttgtggggaaggtagaaagaaacattcctgaggacgatccaagaaacccagctatctctttggctcatatgctgaatcatcatgtgctgctcttgttgtggcctctatctcgtcttttggaatcaaccatgaatttactccgatggtgtaccctcttctcgtcagttctgttggtattatagcatgtctcataacaacgctgtttgcaactgatttcttcgagataaaggctgtggatgaaatagagcctgctctcaagaaacagctcataatttccacaattgtgatgaccattggcattgcactaatcagttggcttggtcttccatacactttcactattttcaactttggagtccagaagacagtgcaaagctggcaattgttcttgtgtgtggcggttggtctctgggctggcctagtcattggttttgttactgagtactacacaagcaatgcctacagccctgtacaagatgttgctgattcctgcagaactggagcagctactaatgtcatttttgggcttgctttgggttacaaatcagtcattatcccaatttttgctattgcgtttagtatcttcctcagcttcagccttgctgccatgtatggtgttgctgtggctgctcttggaatgctgagcaccattgccacaggtcttgctattgatgcatatggccctatcagtgataatgctggaggaatagctgaaatggctgggatgagccataggattcgtgagagaactgatgctctagatgctgcaggaaataccacggctgcaattgggaagggttttgccattggctctgcagccttggtttcccttgcactatttggtgcgtttgtaagccgggctgctatctccactgttgatgttctgactcctaaagtattcatcgggcttattgtcggtgctatgctcccgtactggttctcggcaatgaccatgaagagtgtgggcagtgctgcgctcaagatggtggaggaagttcgtcggcagttcaacaacatccctgggctcatggaaggcaccacaaagcctgactacgcaacttgtgtcaagatctcaacggatgcatccatcaaggagatgatccccccaggtgctcttgttatgctcacaccactgatcgttgggattctatttggggttgagaccctctctggagtccttgctggtgcccttgtctctggtgttcagattgccatttctgcatccaacactggtggtgcctgggacaacgccaagaagtacattgaggttctgaccctcacaaggcggctgtcattggtgacaccattggagatcctctcaaggacacgtctggcccttccctcaacatcctcatcaagcttatggcggttgaatcccttgtcttcgcccccttcttcgccgcccatggtggcattctcttcaaatggctctaagccagcgagagacgcaggataaaggccgtagttttgcaaggcgagtagagcagtatgtcagtaatacagcatctatggcatgtgcttttgctcgtccagttcatgagccccgttgtgtatttggtttccgttttcttggttggagtttttagttccaaggtccgatcatgttttgatcccataaattctcttccagccttcgagcaactgagtccatcttcctaagtcatcagccccagcgagacattgaagcatggggaaacttaaacagtatggtgatgattaatctcagcattttttttcttgcagcaatcaatatggactttgcttaaaatttcgttgtcttttcaaaacgatatgcaagcaaaatggaagtgatgttctttgaaactttgtttcaatgctatagcaaaggtttgcattttac

SEQ ID NO: 11845 - DNA, 928 bp, Zea Mays
gtcctggacgagaacaagcagctgatcctggccatcctcgacaaccagaacaatggcaaggcggaggagtgcgaacggcaccaagctaagctccagcacaacctcatgtacctggccgccatcgctgacagccagccgccacagaccgcgccactatcacagtacccgtccaacctgatgatgcagccgggccctcggtacatgccaccgcagtccgggcagatgatgaacccgcagtcgctgatggcggcgcggtcctccatgatgtacgcgcacccgtccctgtcgccactccagcagcagcaggcggcgcacggacagctgggtatggctccagggggcggcggtggcggcacgaccagcgggttcagcatcctccacggcgaggccagcatgggcggtggtggtgctggcgcaggcgccggcaacaacatgatgaacgccggcatgttctcgggctttggccgcagcggcagtggcgccaaggaagggtcgacctctctgtcggttgacgtccggggtggaaccagctccggcgcgcagagcggggacggcgagtacctcaaagtcggcaccgaggaagaaggcagttagttaagacgctgtaagactggcatcggctcgggcacaccggcatgtcatagcagcaggattagcaggtagctttgaggaacgaggagggtagtagtgtagtgtaatggtagcactagctagctagtatgtggccggtaaggaggtaggtttgttccatggaacctggaggtggtagtgaccagcatgcatgcatgcgtgcatggtcacttgttttggatgtatttgcaggttctctcccaaatgtagtatgaaacgttgctggtgacctgtttgcgcgaacactctatgcagtgttgatgatctttaacaaaaaaaaacgctttactgttccatt

SEQ ID NO: 11846 - DNA, 2141 bp, Zea Mays
aacgctagctgattcaatgaatgatgacaacacattattttcagatccttaaaaagcataaagatccacttttggtgaaggtgaataagctgacatccacgaagacgcaacttccctactcatattactctcttcctttctgtaaaccaaacacgatagttgacagtgcagagaatcttggagaagttctgcgtggtgatcgcattgagaactctccttatgtgtttgagatgggggaacccaagatgtgccagattatctgcaaagcaaaaattgatgataaacaggcaaaggagcttaaggaaaaaatagaggatgagtatcgggtgaacatgattcttgacaatctcccactagttgttcctattgcaaggcaggataggggtgctactgtttaccaggctggatatcatgttggtgtcaagggccaatacactggtaacaatgatgagaagtcctttatccacaaccacttggcatttttagtaaaataccataaggatgaaactacagatctctctagaattgttggatttgaggtcaaaccattcagtatcaatcaccagtttgaagggccgtggaatgataaaaacactcgtttaatcacatgtgatcctcatgccagcaagcttgtggtaaactcagatactcctcaggaggttgaagccgggaaggaaatcatatttacctatgatgtaggcttcgaggagagtgatatcaagtgggcttctcgctgggacacctacttgttaatgatagatgatcaaattcactggttttctattgtgaactctctcatgatcgtactcttcttatctgggatggtggcaatgattatgctccgcaccctttatagagatatctctaggtacaatcagcttgaaactgaagaagaagcccaagaggagacaggatggaagcttgttcatggagacgtattccgccctcctgcaaactccgacttactctgtgtctgtgttgggactggtgttcagttcttcggtatgctactagtaaccatgatctttgctgttctgggtttcctttcgccatcaaaccggggaggactgatgactgccatgctgctcacttgggtcttgatggggttgttcgccggatatgcttcttcacgcctgtataagatgttgaaaggatcggaatggcggagcatcaccctgaggaccgccttcctgtttcctgggattgctttcggtattttcttcatccttaatgctctaatatggggggagaagtcgtctggcgctgttcctttcaccacaatgtttgctttggtcctcctctggtttggtatctcggttcctcttgtatttgtcgggagctatctgggcttcaagcaacctgccattgaggctccggtgaagacgaacaagatcccaagacaggtccctgagcaggcttggtacatgaaccctgccttcaccattctgattggtggcatacttccgttcggagcagtcttcatcgagctcttcttcatcctgacgtcgatctggcttcaccagttctactacatctttggcttcctgttcctggtgttcattatcctcatcatcacctgtgcggagatcacgatcgtgctgtgctatttccaactgtgcagtgaggactacctgtggtggtggaggtcctttctgacctcaggatcatcagcaatctacctcttcctgtacgccgggttctacttcttcactaagctacagatcactaaggttgtgtcaggcatgctgtactttggctacatgcttcttgcctcgtttgctttctgtgtgctcaccggtacgatcggcttctacgcctgcttctgcttcacaagattgatttattcatctgtgaagatcgactaggcatgttccatgggcctgcagcgagtatgcccattgtgtgttttttttcatgaattttcagtgcagctgtacttttggtgttagcttataaacaatttatgctcactgtggttcagagttgtacaaggataggacactactgctagctttatatggggtaattttaacttgtgctgttgagaactgctgcatacgttcaatccatagtctcgttatcgtctgccacccctttcctgcttcagctgcatgatgatgtccatacgtgcttggcttcat

SEQ ID NO: 11847 - DNA, 1519 bp, Zea Mays
aacgaccacttcctcccaccgcttcttcccacgcctcccaacctcctctgcttccgagatctctccccacctcccggtccgctagcagatagcgggggccagagagatcgagatccggaggcgctagcgccacccatcagcgtctgcggcaatggcgggcacggtgacggtcccggggtcgtcgaaaccctccacgccgctgctcaaggacgagctcgacatcgtgatcccgacgatccgcaacctcgacttcctcgagatgtggaggcccttcttccagccctaccacctcatcatcgtgcaggacggcgacccgaccaagaccatcaaggtccccgagggcttcgactacgagctctacaaccgcaacgacatcaaccgcatcctcgggcccaaggcctcctgcatatccttcaaggactccgcctgccgctgcttcggctacatggtctccaagaagaagttgccaaggacccatcaggcaaggatatcaatgctcttgagcagcacatcaagaacctcctcagcccgtccacaccgttcttcttcaacaccctgtacgacccctaccgtgagggtgctgactttgtgcgtggataccccttcagcctcagggagggtgcccacactgctgtctcccacggcctgtggctgaacatccctgactatgatgcacccacccagctggtcaagcctaaggagaggaacgaaaggtacgttgatgctgtcatgacaatccccaagggaaccttgttccccatgtgcggcatgaaccttgccttcgacagggatctcattggccctgccatgtacttcggtctcatgggtgatggccagcccattggtcgctacgacgacatgtgggccggatggtgtgtgaaggtcatctgcgaccacttgagcctgggagtcaagactggcttgccatacatctggcacagcaaggctagcaaccccttcgttaacttgaagaaggaatacaagggcatcttctggcaggaggacatcatccccttcttccagaacgtgaccattcccaaggattgcgacaccgtccagaagtgctacatctacctctctggacaggtgaaggagaagcttggcaagatcgacccctactttgccaagctcggtgacgccatggtcacctggatcgaggcctgggatgagctgaacccggctggccccgcggctgggaaagacaaggccaagtagatgggagtccctgggggtgcattcacttccctgctgaagtgaaaagaaagtatgattgggtccagcctaggctcccccatagatatagctctttttgagagggaagagggattaattcagcagcaggttctttttataaattctttgttgttatgaagcaggcggtacttttgtagttgatgaaggggatttgtcgccactgtcatttacataattcggataataatttatattgtgtaatcttgagaatcaaagcactgtttgtgttatagcatgtctatgaatgcgcactgttgctttttcc

SEQ ID NO: 11848 - DNA, 685 bp, Zea Mays
tcaaaaaaaaaaaagagccttgggatattggcactagtcgtaatcggcacagctaggtctgaaaggcaaccaccaattctctctctttaaaagcctgagcttggctcatagctctatcttgtccagggactcaataggccagtaggcgattacaagggtggaagaaacatctagccttaacattccaggctacagcctaacccctctaatggatagcagcagtggtagccaggacaagaaattcagagacaatgatcgccctgaagcaaaagaagctaatagcaccgcacagcatcttgttgacttcacggaagcagaggaagatcttgtttccagaatgcacaggcttgtggggaacaggtgggagattatagcaggaagaatcccaggaaggacagcagaagaggtagagatgttctggtccaaaaaataccaggaaagatgaaaccgaggccttagatttatatagatgatatatgcaagcatgtgctgataaataatgttaaactgggcctacgatgttaccggtttttcagcctgtgcacatcttgttatgacatgatgctaattttgcaaaagcacagtaagaaaatttacagaacgtcagaaaatatcaatcatgttttagaagatgtgtaacagtatagtatgccttaagaaaagatgaattttgcctcttgcaaaa

SEQ ID NO: 11849 - DNA, 692 bp, Zea Mays
tagtcagagtatcttcaaagcaaaggttttgccagacaactgcccagggcatgttgtggggcgccatcgactcctgagagagcagcttacaacttcaatgtcacggccaaatgcggtgagcctggtgcaactgcctgtgctgatccgacaacccattggagctgggacggcattcacctgacggaggctgcctaccgccatatcgccaaaggctggctatacgggcctttcgcggaccaaccgatcatccaatcctcatgatcatgccgttcctgcggtagagtttatcaaagtagcattgagagtgagagaaaaaaaatggagcggggaaagtaggtcttccatacagttccaatgcttgcatacttgtacatctccatttgattgtattcatttgccatgggggtacaaaggtgggatagtaggtcgcacaaaggcctgatttcttgatttgtcaggttggggggtataaatatgaaagttgttacgcacagataatcatgtatattgtgtcccggaaatgtgttacagattctgctcgagcagcttctgattctctgattaaaggtgtgccttttttcgcgattcttatgctgcggcttctgtctgaacatggtgtgcgtccgtgcttcagggatggatgagctgtctgtgacacacacatgcaagttcggtttgtagctgtaaacaac

SEQ ID NO: 11850 - DNA, 3881 bp, Zea Mays
gtttttatttgtttttctttttctttccttctttggctattttttgtgttatttttctgctatattaataaatgtgtactcgcttgtgccatttgtttgagaaattacaatggaactacaagtatatatctctgccaattttgtctcctttgcttttcatctatgcatacaaggttcgctagatgtatgggagaagattaaatcacaaggaatactaaaatagtgacaattgatggttttcattacataggacatgtgaaatactattataagaacatctgcgtataaataattatcttttagattttttgtcttgttagcatgacctctctcaaacattgtctctgcagaggactacaatgttgattataaattatgtgttgtttttcttactgtaatcattgtaggctaacattttaacgaataatttatattccgttgcaacgcacgggcactcacctagtgaattttaaatgcttcaacatcaaatcacacgctcgtgtcgggccacgaccgaccggcccgtttggacattggacatgtgaagttctgggcgttgcctgaaaggggctgaagtttgtaattgaaaagatttctcgtcgttgtcagacgaagcctagatgggtggatgctgaccgtgccgaccctcccacgcgcgtgccgcctgcttcgtctcttcactcgtctcgaagctagggttttgcccgccgccaccatcctagtttccttctcgtcatcgttctcatcttccccagccgccgccccgcctcagatggatccgtcgccggcgtggccgtcccggcggatccgccaggagttcttaaccttcttcgagtccaaggcacatacgaggtggccgtcgagtcccgtggtccccgtcgacgaccccacgctgctgttcgccaacgctggaatgaaccagttcaagccggtcttcctcggcacagcggcgccggactcgccgctcggccgcctgcaccgtgcctgtaacacccaaaagtgcatccgcgccggcgggaagcacaacgacctcgacgacgtggggaatgacacctaccaccataccttcttcgagatgcttgggaactggtctttcggggactatttcaaggaggaggccatcagatgggcctgggagcttctcacccaggtatataaattgcccaccgatagaatttatgccacatactttggtggtgatgtgaaatctggtcttggtgctgatgatgaatcgaaggacatttggttgaaatatctaccgaaagaaaaggttctgccttttggctgcaaggacaacttttgggagatgggtgacactggtccttgtggaccatgtactgaaattcattttgaccgtattggcaaccgtgatgctgcgtccttggttaacaatgatgatccaacttgtattgagatatggaaccttgtattcattcagttcaatagggaggcagatggcacattgagacctttgccagcaaaacatgtggacactgggctgggctttgagcgtttaacttctattcttcagaataaaatgagcaattatgatacagatatattcatgccaatatttgatgccatccaccaattggctggcgatggaattcagccatactctggtaaattaggttctgatgatattggcaaagttgatatggcttacagagtagtagctgaccacataagaaccctttctttcgctattgctgatggttctcaacctggtaatgagggaagagagtatgttctgaggcgcatacttaggcgagctgttcactttggtcatcagaaattgaaggcaaagcaaagtttttttagctcgcttgtaaatgtttttgtccaactgatgggtgatgtatttcccgagttaaaagacaacgaaaagaagatcaaatgtattattagagatgaagaagaaagctttgagaacactctagcaaagggttatgaaaaatttaagaaagctgcagacgctgttaaggataatggtggaactatacttagtggacaggatgcatttattctttgggacacttatggttatccaattgatttgactgaggtcatggcaatcgactatgggctaactgttgataagaaggggtttaatgcttctatggaagaagcgaggcaaaaagctagaaatgctcgtaacaagtctggagggaactctattgctatggatgcgaatgctacagcgcagttgcgcaaactggggcttgccagcacggacgatagcccaaagtttctgtggcccaaggaacatgaaagcgtggtgaaggctatctatactggctcagaatacattactacagctactggtgatggggactttggtcttgtgctggaaagtacaagtttctatgctgaacaaggaggccagatatttgacactgggagcattgaggggtcatttggaactttcaatgtgaacaacgtccaagtgtttgctggctatgttctacatattggctcatttacaaaaggttcgaaggttttgtctcttggagatagtgtgatatgcaaggttgattacaaccggcgcacactgattgctccaaatcatacgtgtacccacatgttgaactttgctctaagggaagtacttggtgatcatgttgaccagaagggttcaattgttctaccagagaagctaagatttgatttctctcatggaaaacctgtccagcctgaagatctgaggaaaatcgagttcatagtgaaccagcaaataaaggacgagctgggtgtgtatgcacttgaaataaaactagaggatgcgaagcgcataaatggtcttcgtgctgtgtttggtgaaatctaccctgatccagtaagagttgtatcagttggtcgcaaagttgaagatctgcttgcagatcctgatagcaaagagtggctatccatatcgactgaactatgtggaggtacacatatcacaaacacaagagatgctaaagcatttgcactcttatctgaggagggtattgcaaaaggagttaggaggataacagccgtgactgctggatgtgccacccaggctatggagttggcgtcatctatcgattctgatatcaataaagcatctcagttggagggagctttgttggaaaagaaaattgcttccatcaagagtgggctggatgcagctgctatccctgctgcgagaaaagctgatttgagaggcaaggtttcaaagttagaggacgaacttaggaaggcaaagaagaaaatgggggagcaaaatatacaaaaggctgtgaagtccgcaatggatgctgcagaagctgctctttcaggaaataaaccgttttgtgttactcatgtggatgtgggtcttgataccacggctgtccgtgaggcggttatcaaagtcatggaccagaagggtttgcctataatgttattcagcaccgatgaggcatcaaacaaagccgttatctatgctggtgtgcctcccaatgctcctagcggcttcaaggtgttggactggctaacaccttcaattgcgccactcaagggaagaggcggtggcggcaagaacggcgtcgcccagggccaggggagtgacgcttctcagctcaaggaagcaatggcacttgcgaacagcattgcttcaatgaagctctgctgattggtggtagtaactggtgcactgcccatggaactcatgcgtggctgctgctggattactctttgattttagctttctatttacccattatacttaaacagaagttcaatggtgcttgcagtttcatttatacttaccatacaattggaagcacaggacatgtaacagtataaagcttgttgtgtgcccgattgaacgaaaggttctatgcatatacgattgggagtcactttggaaaaaaaaa

SEQ ID NO: 11851 - DNA, 98 bp, Zea Mays
ctcctgtagaggtagcatccttccactcaaccgtccaacctgatggcagggtggagggctaagttaaaccatcaaccatcccttgcagaaaacctgaa

SEQ ID NO: 11852 - DNA, 601 bp, Zea Mays
tttgagttccgatctgaaccaatctacatgtacataatatgggtcgactgaactgagcaggcagtaggaagagacactatgttgttcttctcctacttcaaggagctggtggggaaggaggtgacagtggagctcaagaatgacttggcgatccgcgggacgctccactcggttgaccagtacctcaacatcaagctcgagaacacccgcgtagtcgaccaggacaagtatccccacatgtgcggaactgcttcatcaggggctcggtggtgcggtacgtgctgctcccgcaggacggcgtggacatcgacatcctccacgacgccaccaggagggaggcgcgcggaggctgatcctgatgcgcacccgctccctcacctgctggctgctgcttcatccccgattgtacgaagcatgcatgtacggtgtgtggtagacagatgccccagtttagttctttggtgcttgccttgacatagatattccaggttggatgatgacctgaatcacctgatatattattgtcatatcatatgcaatgttcttgcatggggttgctatattattaccatatcgtattatcacatcatagacacttaaa

SEQ ID NO: 11853 - DNA, 509 bp, Zea Mays
aaaaaaactataatttcgcacacacaaagttatctacaggagatatgctggactgtttttttcaatatgtgtggacataactgataatgaattggcatacttggaatgcattcacttgtttgtcgagatattggaccatttctttagcaatgtttgtgagctcgatttagtgtttaattttcacaaggtttacctgatactagatgaatttattcttgctggggagctgcaagaaacaagcaaaaaggcaataattgagcgaatgggtgaactggagaagctggaatgacgaagaccaggaagatgctgccgcgtgtgttgtattccaatttgtattattcgtttcaggtgttttacatttgctctcctggttcgttccggctgacagcgtgatgcccatgctgtcactcgaaagaatggtagtagtagctagcatgagtacattataaacgtaccttcgaaaacataataatttcccagcaattatttcgttcccctctgcagtgaaa

SEQ ID NO: 11854 - DNA, 81 bp, Zea Mays
cgtgatgcgaaggaccaaagctgagtcgaccccaagatgctgttaagcgtgggcttcttcgcaaggcgatgctgatgaaga

SEQ ID NO: 11855 - DNA, 1612 bp, Zea Mays
ctcgatccaaagttttgcgggtgtgggtgtgggtgtgggtgtgggtttctattttaacccgagctgatgcctggaggtgttaattcgccggtccgtgccttcaaatctgttggtgggcagccagtagtgttcgactctgtaaagggttctcgtatgtgggatgttgatgggaatgagtacattgattacgttggttcctggggtcctgcaatcatcggccatgcagatgataaggttaatgctgcattgattgaaactctgaagaaaggaactagctttggtgctccatgtttgctggagaacgtattggctgagatggtcatctctgccgtgccaagtatcgaaatggtccgctttgtcaactcagggacagaagcctgcatgggagcgctccgcctcgtgcgcgcattcaccgggcgggagaagatcatcaagttcgaaggctgctaccatggccatgccgattccttccttgtcaaagctggcagtggtgtcgccacccttggcctcccagactcccctggcgtccccaagggggccacctacgagactctaacggcaccctacaatgatgtcgaggcagtgaagaaactgttcgaggacaacgcgggggagattgctgccgtcttcctcgagccagttgttggcaacgctggtttcatccccccacagcctggtttccttaacgctctccgcgacttgaccagacaggatggtgcgctcctggtcttcgatgaagtgatgaccggcttccgtctgtcttacggtggagctcaggagtacttcgggatcacccctgacgtgacgaccttgggcaagatcatcgggggtggcctccccgttggtgcctacggtgggagaagggacatcatggagatggttgcccccgcagggccgatgtaccaggcaggaactctcagcgggaaccctctagccatgaccgctgggatccacacgctcaagcggctgacagagcccggcacctacgagtacttggacaagatcaccggcgaactcgtccgtgggatactggacgtcggtgcgaaagcagggcatgagatgtgcggaggacatatcagaggaatgtttggcttcttcttcaccggcgggcccgtccacaatttcggggacgccaagaagagcgacaccgagaagttcgggaggttctaccgtggcatgctggaggagggcgtgtacttcgctccatcgcagttcgaggcggggttcaccagcttggcgcacacctcccaggacatcgagaagaccgtcgaggccgctgagaaggttctgaagcggatatagggggtccgcttcaagcaagcatgcagagagcatttcctcgtatttacgttcttgtactcttagttctatatgccaccgaggttttgtattgtgcagcagcaggacagcttctgtaagttcctctttctgaattagtgggtcttgtttttgtcagtgccaataaatctatggtccacgattacggtttcgttgttgtactgatgttcagatacaggattgtctagaacctttttttttagaaaaaaaaaacaatatccacattagtaatgcactgacccgggacttgcataagccatctcggactcttccc

SEQ ID NO: 11856 - DNA, 1653 bp, Zea Mays
cttgctatttctgcaagccatgaattactaaattaatggttgggagactcggtgggtggaatccgactggaaaaggagtgaagggaaagcaggaaggttcaagcacacagcggggagatactctgcagatcctgatgacaaaggaatacaaacaacaatagatgccagacattttgctatctcagccaagttcccggaattcagtaacaagaaccggacgcttgtggtccagtactccattaagtttgagcaggatattgaatgtggcggtggctatattaagcttatgtccggttatgtcaaccagaaaaaatttagtggggacactccgtacagcttgatgtttggaccagatatatgtggtactcaaacaaagaagctccatcttatactctcttaccaggggcagaactatcccatcaaaaaagatctagaatgtgagacggacaagttaacacacgtgtatactttcattcttaggcctgatgcatcttatagcctgcttgttgataaccgtgaaagagaatctgggagcatgtacactgattgggatattctccctcctcgtaaaattaaggatgttcacgccaaaaggcctaaggattgggatgacagagaatatattgaagatcctgatgaagttaagccagagggctatgattctatcccaaaacagattcctgatccgaaggacaaaaagcctgacacatgggatgaagatgaggatggaatatggaagcccagaatggtatcaaatccagcatacaagggaccttggaaacgcaagagaattaaaaatcctaactacaagggtaaatggaagaccccatggatcgataatccagagtttgaggatgatccagatctttatgtgctgaagcctttgaagtatattggaattgaagtttggcaggtaaaagctggttcagttttcgacaacattctgatttgtgatgaccctgagtatgcaagaaaggttgttgaggaaacttggggtgcaaatagggaggctgaaaaggaagcttttgaagaagctgaaaaggagaggaaagctagggaggatagggaaggtcaaaaggcaaaggacgatggtggccggcatcgaatacacaggcgtcataaaaaacactacagagatcactgggacgactaccatgatgagctataaaagtccccaaatattgcattcctcaaaagcataagctggaagttgcttcggacattgtgggtgcttttcaataataataattgattcgcctggtcagaacaacctgaagtgtttcttgctatgcgccaacaaattattgaactacaggatttgatatgtaatggacaaccgaagatctgcagggcattccagcgaaaacttggctctggtactgaaatagaggggacgagagactgtagtttgtgtctgtacaacggtgccggccatgtgctagctttgtaatctcaaaacattgtctttgcatgaataatgtaagttacccaaaaattactgcataccaagttacaaagtgttgtagctgacatatgaggaacactttaattttaatcttcatatatatacttctgtaatcttcaaaaaggatacgatgcaattggtctatctctgtcatcaccttgcataaatgaacacacaggtttcagcaa

SEQ ID NO: 11857 - DNA, 69 bp, Zea Mays
acgaatccgtgcgacgcggggctggatctcagtggatcgtggcagcaaggccactctgccccttacaaa

SEQ ID NO: 11858 - DNA, 617 bp, Zea Mays
agaagtaaaacgtataatctatgaatagctactgaatgggtgaagggaaaaccaatggatgaagtcttgacaatcaagaatactgagattgcaaagcacttgtcccttccaccagtaaagctccattgcagcatgcttgcggaggatgccattaaagctgctgtgaaagactacgaagccaagaaggcgaagatggggcaaaagagtgaagacagtccatcagagaaagctgctgaagcatgaaagtttctgccttttttaagtgtaattgagctgatatgtttctcagtccatgactccccgctgcttcagataaatgcttctgattgcgaggcgaggcgagggaccgcgtgtaatgttcacaaattctggtagtgcggcatgtgccttaactcttttgaggatggtgacaaccaatttcaaataaatttggtgccatcttagaattagaagtactatgtggatatcacatagtggaagtgttttctgtcaactacataattgaattacggccgtcgttgcacggaggctattttaaaatgttgtattgtatgtggtatggattcgcttacgggcctgaaactgttctattggaatcgataattttatttataggc

SEQ ID NO: 11859 - DNA, 2846 bp, Zea Mays
cagccagcctacccagacaaccaaacgaacccgcccggagcagcaaagcataggcgctcgagcgctccctcctgagctcctccgcctcacggtcacgcctcgtgtccccccaccccctcctcgtcctccaccggccgcctcacgccgtcacctccgctcggcgagtctcggctccgaccccagccgccacgtgcgacctcccctactcctgactcctgagagatctgcggggctcggcatggggtgaccagatcgggccgctgctcggtgctttccagctgaattctgcccgcagctcgtgtcggaggcagcggagatggcggaggccggcgtggcacgcggctcagggagtgctggcgatgctttgttcagggaactctggcatgcttgtgctgggccgttggtcacagtgcctcgccaaggcgagctggtttattacttcccgcagggtcatatggaacagcttgaagcgtctacagatcaacaacttgatcagcacttgcctttgtttaatctaccgcacaagatcctctgcaaggtggtcaatgtagaacttagagctgaaactgattctgatgaagtttatgctcaaattatgctgcaaccacaaacagagcaaagtgagcccaccagcccagatcctgaaccacctgagcctgaaagatgcaacattcattccttctgcaagaccttgactgcttcagatacaagtacccatggtggattctctgtcctcaggaggcatgctgaagaatgtttgccccaactggacatgactcagaatccaccgtggcaagaactagtggctaaagatctccatggaaatgaatggcatttccgtcacatctttcgagggcaaccaaggaggcatctacttacaacaggctggagtgtttttgttagctcaaaaagattggttgcgggtgacgcgtttatcttcttgagaggtgagaacggagagctgcgagtcggggtaaggaggctcatgagacaactaaataacatgccgtcttcggttatctcaagccacagcatgcatcttggagtcctagcaactgcatctcatgccatctccactggaactctcttttctgttttctacaaacccagaacaagtagatctgaatttgtcgttagtgtaaacaagtacctcgaagctaagaatcacaagatgtctgttggtatgaggtttaaaatgagatttgagggtgatgaatcccctgaaagaagattcagtgggacaattattggtatgggatgcatgccagctaactcaacatctccatgggctaactctgaatggagatcattgaaggtccaatgggacgagccttccgctattctgcgtccagatagagtttcaccatgggaagtagaaccccttgatcgaacaaatccacagccacctcaacctcctttacggaataagcgagcacggcctcctgcttcaccttcgattgctccagaacttgctccagtttttggtttttggaagtccccagctgagcctgcccaagctttctcattctcaggactgcagcgaactcaggagctataccattcaagccccagttcaatgttctcatcgtcgttgaatgtgggattcaatccaaagtacgagggtcccactccaaacaccaaccatttgtactggacaatgagagagacaagaactgaatcctactccgctagtatcaacaaagctccaactgaaaagaagcaagaatccactacttctggctgcagattgttcggtatcgagataggttcttctgcagtgtcacccgtggttactgttgctagcgtcgggcatgatcctccgccacctgctctctcagtagacgctgaatctgaccagctgtcacagccgtcccatgccaacaaagcaacggatgccccagcggcaagcagcgatcgctctcctaacgagacagagagccggcaagccaggagctgcaccaaggtaatcatgcaaggggtggcggttggccgggcggtggacttgacgaggctagatgggtacgatgacctccgccgcaagttggaggagatgttcgatatcccgggagagctttccgccagcctcaagaaatggaaggtgatctacacagatgacgaggacgatatgatgctggtcggggacgatccatggagtgaattttgcaggatggtaaaaaggatatacatttattcctacgaggaggccaagtctttgactcccaaggcgaagctgccggccatcggtggtgacaccggcgtcaagccggacccaagcaaactgccaccagaatccgacgtgccacagagcgactccgacaacagtgctcccgttgctgctgataaggactgatggacgctagctcggccgtaccttccctttggatgttggccatgggaggcaagtgcagtgcccatgctccttgagactgctaagagttgatcatctgttccatctgcctcggcttggaccagcgaggatggccgggagggagtgcatgacgttctgtgcgtgtttcgtttgccgtgtttggtaggagccatggcttgttgccggctacttcggttctgtagactgttacactgactgctgccgtctcacctggccgtcggcgcgggccgccccctctcacctctctagtaatatatactagggcttatgtacacagctgttttggtagtggcatatgtatatcgtcggtcatgttgcttgcgacatttagcatcctccgtagctgctatttcctctcctgcattttaatcctgtcttggtatcagatgctctggcgcaatatgtgttccagcgacatgcccttttcggcgcgtgcttcccttttcggttgtggaac

SEQ ID NO: 11860 - DNA, 836 bp, Zea Mays
cagaaggagcttgaccaaatagctgagaaagcagatacatctactccggctggcttgagctatgtgttgacagagacaacattagcattacttcggcatccggattgttgtatctcagcttactcttcggtggatgtgaaacgtagcgtggatgatggtgagaaacgtttcaatcagctttcaattgaggagaggggcaagtttgatgaagagacacttgtcaacgtgaacagcatcaagaggaataaaggaggcagccaaagatcaagtggttttagcaacgagtacattgtgataaccatattggttgctgctgagggagtacataagctgccggttataaatagcagcaatgacttaaagacagctctacaaaagatgggtgccataccatcaagcaaaatactggcagtcgaggtcctgtggactccgcaaaatgagaatgacacattgtccgagcgagagctccttgaagattacccgctcttaaggcctctgtagaaagataaaagttacagattgcccgtgcaaaggaagaacacgccgtagattcagttttggcggttttcttattagttatagcacagatcctgcgtttgtataataagtgtataataatttgtaattggcgtctctgatagccttcatttcagaacatggaacgtgcaaatctgcaattgtctgtcagtagtcttgttcaatcttcctgacacaataacacaaaattgtaaatagattgttcagagaaaaaataaaacaggacatgctgcatttgtgcgtgtacgcgttccaccaaggatatttcaaataaaaatatttgatgaatattgcatgct

SEQ ID NO: 11861 - DNA, 650 bp, Zea Mays
gaaagatttgcgcgacaattaagaaatgatgttctatggacctggcgcagcttatgctctgtttgctggtaaagatgccagtagggcattggctaagatgtcctttgaatcacaggatctgaatggtgatatatctggtctaacgccaatggagctcggcgccttgaatgactgggagtacaagttcgccaccaagtatgcgaaggtaggaaccataagaagagcagcgcccgtcgaagtggtttatggcaacatttcgcctgaaatgagggaagaagttagtgaacctgtggttgaacctgagcttgagcctgagcccgagcctgagccgcatgacgacgatgcaccatgaataggaaaaacacaaagacatcagttcgggtaggaagatgaaatggagggcggcacactgcttataatgttccagaggtagtcagaatttcgaaataatgaaaagcctcataggctcgtacttgttgcgtggatattcagaaagaatagtgtctaaatttaaaccaatagtagatgtgtactctgtagtaggattgaattgttggatatgtacatgtcattcttctattttcgtgaaacgtgtcacttcctgatctctttactatgcaaatgcgcaagaacactctgcatactaaata

SEQ ID NO: 11862 - DNA, 794 bp, Zea Mays
ctttgtttgagtcagcaggaaaaacaacagagaaagctccagagaaaattgcagacaaggaatcagagtgcgatatcagtatcctgaatatacaggttggccttatccgtaaagcatggaagcatccatctgctgacagccttttagttgaggagatagatttgggagatggtaatgtgcgtcaagttgttagtggtcttgcaaagtattgcagcccagatgatcttactaatcggcatgttgtcttgatcacgaatgtgaagcctggaaagctgcgagatgtaatgtctgctggattggtcctttgtgcttcaactgaagatcatgctgctgtggagcctttgattcctccagaaggagccaagattggagaacgcatttcatttgctgggtttgatgggaagcctgaagatgttctaaatccaaagaaaaagcagctggacaagattaccccgcatcttcgtaccgacgagaatggaattgcaatgttcaaaggtgttccctttactacatcagctggcccatgtagatcttcgattcacaacggaaatgttaagtgagcagctcattagacatggttgcatagattgacatcaaacttatgcaggctgtctgtgtaccattttgtcatacatcatgttttgcccatatttagcgttgcaaaatttgaacagagttacactatctgtaagcaattttctactaatggttggcccagagtttgcttttgagaaaaaaaaataaaatagaaccaataccttgcttggttggagaattttgcatggggcagcatc

SEQ ID NO: 11863 - DNA, 323 bp, Zea Mays
caggtttcaattttggcaggaacacttgctcgacttgatagagaagcaccatactacaagaaggatggatataatgatttcaatacgttctatatgcaggctgcatctggtactaaaggtggctcaagtggttctcctgttgttgattgtcaaggaagggctgttgccctgaatgctggaagcaaatcttccagtgcctctgccttcttccttccattagaacgtgttgtcagagcattggatttgatacgtgacagttgggatgcatttggtaccaagacagaatctgtttatattccacgtggtacacttcaggacaaaca

SEQ ID NO: 11864 - DNA, 80 bp, Zea Mays
gtccttcagccacagcttcggcgctcgttcacccttccttcagaccgcaccttcatatcacgcacaccttcgtctcaaag

SEQ ID NO: 11865 - DNA, 50 bp, Zea Mays
acttcgacatctgcgagtccgagcctgactcacctactaacaaagacaag

SEQ ID NO: 11866 - DNA, 104 bp, Zea Mays
taagaacattattgggtaaatagaagtgatcaagggcacaacttgcctgggacttgagatttccaggtaccaggatgctcttcagatgactcgtaacctcgctc

SEQ ID NO: 11867 - DNA, 78 bp, Zea Mays
ccacgaggcgctgtcaacgagtcgggttgtttgggaatgcagcccaaatcgggcggtaaactccgtccaaggctaaat

SEQ ID NO: 11868 - DNA, 456 bp, Zea Mays
tccagataagacgcgcgccacggctgccgtggagtaaaccacaacgcaggacaagccatcgccccgatggacaccgccgcctcatgccgcctcctctcgccggcctcctcctctccgcccccctgtccgaagcagctacccaagcggcgaccgaccttcgcggcctcgcagcagcagtcgcccagctccagcgccaagttcaggctcctctgcctcctccatgacaagtccgcgtcgccaacgacgtcggtgcagatgcagagctcacagtcacagttgcagaggctggcgacggtgttgcagtgcggagccgtctgggcagctgttgaggcgccggcggcgctggcggtgaccggcgaggaggacatcgacctgctagggatcctgccgccgctcgcggtgttcgccttcttctacttcctcgtcgctccttgtgcatgtgtgtgtgtgtgcgcg

SEQ ID NO: 11869 - DNA, 2912 bp, Zea Mays
aagaacagctagacgagggatgacactgacggcagccttcagaagcacacgttggttgtgtggctcactggcaccgcgccactcagctcagcaacgatgcaaccacctgacaatggcatctctttgcgcgccctcggcgctcctcgaccacccccatcgccgtcggagacgagacgagcacctatacctagccgtataaaggcggcagggcttagacaagctagtgcaggcttcccgggcccctagattctctctcgcgcttccgctttccttctcctggtcctggccatggcccacgaacgggagccgctcctgcagcaacgacagaccggcgtcggcaatgcctgcggtgccaaggactcgtcctcggcgccggcgccgtcggctgccgcgctgccgtcgctggctaggaccgtgctcaagttcctgatgtgggcggtgttcctcacctgggccgcggggatcttcctctacccgaccaagcccgtgcaggccgtgttcaggaagtgggtcgggctcaccagggactccatgttcggcatcgccgggggtattttcctgaccttcagcgcgccaattctgatcattgcgcttctcgcatatgtgtacatctccttcttcccgagtgagcatgtggtggagaaaaggaagctgcgctcactgagtttcaggctctggactttccctgttcttgtagacggcccctttggagttgtctctgcagttgagttcatcggaattgtcttgtttatagtttttgttgtctactcaatgacctattatgccgtggaagctgtgagccttgtctcgaaatttgatatcccatcaatgactgagagtgaattgatactggatgtcattggcctccgtttaggggcggttgggttgttctgcatgctcttcctcttcctgccagtcgcccgaggctcggttctcttacggcttatcgatattccatttgagcatgctacaagataccacgtctggttggggcatctcacgatggctctatttacattgcatggcttgttctatgtgatctcatggtccatgcaagggcgcctccgtgaagaactgagacagtggaaggaaattggagtagcaaacctgcctggtgtgatcagcttggcagccggcctacttatgtgggtgacatcacttcacccagtgaggaagaggttcttcgagctcttcttctacacccaccagctctacgtcgtcttcgtcgtgttcttggcgtttcatgttggtgacttcatcttcagtatttgtgccggagctgtgttcctcttcatgctcgaccgctttttgaggttctggcaatcaagggccaaagtcgacatcatttcagccgcctgccgcccgtgtgggacggtggagctagtattctcaaaaccagcaagcctccactacaatgctttgagtttcatcttcattcaagtgcgcgagctatcgttcttgcagtggcacccgttcagtgtatcttcaagtcccatggatgggagataccacatgtcggttctcataaaagtactcggcacgtggactgaaaaactgaggagcatcatcaccgatgtacaggagaagaacgggggtgactctgagctgcaatgcgggcgcatgacagcctgcgtggaaggcccatatgggcatgaatcaccctaccacttgatgtacgagaatctcgtcttggtcgcaggaggcattggaatatcgccattcttggcgatcttgagcgacataatccacaggatcgaggagggcaagcaatgcatgcccaagaacgtgctggtcctttggtcagttaagaagtccaaggagctttctctgctgtccgccgttgatgcccagaccatcagctcatctgtctcggacaggttgcaactggatatccaggccttcgtgactcaagaaccccatcctcctttggaggatggcatcgtcggggacgaccagaaagtccctggcatgttcgtcaagaacggtacagccatgtctgggctggtcggcaccggggacaacttctgggcggccatgtacttcctggcgtccacgctcggcttcctcctggcgtacgccctggtgcaggtgtactacgtgaagccgcacaacgtggtggcgtggtggtacctgggcctcctgttcatgctgtgcatggttgccggcgtcgctctacccggcgggctcgtggtcctcctgtggcatctgtcggagaagcagaggttggaggacgacaagtgggacgcctctcagtcaccgcgcgccgagcagacaggccccttggctgcggcgggtggtggtgacgacgacgctgctcccagcgtcagcctcgccgccctgcggacgacccggtacggctgccggccgaacttcgaagcggagttcgcggcgttcgcggagcgcgccggggacgcggcggacgtgggcgtgctggtgtgcggaccgcaggggctgcagacgagcgtagcgagggagtgcagggcgcggaacctccgccgcggcggcttgggggcggccaagagcaggagcggcgcggtcttccatttcaacagccacagcttcgacctgtaaactacgtacgtctcgtttggtcggttcaacgatcatcagtacatgttgcacagcacacacgcacagacgatagttggatgtacatgttgatccgtcataatttgatatcgtgtatatatatgtatagctgatagttaatatagttaagttatataagagatgtataaatctgtatgcgtatactataggtgtagcatatgcatgcatgatagaagcacgaaggttaaatgctgacgaatcacgtgaaatcatgtcatgtttcgcgtctaatgcgtgaatttgtatttttcttatgcgtttgtgagtacgtcaaaactacgttgcaacgcaagatttatctt

SEQ ID NO: 11870 - DNA, 93 bp, Zea Mays
agtctaagggttgtaccaaagagttcacgacactccggtctgtgttaaagctgttgatgttaaaagctagatatggtctgtctgatgctggct

SEQ ID NO: 11871 - DNA, 511 bp, Zea Mays
cctcctcgagatattttgcaatgccttcacaaatatctcgttggccccgcggcacggtgccatcagccatcgcgggcgaccgcgcgccattatagcacacggggcacggcacgccttcggcctcccactaactgcacagaggacgacgcggcagcgaggaggaagcaaaggaaaggggatatgtcgaggccgcccaacaggagcgacgcgcacctctccgccgaggacgaggcggcgctggaggccgaggtgcgggagtactacgacgacgcggcgccaaagcgccacaccaagccctcccgcagcgagcactccgccgtgtacgtcgacgcgctcgtcccggacgtcggcggcaactcccacccggagctggacaagttccaagagctggaagcacacaccgagaggttggtgtacgagggcgccaatgtgggagatgagttcgtggagacggagtactacaaggacctcggcggcgtcggcgagcagcaccacacgtgcgtgctaatat

SEQ ID NO: 11872 - DNA, 1281 bp, Zea Mays
ctaaaatccaaccctagctaacggatgggcgccgtttcatgaggaattaagagcagagctcgacctgcatatatactcttcttcctcgtacgttctgtgtactcgtcgtgaaaaacaggaagctaaatttggcaagcagttttccaccgcgcgcgaacaccggggttcgacgacaacaacggacacacacatcgtctatcagtgctcatccaacaatccgtgcgcgaccaaggcaataatggtgtcgtcctcccgtgctgtcgtcgtcgtcgtcggcctcctcgtcgccgcgtcctccctcgccgtcgctgcctccgatggcggtgggccgacgtacgggtacacggcggggagccccgacgggccggagaactggggcaagctgagccccgcgtacaagctgtgcgggcaggggaagcagcagtccccgatcgacatcgtcaccaagcaggccgtccccaacgccaacctcgacaccctcaaccgcacctacgccgccaccgccgccacgctcatcaacgacggccacgacatcacgatgacgttcgagggcaaggtcgggacggtaatggtgaacggcaaggcgtacagcttcgagaagatgcactggcactcgccgtccgaccacaccatcaacggccagaggttcccgctggagctgcacctggtgcacaggagcgccgacggcgcgctggccgtcatcgggatcctctaccagctgggcgccccggactccttctactaccagctgaagcggcagctgggcgagatggccaaggaccggtgcagcttcggcgaggaggagtcgcacgagggcgtcgccctcatccacctgcgctcgctgcagaagcgcaccggcagctacttccggtacacgggctccctcaccgtgccgccctgcaccgagagcgtcgtctggagcgtcctcggcaaggtgcggcagatcagcaaggagcagctgcagctgctcaaggcgccgctgcccgggaacgacgcacgccccacgcagccgctcaacggcaggaccgtccagttctacaacccgcccaacagcaccgtctccttccatatgtaatgtaatatgattaacgagatgtatatgtcgtttatgttatgaagtaaatatatatgtgcatgcattattattgcctatatattatttggtgtagtatttgtggcagtatagtgctaaaatgggtctggttttgatttgtaacgtacacatatatatgtctagcctagattgtctctaccccttggtttataaattataatttgcat

SEQ ID NO: 11873 - DNA, 1009 bp, Zea Mays
aaggctcatgaaactttcgacccattggaggcccacgacctctccgtccgatccctaggcggcggatccttcctccaccaaacccgcacctgccgcaactgaatcgggtcagatcgggccatcggggaggcgagggagctcacgcggcgccatggacgaggaggagcacgaggtttacggccaggaaatcccggaggacggcgacatggacggcgctgacgttgatatggctgcctccggggatgacgcggcgaagctgcaggagctcgacgagatgaagcgcaggctgaaggagatggaggaggaagccgccgccctccgcgatatgcaggccaaggtcgccaaggagatgcaaggaggtgaccctagtgcatctacagctgaggcaaaggagcaggtggatgcccgttctgtgtatgttggaaatgtggattatgcttgcaccccagaagaagtgcaacagcatttccaagcttgtggaactgtcaacagggtgacaatcttgactgacaagtttggacagccaaaaggttttgcttatgttgaatttctggaacaggaaggtgttcaggaagctcttaacttgaatgaatctgaattgcatggtcgccagattaaggtcgccccaaagaggactaatgttcctgggatgaagcagcgtccaccacgtgggtataatccataccatggctacccttatagatcatacggggcaccgtatttccccccatatggttatgggagggctcctagattccgccgccctatgcgctacagaccttacttctgaagtacggggtagggtaatgaagttcaatgcaaaaccagcccatggtcactggtcagtcccgggaataatcaactgtatcgtttgcactgttgcggctcaatgctcctgtatcagctgccttttctgacctttgtttcaagtgccgccataagcgacggacatgttgtattggcttgtaatacaggacgtagtaagtgcacacactttctggaaaaaaaa

SEQ ID NO: 11874 - DNA, 1210 bp, Zea Mays
tatattactggttaaaaaaaaaaaacaaggtttttcttgaagagcctgttattgccatcattgaagaaaaaaaaccgaaatggtttaatcatgctgcgtatttaaccataagcactttatcgtggaaaaaaacagagcacccttggctcaagaatgctgataaggcttcaaatgtgtcactcggagaggttgttcggtcgaggctgaagcagttgtcgtctatgaacaagcttaagaagaaggcacttggagtaagttgcagataactcgctgttactacccttaattccttcaagcgacaggccgactgatctctctctttttttttttgccaatgattaatgcaggtcgtcgccatgaatttaccgatggaagagattggcaaattcaaagagatgttccatacaatggacaaaaacaaggacggtagtttgtcacttgaagagctgaaggagggtttccggataaacgatcatcctgttccagaggaagagataaagatgttgttacaagcgggcgatatacatggaactgacacattagattgtgaggaatttgtgacagtcttgcttcacattaaaaagatgagtaatgacgagtatctacctaaagctttcgagttcttcgacaaagacgggaatggttttattgaaatgtccgagttaatggagactctaagtgatggtgaactaaagcctgatgagcaattggttaacgacattattcaagaggttgacaaggataaggatggtcgcatcagttacccagagtttgaattgatgatgaaaagtggatcggactggaggaacgcctctagacgttactcaacagagaatttcagcagcctcagtcaaaaactgtgcaaagatactttatgaaacaagaaagtagtttccaagcagcaattactgactgaagtaccacaccctcaactaaacagcatcagaagacaacgcaaaagcaggattactggatctggtggaaataagggttgaaggagatcacatataccagttgcatgcttgacaaacttcgtcaactagcaagccctctggcattgtcctttgctctggaagtaaaatttactattccaatagaatacatgacttagacatagacagatgtaaaggatgccccagcatccatgcaatccactaaccaaaatttggcattttactactgtcaaatatataaagaaaagaagatgtcc

SEQ ID NO: 11875 - DNA, 2550 bp, Zea Mays
ctcccatcgtaattcgtaacctagtagcacggagacacctgttctcggcaccggtgcacgccggatcttctatcgtcggatacaccgacctcgagttattaagttgggcgaggagaggtggttcattccagcagggatccttctcgtgagcccagtcgatctgaccgtccttggtatctggggggggttgttctgtactctctctttaatttgtgagtcgtgacaggttcttgaagtgcaattgttaagagttttagttgtagaggaagagaagggtttgctaatatggcgttggcagggacctccaaagtagtgctgggatgtatcgcctttgggattttctgggtgatggccgtcttccccaccgtcccgttcatgcctgttgggcggacggctgggtccctccttggtgctatgctaatggtcctgttccgcgtcatctccccggaggacgcgtacgccgcgattgacctcccgatcatcggcctgctcttcgggacaatggtcgtcagcatcttccttgagagggctgacatgtttaagtacctcgggaacctgctctcgtggaagagcagaggcagcaaggacctgctcttccgagtctgcatcgtgtccgcgtttgccagcgcgcttttcaccaatgacacatgctgtgttgtcctcaccgagttcatcctcaaggttgctaggcaaaacaacctgccaccacagcctttccttctggcccttgccactagttcgaacatcggctctgctgccacgccgatcggcaaccctcagaaccttgtcatagctgtcgagagtgggatctcatttggccagttcttgctgggagttttcccagctatgatcgttggggttctcacaaacgctgctatcctccttttgtacttctggaaatacttgtcggtggagaaggatcaggagggtgggcagcccacaggaccagaggtggttgccgacgatgaggttacttcccatcggttcacaccggctagaatgtcacatgtttcttctctgaatccagatgacatggattgcgtaagcgaaccgatcatcaggagcaacagtgtcagtactactgggaatgagaacctgagaagcagaagcatcaattctgaggctgacattcagcttgcgatcaagtctctgcgggcatcaagcatgtcgcatgagatggtagaggtctcgacggttcctgatcggagagatgaaggtgcatcctcaaggaagttcacaaggactgctagccagcaaaggagcgtgataatagaggatttagcaccctccccagagattaatggggaaaaggagaaagaaactgaagttgcagagaagagatggaaagtacttgtgtggaagactgctgtttatcttatcactctcggtatgctcattgcacttctaatgggactgaacatgtcctggactgcaatcactgcagctcttgttcttctggcactcgattttacggacgcacaagcttgtcttgagaaggtgtcatattcactgctgatctttttctgcgggatgtttatcactgttgatggcttcaacaaaacgggcataccgaacacactatgggagttagtggaaccatattcacgaatcgatagtgcgaaaggtgttgcacttcttgccgtggtgattcttatcctttcaaacgtggcctctaatgttcctacagtcctattgctcggtacaagagtggctgcatcagcggcttcgatttctcatggttcagagaggaaagcctggctcatccttgcatgggtcagcaccgtggctgggaacctcaccctcctaggctctgcggcgaatctgattgtctgcgagcaggccaggcgggcccagttcttcggctacaacctcaccttctggagccacctccgattcggggtcccgtcgaccatcatcgtcacggcgattggtttgctcatcgtcatcagttactgaaacagctgaaggcagaagagcgtagtgtaagagaagcagaatggataaaaatccttccaataagaagtacatgtaaattaggcttgccctataactcaagtgtgtatcggtacgttatgtctccgtctgtgctcttgctcgtgagcaagcagcacatggctgaccgtgtagcttgcatttccattgcataataggcttatgaagaatgctttggtaatatgattttacagtctgacaaggattgtgaagcagaggcagtgtaccatcaagataatacttctggaagcatataaaaaaatttcgtatatttggatttcaaatccagtctgcttcagactggaaattcatattatcttctggaatcgtgctttattgtcagaaacatgggctaaaattggaaagtccgtcatttattgggcttgcaatgggacaaccttttgggtctgttatatatcactataaccagtgacaactttggttcgcaaactcaaaccagtttctaatctttattttatgatttttatataaagttcttaataggtcctcttgctattttcaatctaaattctaaatactaaaaaaagtttctgtgaa

SEQ ID NO: 11876 - DNA, 375 bp, Zea Mays
tatggcaccattaagccgggggggacacaatgcaagcaactatcaattgttgactttgctgaaaaggaaaaaaagctaccatgtttcctaaggcttaaggtttggccgccagagagttttggcgcaattgatgacgcaacgaagcagtcttaacgctgaggaggagccgaggaggtactgagagcacatggacccatattgtttgctcgcccccagagattctataatagccaactgcaggggggcccttccttgagctcgagagctttcgacgacctaccgcagcgcatttctacagcgaagcaaagagcgttgtgtgtcttgattgatgtcccgtgtttttacagttttgaagggcgtgtctgtttgtttatc

SEQ ID NO: 11877 - DNA, 1858 bp, Zea Mays
agtcagtaggaaagggcagatccagcgctagaggatcctgtctttgcttccctcttacaaagggaaatcagttctagaactcggtgctggaattggacgctttactggagatctggcaaaagaagctgggcacgttctggcactagactttattgaaagtgtgattaagaagaaccaaagcataaatgggcatcacaagaacataaccttcaggtgtgccgatgtgacatctaacgacttgaagattgaagataactctgttgatctgatattttcaaactggctattaatgtatctttcagatgaggaggtccaaaagcttgtggggaaaatggtaaaatggttaaaggtcggaggccatattttctttagagaatcatgttttcaccaatctggagattccaaaaggaaggtgaacccaacacactatcgagaaccaaggttttataccaaggtatttaaagagggccattcatttgatcaagatggaggttcgtttgaactttctctagtgacctgtaaatgcattggggcttatgtcaaaaacaagaagaatcaaaaccagatatgctggttatgggaaaaggtaaaatcaacagaagacagagattttcaaagattcctggacaacgtgcaatacaaaacaagtgggatattacgttatgagcgtgtctttggtgaaggttttgtgagcactggtggaatcgagactacaaaggaatttgtgggcatgctcgatcttaaaccgggccagaaagtacttgatgtcggatgtggaattggaggcggcgacttttacatggctgcaaactatgatgtccatgttcttggtattgatctttcggtgaacatggtttcatttgcaattgaacgtgccattggacgcaagtgctctgttgaattcgaagttgctgattgcaccacaaaggattacccagaaaatagttttgacgtcatctacagccgtgacaccatccttcacatacaagacaagcctgctctgttcagaagcttcttcaaatggctaaagcccggcggcaaagtcctaatcagcgactactgtaagaatcctggaaaaccatcagaagaatttgctgcgtacattaagcagagaggctatgaccttcacgacgtgaaggcttatggacagatgctgaaggatgctggttttcataatgtcatcgcggaagatcgcactgagcagttcttgaatgttctacagagggagataggtgaagttgaaaagaacaaagacgctttcctggcagacttcacccaggaggactatgacgacattgtgaatggctggaacgcgaagctgaaacggagctctgccggcgagcagaggtgggggttgttcattgccaccaagtgatttggcctggcagcaggagggctcttcggaataagaatggatgtggctctaactctgcttctagaccggtgatggttcagcttagaagcaggggatcttcatcatcagaataaaaacgtgtgttgttgtgttgctgtgtctacgccactagtatttctgttgttacttatgttctaggtaaactgcgcagccagagcagagctgaagaatatgtactgcttgctcgctcttgtgtggttgtgtctacccctactagcatttcagctttgttgtaggtaaactgcgaacccagagttgcagaacccgtactgctcgtttaagttcatggtgaactacgagctaaaaggctgttgccagagtcgatgtcacttgtcactggaggtccccggttcaattcagatgttgctttggcacgtgctattcttttggacggaggcagctagtgtcaagtacttcgttcgggaaaagagacaacggaatcct

SEQ ID NO: 11878 - DNA, 68 bp, Zea Mays
cttgcaagaacaatgattgatgagtataacacactagagaggttttgggatgaagctgtcaacactgc

SEQ ID NO: 11879 - DNA, 2760 bp, Zea Mays
tggccccggcccattttaaggcgtttcctctccggcgcagagcgggtagcgggacgaactcgtcactggtgtgggccgtggctgtacgccgcagagtgaagcgagacgagacgacgatgcgcaagtgggcgctctcctccgcgctcctccttctcttcctcctcaccaccctccccgacccagctaagaagctacaggtgaatgcggaagagagcagcgatgacttagctaacccacccaaggtagaggagaagcttggtgctgtccctcatggcctgtccaccgactctgaggttgcccagagggaagctgagtctatctctaggaagactcttaggagctccgccgagaagtttgagttccaggctgaggtgtccagactcatggacatcatcatcaactcactctacagcaacaaggatatcttcctgagggagctcatatccaatgcctctgatgcattggataagatcaggttcctttcccttactgataaggaagttctgggtgaaggtgacactgcaaagcttgagattcagattaagttggacaaagagaagaaaatcctctccattcgggataggggtattggtatgaccaaggaggatcttattaataaccttggaaccattgctaagtctggcacttcagcttttgtcgaaaagatgcagtctggaggtgacctcaatcttattggacagtttggtgttggcttctactcggtgtacttggttgctgactatgtcgaagtggtcagcaagcacaatgatgataaacaatatgtttgggaatcaaaagctgatggatcgtttgctatctccgaggatacatggaatgaaccccttggccgtggaaccgagataagattacatctgcgagatgaggccaaggagtacttggaagaggataagcttaaggatttggttaagaagtactctgagttcatcaacttccctatctatttgtggtcaaccaaggaggttgatgttgaagtgccagctgatgaggatgagacaagtgaagaagaggattcgtccccagaaactacagaagaagagacagaagaagatgaagagaaagagaaaaagcctaagacgaagacgataaaggagactacttctgaatgggaacttctgaatgatatgaaggctgtatggcttcgcagcccgaaggaggttactgatgaggaatactcgaagttttaccactcactagccaaggacttcggtgatgacaagcctatgggttggagccacttcactgctgaaggagatgttgagttcaaagctttgctcttcattccaccgaaggctccgcatgatctctatgagagttactacaacagcaacaagtcaaacctcaagttgtatgttagaagagtgttcatctctgatgaatttgatgaccttcttccgaagtatctcagctttttgaggggtattgttgactcagacacactgccgctgaatgtgtcacgagaaatgctccaacaacatagcagtctgaagactatcaagaagaagctgatccgcaaagctcttgacatgattaggaaacttgctgaagaagaccctgatgagtacagcaacaaggataagacagatgaagagaaaaatgagatggaggagaagaagggccagtacgccaagttctggaatgagtttggcaaatcaatcaagctgggtatcattgaagacgcaactaacaggaaccgccttgcgaagcttcttagatttgaaagtaccaagtcggatggcaaacttgcctcccttgacgagtacatttcaaggatgaagccagggcagaaagacatcttctacctcacgggaagcagcaaagatcagctggagaagtctccgttcctggagaggctaaccaagaagaactacgaggtcatcttcttcaccgaccctatggacgagtacctgatgcagtacctgatggactacgaggacaggaagttccagaacgtgtccaaggagggcctgaagctgggcaaggactcgaggctcaaggacctcaaggagtcgttcaaggagctgacggagtggtggaagaaggccctggagagcgagagcgtggactcggtgaaggtcagcagccggctgcacgacaccccctgcgtcgtcgtcacctccaagtacgggtggagcgccaacatggagaagatcatgcaggcgcagacgctgtcggactcgagcaagcaggcgtacatgcgcggcaagagggtgctggagatcaaccccaggcaccccatcatcaaggagctccgcgacaaggtcgcccaggacaacgagagcgaggagctgaagcagacggcgaggctggtgtaccagacggcccttatggagagcgggttcaacctccccgaccccaaggagttcgcgtccagcatctacaagtcggtgcacaagagcctggacctgagccccgacgcggccgtggaggaggaggacgaggccgaggagcagccggaggtggaagagaaggagccggcggccaaggaggggtcggagccgtccttcgacaaggacgagctgtagtcggcgtgctgtggtctcgtctcgtcttcgggatctgttttgaagtctagctgtagctcccgtttagttgagatatcggggagcccactcactgccagctttgtgtttaggaacgtgatacgggatctttttttttttgttgcctgtctttgtacttgtacaaacctcagttcagtgactcggtctaattaccggctccgattaaaaaaaaaaaaaa

SEQ ID NO: 11880 - DNA, 72 bp, Zea Mays
gtgggagccattgggttattgacagtggatgcacacaacatatgacaggtaacccacggatgttcacctcac

SEQ ID NO: 11881 - DNA, 460 bp, Zea Mays
tcgaggttctttcgagacagggtccactctcagtaggctttcctatagagaaccgtggaaatcctgtgagcatcagcgcgttgagaagtcacctggagcggatgaagcatttggcatttgtgaagcggatctcggacttccatttgctcctcaagctcgctactttcctagatgtaaaggcagacatgcctactatagctgcatgtgtgaaaactcagagcagggtgcccgaggggtaccagcttctgatcgagtcctttgctagccagggataatatcgcatctgaaagcatggcatggcgatgcataatttgtttacttgatcacatcatgcatgtgtaacttatggatgtctcttggtgtataagtattgtgtgaattccttctttgccatcaaaatatatgtttattccttctcatgtcatgaaataaaagttgccttcagtgccatcggttttaa

SEQ ID NO: 11882 - DNA, 2530 bp, Zea Mays
cgagcgagcgagcgagagtggtggtggtgtgtgcgcgagcgcaacagggagagggagagcgtatttcttcttcctcaccctcctcgaggaagagagagggcagctccggagccgcacgggcgcgagcgagaagagaaaaaaaaagtccttgttgagttgttgtatcgggttctggtggtgactgttactggggtttccttgcccggttcttgatttgcgcaaggacagatttgccgtcctctcgggttccgccgtgcggtgctgaatcctccttccctgttcccttcccttaggtttggatcggggatagggatggaagtggacagaaagaagaatttgcagattggatccaaggggaaggaggttcagagcaagaatccgaggcgggaggagccgctggcatcgtcggaggtggacatggatgagccagacgctcctgagagcggtgacatgattgttgatggcaacaatggcagctccagagagagccccttgcagcccatggattccaagaattccaagggctgtgcggtcaagaagccaacatcggtgagctcagacttcggtgaggagctggacttggaccttggtggggagaagagtgggacgcagcaggagaggaagctctcaaggcaggaccgggttgagctttgccggtcgttccagcttgcagtgagctcccatgattgggagagcgccgaggggctggtaggaatggctgacgcacaagggctcaacgatgtgctgtgtgtggcagtggatgcgatttggttcttgagtgatagggatgagctgcttgctattgtggggttgatcaaaagggttgtgtctgagggcgcaaaagattttacccgtgctgcgctccggacatcattcctcgcatcgtgtgtatcagcatgtagggggcggtcgactagccttgctgatgcagtgagcttcatgggccagaaattgcatgaacgacttcaagaatcccaaggtgatgaggtattgaaagcagaagcaagtgcaaaggtgcacaggtttacagaatgggctctaaagtgtatcgggctgcattcacgtgttcgagagaacaggggcaaaggaaaccacgacactgtaattgaggttcagcttcagttgtctgctttcaagatatttcttgatcttgctgataatgagcttaccgggaaggattttacggaggcttttgatgctgcatgcttccctcttacactcttttcaaccaccttcgaccaaggatgggcatcaggaatatcagcagctgcagtacaaggccttttagagttgttggtagagggtggcgcagacaatgtgaaccaatgctttcttgaagctgcacgctatggcagcactgagcttgtgcggatcttacttcaggttgctcaaagaaacagcttggacattgatgtggacctagcccttggctttgccgcacactatgggaagatcgaaaccatgggatgcttggttgaagaaggtaatgctattggctttcttggccctttgatgcgtgctgctgaacgtgggtgcctccaagttgtggaatggtttgtcaaccacgggtgtcgagaaatggagctttgcctagcccttactgctgccacctctaatagccagattgcagttgctgcttatcttcttcctcttgtcccgcaacatgttcttgcccccctcagcattgagattatcaaggctgctggtgagaggactacgggttccctgcagggtgtggattttcttctccgctcggatttcctcaatgacccagctgccacatatgccgtggcagacagtattgcaagatgcaccgatgaagctgtggacgcaaagcttaggtctttcatgaatgagcactggagcgaggcagctttttgtgcgggattcgaatctgcacagcagcactttgttaatttcatgaggataatggaaaggggtgaatcaccaatccgcttaggggatctcccacttgagctggtgattgccatggcctacctgccgctctataaggaatgcatgaattccaatgggcgacttttgcctcaaaggcttagaggtcagcttgtggaggctgcaagcaggctcgaggaccggcaagtggaaagggatagccaaagcagagaactcttggccatcttggagcaccacataccacgattcatgatccaaacttgaaggcgatcttcggagagtatataattctggggaatggtgtgtgccttgtcgaggcatgtgtcggagtgttttactgggaccgtaatcttccatgaaaaaaatgatataagccttcggtatgtaatcctgagttttcggtgtaattcaaaacgctggtcttgtgacaacatgtcgctagttttggctagcgacttttttgatcatggcttcaaaaacaaaacgaagggagtatattcatactgtgtggagattgccttgatcgtgagatgtgacatggttctgatgaggtcatgcctctcgaggaagatagcaccgttgatggctttcatctacaaaatactatccctcggta

SEQ ID NO: 11883 - DNA, 1637 bp, Zea Mays
gcgaatggaaaaccataatccattacattctcagattgctgaagtgaaaatggacatctcagcatcagcttctgttgcatcagggaacaaattctgcaagggtggtgcctgtgatttctctgattccagtaactcctcgaaagatgccaaggagagatccacgtccatgaggaagcttataatcgcagtgatcctttgcatcatattcatgacggtggaagtggtcgggggcatcaaagcaaacagtcttgccatcttaactgatgcggcgcaccttctttctgatgtggcagcatttgccatatcgttattctctctctgggctgctggatgggaagcaacaccgcagcagtcatatgggttcttccggattgagattcttggtgccttggtctccattcagctcatatggctacttgctggcatactggtatatgaggctattgtaaggctcattaacgagagtggcgatgtgcagggctccctcatgtttgctgtgtcggcgtttggactgtttgtcaacattataatggctgtattgctaggccatgaccacgggcacggccatggacacagccatggacatccacatgaccatggtcatggtgattcagacgatggccattctcaccatgaagaaccagaacagggccatgttcatcatcatgagcatagccatggaagttctattactgtcacaacacatcaccaccaccactcaggcactggacaacaccatgacgctgaggagccactgatcaagcacgaggccgactgtgagggcacccaatctgctgctaagaagcctcgacgcaatataaacgtacacagcgcttaccttcatgtgcttggggactccatccagagcatcggggtgatgatcggcggggctatcatctggtacaagcccgagtggaaaatcatcgatctgatctgcaccctcatcttctcggtggtcgtgctgttcaccacgatcaggatgctgcgcaacatcctcgaggtcctgatggaaagcacgccccgtgagatcgacgccaccaggctggagagggggctctgcgagatggaaggcgtggttgccgtccacgagctgcatatctgggccatcacagtggggaaggtgctactggcttgccatgtgacggtcgccagggaagccgacgcagacgagatccttgacaaggtgattgggtacatcaagacggagtacaacatcagccatgtgaccattcaggtcgagcgtgaatagagggggagctgtcttttgggctgtcagggcataaatggcgtcacgccttcactggttatcttactctgtcggttaaaacttttttttggcacctgggaaggcatcaggcagccatcggagtcttgatgtgcttgcaagttcatctgtggttcaagctttgatggtcagtagtgttatctgttactactagtctattaggcgggggtaggcgtcaaccagtgtgtacgggtttgattttcggtcatgctgttaacagcattgcggttcgtcgaactggatatgtagtttagtacgctgtgtcatcacctcttgtgtaagggaacgcttcttttctgtggtatggaagatgtgaacttcgtgatataaacaaaatagtaatataaagcaa

SEQ ID NO: 11884 - DNA, 2605 bp, Zea Mays
tgatggacgcgcgctgcacgcggggaatcgttccggatttgtttatttgtctctatatatataggtggttcgaggtgatcggcagaaccacacaggcaaagatggcgagcgtgcacaaggccaccacccttgttctcatgttctgcctgctagcgctggggagagcggagtacctcaagtacaaggacccaaagcagcccgtcgctgttcgcatcaaggacctgctgggtcggatgactctcgccgaaaagatcggccagatgacgcagatcgagagggaaaacgccacggccgacgcgctggccaaatacttcataggtagcgtgctgagcggcggaggcagcgtgcctgctcctcaggcgtctgctcaggcttgggccgccatggtgaccgagatgcagaagggcgctctttctacgcgtctgggtataccgatcatctacggtatcgatgcagtgcatgggcacaacaacgtctacaaagctactattttccctcacaacgtcgggcttggagctaccagggaccctgacctcgttaagagaattggagaagcaactgctcttgaagttagagctactggaattccttacgcctttgctccctgtatagcggtctgtagagatccaagatggggacgttgctatgagagctacagtgaggatccaaaggttgtccagtcactgacttcactcatctctggcctgcaaggtgacgctcctgcggattccgcgggaaggccgtatgttgggggaagtaagaaggttgctgcatgcgcgaagcactatgtcggtgatggtggaacgcataacggaatcaacgagaacaacacgatcatcgacacacacgggctgctgagcatccatatgcctccttactacaactctatcatccgaggtgtctccacggtcatggtctcctactccagctggaacggagtgaagatgcacgcgaaccatttcctggtcacggattttctcaagaacaagctcaagtttaggggttttgtgatttccgactgggagggcattgatcggatcactactcctcctcacgccaactactcttactcaattgaggctggtgttggtgctggaattgacatgatcatggttccattcagatacacagaattcatcgacgatctgacgacacaagttcagaacaaggtcatccccatgagcagaatcgacgacgccgtctacaggatccttcgtgtcaagttcaccatgggtctgttcgagaacccttaccccgactctagcctcgccggcgagctcgggaagcaagaacaccgggaactggcgcgcgaagccgtcaggaaatcccttgttctcctgaagaacggcaagtcctcctacgctccgttgctgcccctcccgaagaaggccggcaagatcctggtcgccggcagccacgccaacgacctgggcaaccagtgcggggggtggacgatcacgtggcaaggaagcagcggcaacaccactgccggcacgacgatcctctccgggatcgaggccaccgtggaccccagcacgcaggtggtgtactcggagagcccggacagcggcgtgctggccgacaagtacgactacgcgatcgtggtggtcggtgagccgccatacgcggagacgttcggcgacaacctgaacctgacgatcccggcgcccgggccgagcgtgatccagtcggtgtgcggggccgccaagtgcgtagtggtcctcatctccggcaggccgctggtggtggagccgtacctgggcgacatggacgcgctggtggcggcgtggctgccggggtcggaggggcagggcgtggcggacgtgctgttcggcgactacgggttcacggggaagctgccgcggacgtggttcaagtcggtggaccagctgcccatgaacgtgggcgacgcgcactacgacccgctcttcccgttcggcttcggactcaccaccaagggcacgaagtgagtgagtgtgaggcgctctgatgggatgtggcctgtgagtgagctgtgtattcgtgggcgggcgtgaggctctttggctttcgaattggttgggggtgacgggcggcgagtcgtgtacgccgcacacattgcgcagcgtacgttgggttgggatgtttgcgtctgggtaataacagtgatgcattcttgagatggttgctgttagtgtgggttgtttggaatgaacaataagatcaggcgcgttacattggcacgctactacctctcctgctgagaccagagatggcgatgtgcatttacccatcggcccgtgctattccataccctatttagccgtgtactgataaaagaatttgtcaaaccgtgtacgggtaaaatcatgtatccatgtactgctcactataccgtatacgccagctacttctactaccaatattactcgtatctagtgtaaaaatgattagggtgctaatattagggcctgtttggcatggctccagagcaaaactccaaggaggagctggccagagcatgccaaacaccctaactccagagttgtaaactctatgaagtttttggagctgcagtacaattttttggagtacctcttttgctgctctgaaaactccaaaaaag

SEQ ID NO: 11885 - DNA, 1757 bp, Zea Mays
gcgacatcgcggcgaggtgcccaagggaagcgcggagatcttcttccggaaggtcaagttctggaacgacgacgaggcagaggaggcgcccccggtcttcaatgtcgatggggttaactatattcatgtcaaagtcgctggactattttttgtggtaaccacaatggttaatgtctccccatcccttctcttggagcttcttcaaaggattgcacgtgttacaaaagattatctcggcgttcttaatgaagattcattgcggaagaactttattttggtgtatgaattgcttgatgaagtcattgactttggatacccacagacaacctctactgaagttctcaagtcgtacatattcaatgaacccattatggttgatgctggaaggctgccaccgcttggtcctgctgctatgttcatgcaaggcacgaagcgtatgcctggtacagctgttacaaaatctgttgttgctactgagcctggggggaagaagagggaggaaatttttgttgatatcattgagagaattagtgtaacattcagctcgagtggctatatacttacatctgagattgatggaacaattcaaatgaaaagttacctcactggcaatccggaaatccgtcttgctctcaatgaggatttgagcatcggaagaactggatcttcttcatacgattacagaagttcttctggaggaggaacagtcattcttgatgattgcaatttccatgagtcagtacatctggacagttttgatattgacagaactttgactttaataccgcccgatggagaatttcctgtaatgaactaccgtatgacccaagaatttaagccaccattccgtgtaaccgcactaattgaagaagctggaccagcgagggctgaagttctactgaaaataagagctgacttctccgcgagtgccactgctaacacaatcgtagtacaaatgccagtgcctgcatacacaatgagagcgagttttgagttggaagctggagcagttggacagacaaccgattttaaggaaggatccaggagacttgagtggaatctaaagaagattgttggtggttctgagcacaccctccgtgcaaagctgacattttctcaggagtcacatgggaatatcacaaaggaagctggcccagtgaacatgaatttcactataccgatgtacaatgcatcaaagttgcaggtcaggtatcttcagatcgcaaagaaatcgaaggcatacaacccttatagatgggtgcgatacgttacacaagccaactcctacgtagctcgtctatgaggaatcagcatctgtactcttgtttccagtccattttttttgggtgtaatatttgagcgttatcatggacatagtggcgtgtattgtgtaactgtatattgaggttcgcataccgctcagctcctgtagtaacaattgtttttcgtcgtgcaatgtgcagatgaataattcatgttctaatgctgcaaaactgattgaggcgagtacctattgtcttgcataattcctgcgaggttttagaaactgtgaactgacctcgcctgtgggacattgggtcctattgtttcgcataatttctgcaaggttctagaaactatgaactgagctttggccagtaaagctctttgtattaaagtaataatgtattttcagttgagttcaggtactcatgtattcccgttttttttccccaaaaggatatttggtatgagtttttctttctgcagtttggtag

SEQ ID NO: 11886 - DNA, 76 bp, Zea Mays
ggatatctcggctctcgcatcgatgaagaacgtagcaaaatgcgatacctggtgtgaattgcagaatcccgcaaac

SEQ ID NO: 11887 - DNA, 473 bp, Zea Mays
tttgattattcgatccttactctgattaaaatcgaacatgttaggatgcagggataagcttcttgcagatacacctatggaagatttttgtatctcgagagaggatcataatcgcacctggggaggacctgtgaattgcaccaaagcttcaccattctgtctcgcatcagggcagtagtttcctttgggtattgtgacttgtgagggaggagaaccttgccagcgtgtgtaccactcatcctttgatgtgagaagggaccttgtacgtagagaggccaggacttgtattttaactgttggtgttggttatgttaggaaatatggataactggctgcagtcttgttacggtgttgattcatgctctgtttaagcccttgttttctctctctaaaaagtagtctcttgtgtttgttgatgaagcaagataattggtttagagaaaagtttatatatgcatataattattcatcca

SEQ ID NO: 11888 - DNA, 1519 bp, Zea Mays
gtgggctttagttgggctctcgacgctggcgcacggcttgcctgctctagacgagtccggcaaaagtcgccgttggatcgtaccgctcggagcggacgacgcagattgcgagactgtacactgtagagagagacgtcgtcggcctgagcgccgtgcaagcaagcaagcggcggcaatggcggcggctcttcaagccacgccgatcaaaaccctagccacctcccgctggcgcgtcgaaggtgcggaggcgcggccgcggccgcggccgattgcggtgagcttccgttgctccgcggcggcgaggagctacaacatcacgctcttacctggggacggcatcggcccggaggtggtcgccgtcgccaaggacgtgctatccttcgccggagccctcgaaggcgtcgagctccggtttcaggagaagctggtgggcggctcggcgctggacgccaccggcgtgccactccctgacgagacgctcgacgaggccaagggttccgacgctgttctcctcggcgccattggaggctataagtgggataccaatgagaagcacctcaagcctgagaccgggctgctgcagctacgtgccggactcggggtctttgccaatctgcgaccagctgcagttttgccgcagttggtagacgcatccactctgaagaaagaggtagctgaaggtgttgacatcatggttgtcagggagcttactggaggcatctactttggcaaacccaggggttttggaacaaatgacaagggagacgatattggcttcaacacagaagtttattcagcttctgagatcgatcgtattgcacgagttgcatttgaggtcgctcgcaagagaagagggaaactatgctcggttgataaagcaaatgtgctggaggcatccatgctttggaggaaaaaggtgactgcactagcctctgaattccctgacattgagctctcacacatgtatgttgacaatgctgcaatgcagcttgtcaggaatcctaagcagtttgatacaattgtcacaaacaatatttttggtgacatattatctgatgaagcatcaatgattacgggaagcattggaatgcttccatctgcgagtgtcggtgaatcgggacctggtctttttgaacctattcatggctctgcccctgatattgctggacaggacaaggccaatccattagctacaattcttagcgcagcgatgctattgcgatatggcctaggagaagaaaatgctgcgaggagaattgaagctgcagttacagaaacactgaaccatgggttccgaactggggacatatattctcctggaacaacactggttggatgcaagcggatgggggaggaagtcttgaagacagtggagtcactgaaggaagtggctgctgtgaactgatgcatgctgattgaaacagtacagaccagatcacaacagattgaaacgttggccacatggctctttggagaaggaaatggacgcgaacagaaaaccaagacgacgagcactggg

SEQ ID NO: 11889 - DNA, 883 bp, Zea Mays
cgtgaccataagatgggggacggagggagtagcatgttttcacggtttcccaccttctgggtctggagttgttgcagatacggatccacgtcagaattttaacagatctggttttgtgtctcaagatattcgtgctaagacacaggtcaacttcaacaacacagataatggagcggcgatgtctgggacaccccgtggccagaaccctttcagctcaagggagggcttcacagtcaacctccgcacctttgccatggaccacgaacagtattccaagaagagagctttcgtccacgtcctactgaagagaaagaagaccttcgtgacggtgacagactccagcgggaacaaaaagacgggtgcctccgccggctgcttggaggacaggaaaggacggtcccgtctctcccgatacgcttccgaagcggtcgcggagcaggtcggacggtccgccaggaagatggggttgagctccatcgtcatgaaggtgaaaggggcttcgttcttcaagaagaagaagaaggtgatcctgagcttcagagaagggttccgaggcgaaagggtgagggaccaatctcctatcatgtacatccacgacgtgacccagcttcctcacaatgggtgccggctccccaagcagcgccgggtgtagtttcggagtggactggaactagagctgggtttaaagaaagaaccggggaagtgtcggaggtgattttcggaaacttaacgtaatcgttgtgttgttggcctagttgatgtaataatatggacatgtgttttgggcaaatctacccttgttcttgtattgtatggaagcaacttactcgctcgatgagttatagacaattctgcgtaataatgctgttgagttctgaaatgt

SEQ ID NO: 11890 - DNA, 117 bp, Zea Mays
caattatcaagttctctggtaaaagaaaaacacaaaactgtgaacagttctgggccagaatcagcctagccggcccaacaccgggcaaacctggcccgcggctggggagcccgctct

SEQ ID NO: 11891 - DNA, 958 bp, Zea Mays
gtgcgtttagcatcaattcatcagctagaagttcgaaatgggggtcaagtttttagtccttctcggtgttgtcctggcctctcttgtcttccaggacgtggcatttgctagagagctcactgaggccaataatgcttcttcttgcacatgcagaggatgagggaaagaacatgaaacaaggaggaatgactgaattaaaggatgagaaatggggaggtggatataatggaggatatggatatggaggtgggtatggtggtggatatggaaaaccgggctatggtggtggatatggtggaggatacaggcccaaatatggcaggggctacaggtccggatatggatacggtggcgggtatggtggaggatacggtggcggttatggtgggggatatggtggcggtggtggctatggagaaggtggaggctttggaggtgggcatggtggtggtcgctatcctggtggtggagggcaccatggtggtggagggcaccatggtggatggaattaagaagcattgctacataaagtttctctatgtccgataacaataaatggcgacgataaatttgaatgctacatgtagttccgtgatggaaatcttatgtattttgtataaaacatggtacatggactgttacgtatgttgcatgaaatactgtactagaataagatctttgtatgccatgtatggtattagtgtgcatgtgtctggcttttgaaaggtgtacctcgtcatttatggacttatatgtatgtatagataaaaataatatttttatcaaggcttgagtcaaagggcgatgtatggatgaactcatggttcttccatcgttgtgtttttatttcattttcactacatatttctggctccactgcttgtgaaatgattattacactgcttttggtgccatttgcattgatctacttcaagaacatctcaagatatgtggtagt

SEQ ID NO: 11892 - DNA, 2425 bp, Zea Mays
aagaaacgccagggagtagaactataagcttccaagagttcaagaacaagttactagaacctggtttagttgatcgcattgttgtttcaaataaatcagtagcgaaggtctacatcaggagttcacctcatccaaagagccaaggccaagatagtgatatccatattactaccactgatgctccaggcaagcctgctcccagcagatgcaagtattacttcaatattggtagtgttgatttgtttgaagagaagttagaggaagcccaggaagctttgggaatagatccacatgattttgtcccagtaacttatgttgctgaagtaaattggttccaagaagttatgaggtttgccccaacagcattgattgttggtctattatatttcacgggaaaaaggatgcagagtggtttcaatattggaggtggtgctggcaaaggaagaggaggtattttcaacattggaaaagctacagtgatgaagatggacaagaactccaaaaataaggtgttttttaaggatgtagccggttgtgacgaagcaaaacaagaaataatggagtttgtgcatttccttaaaaaccctaagaagtatgaagatttgggagctaaaatacccaaaggtgctctacttgtaggccctcctgggacagggaagactttgctcgccaaagctacagcaggagagtctggtgtgccatttttgtctatttctggttcagatttcatggaaatgtttgttggtgttggaccgtccagggtacggaacttgttccaagaagctaggcagtgtgctcctagtattgtattcattgacgaaatcgatgctattggtcgtgcaagaggacgtggaggtttttcaggttcaaatgatgaacgtgagagtactttgaaccagctgcttgtagagatggatggatttggaacaacttctggtgttgttgttcttgctgggacaaatagacctgacatcctggataaggcattattaaggccaggaagatttgatcgccagatagcaattgacaaaccagatataaagggccgtgatcaaatattccgcatatatcttaaaaagcttaagttggacaacaaaccatcattttattctcaaaggctagctgccttgacacctgggttcgcaggagctgacattgccaatgtttgtaatgaagctgctttaattgctgcgagaagtgaggaaactcagattaccatgcagcattttgagtccgcaattgataggattatcggtggtttggagaagaaaaatagggtcattagcaaactggagcgccgtactgttgcttaccatgaatctggacatgcagttgctggatggttcttggaacatgctgagcctcttctaaaagttacaattgttcctcgtggaacagctgctttaggctttgcacaatacgtcccaaatgaaaatcttttgatgacaaaagagcagctttttgatatgacatgcatgacattaggtggccgtgctgcagaggaggttttgattggcaaaatctcaactggtgctcagaatgacctggagaaagttaccaaaatgacatatgcacaggtcgccgtgtatggttttagtgaaaaggttgggcttctgtccttcccccagaaagatggtggtttcgaaatgagcaagccttacagtaatcagacagcatccatcatcgacgatgaggtccgggaatgggttggcaaggcctacaagaaaacagttgaattgataacagagcacaaggagcaagttgcacagatcgcagaattgctgctcgagaaggaagtcctacaccaggacgatctaaccagggtactaggagaacgtccattcaaggcactggagccaaccaactacgacctctttaagaaaggtttcgaggatggtggtgacaacagccaagcaccagcagagaacgccgagctgcctgatgattcatctcccccagttggtgacgttgtacccacgtagtgtttctctcctcaacgtcagagctgtacattgagcgctcattctcgatagattcttgtttgttggttgcatcataaaaaagatctgtataaattcgcgcccaagctgattatgccactgtggaaatgcatttggatttccgtagtgtcagtccggtcgatagggtgccttgggttcttcatggcacgagcaaatgttctgattcttgtattcgaatgttttgaaatattctgtctgacgggactgcggagttggcgcgagaagtgtgcttgttcagttctatctgaaggcttagctgtctgtagctgtagctggtaacaacagtggctaaaatggtacctctgaaatctttgtgacagtaacaagccattttcctttgaatttttatcaggtagtcggcgcgattactttgtttgacaagcacaaactaaatgtcttggttt

SEQ ID NO: 11893 - DNA, 1268 bp, Zea Mays
ccacactccgatccgtgtatcctgaatctgccattcatcagtcatggtcgtcagatgagctgaagcctcgtgacgtcagggttgccccaagcatgtccgtcttcaagcatgccgatcctacaagcccccctccagttacctatttgcacttctacggttcctccgagttttcgtttggtatcttctgtttaccgaaatcggcaattattcccctccacaaccatcctgggatgacagtgtttagcaagatactgtttggttccatgcacctcaagtcctatgattgggctaaaagtctgccggcgggtagcaacgataatgcacttgagaactctgatggagcaggagctcgtctggccaaggtgaacacagatgccgtttttgacgcttcatctgagaccgtagttctgtaccctgaaaatggagggaacttgcactgctttacggcgctgaccccttgtgccgtgctggatgtgatgggccctccctacaaccgtgctcaaggaagggattgcgcgtattacagcgaatcgccctactcgtgtgctggagatgcacaatattcttggctcaaagaggttcacagcacatttgagatggaaggcataaagatggagcccaacttcatcgtctaataattaagcaggcatggcatggcatgtcatcgtaatgctgctagtttcatgtagataatctctagctgcgggggtgtagtacaactggaagacggccagatgctcttttgacattcgtttgccttaatttcatatgcctccctttatgtatgttaacaattcgaatcttgggtcatggtcactttttttctgttttccctgtagacagcaggtgctactttttgaagtgatcatggaccaaattctgtgggtcgtttggttggtttttgttgagcagcagaacagtcttcaactttctgcctgccatcgtgtttcagtttcagggcccatgccttgtgttttctctttgaatgaacaaagaactgtctctagcatagttataaatggatatggtccaggcttccaaatcaggagctgtgaggtgatggggacggacgtagttgtgtagtacgggggtcaggtcaggtccggccggacgatgttcttcgttgcagcgtactctctgttggctgcaccgcattagcgcaatgattcggtctgatttgtcatactttttaacctacaaatgttatgcattagcaatggttttagataaaaaaatattaacaaataaaaaaaattagagaaatctcc

SEQ ID NO: 11894 - DNA, 1401 bp, Zea Mays
tttttcattcatacggagggggtccacactgcgagcatttaagcccattcgcgtcccgtcccgtcaaacaagcactcaaacctccctcccaagccctcttttttccctcgccgcggcgcaggcagagcagaggcactagcatgtcgccgttcgccgcccgcgtggcctccttggccgcgctgctgctcgccctcctgctcgcggcgccggcctcggccgccaacttcacctgcgccacagtgggcaaaacgtgccagtcggcgatcgggtacgcggtgcccaacgcgaccacgtacggggagctggtggcgcggttcaacgccaccacgacgctggcggagctgctgggcgccaacggcctccccgccacgacgccggcctcgacgccgctggcggccaaggccacggtgcgcgtgccgttccggtgccggtgcgggagcaacggcgtggggcagtcggacgggggacccttctacgtggtgtacccgctggacgggctggaccacatcgcgcgggaggtgttcggcggcttcgtcacctaccaggagatcgccaccgccaacaacatcaccaacgtcaacctcatcgtcgtcgggcagaagctcaggatcccgctgccctgcacctgcgaccaggtggacggcgccgacgtcatgcacttcgcctacagcgtcgccaagggggacgacccgcccggcatcgccgccaggttcggggtcaccgagaccacgctgctgagtgtgaataagatcaccgaccccaagaccagcctgcagcaggggcagatcctggatgtccccctccctgtgtgcaagtcatcggtcggcaacgcctcggctgactacaacctgctcgtcccgaacggcacctacgtgctcaccgccgacgactgcatccagtgcagctgcagcgcgagcaactacgagcatctagactgcactccggtgaaaggcggaaggtgcccggcggtgccgccgtgcagtggaggcctgacgctcgggcaggtcaacggcaccggttgcgcgtccaggatgtgcgcttacagcggttataccaacaccacgtccctcaccatacataccagccttgtgcctgcaaatgagactgcgtgccagaacggaggagctgcgagagcggagtttgccgggtccgtgttgaggacgtctctcatcgccttcctcatgtcgctgatcctcatctgcttgctatagacgttagaacagtagatggtgtattatatgccactgtgagatactcagattgctgttgtggtctattcattggcgattggtctagctgtttgaataaagcaaacattaaagtttgcatctgtgagtgaatacgtatttattagaattgggatgatccaataaagcattccatgaatggccaaaaaaacaa

SEQ ID NO: 11895 - DNA, 970 bp, Zea Mays
cagattggtagcacatccatttgatctcactccatgccggagtctgatgaagaaagaaatttgaaagaagaaatcaacctcctgaaggtggatcttaaagaaatcgagggaaagatgagtaatggttctgagcagacatcggtagatgcaaaagatttgtctgagaagatatctatgttggaaagccagcttgagcagctttcaagggagttggatgacaagattcgatttgggcaaaggccacgttctggtgcaggcagggttacaacacttgcacccactagtttaggggaggaaccacaggctacagtggtggacagaccacgttctcgtggtggtatggaaccacccccaaggcaggaagaaagatggggatttcaaggaagccgagaaaggggctcgtttggtggaagcagaaattcagacaggccaatggcaagacagagatggtgaagttgggacaacaagcatctcttagggacacttctggatcgcagtcccttttttgttctgaaaggatgggcaaaaataagtcgttttctgtttgtcgtgtttgtttggtcttagaagattgttgagggtggagataactccacatgaagctattggttgtcaagtctgtatgccgtaggatgctttacatttccctttttgccgtcttccatgtcaaaacaatatctggcaacctccgatactaactgttattcatgggtcactgaattccggatcagcttttgtcataggtcgtttatttcagcattgagtaatggaaaccttgaatttgcacttttactactgccatgccttcattctgtccgttttttttaactagtgtctgtatgttgaggcaacgagctgtgactcccagtcgtctgtattagtttcagactgcgggaatgctttatcacgggtttatatgtgggagattggctggtggctgataagttacccacatgtagagcaaggggcg

SEQ ID NO: 11896 - DNA, 4693 bp, Zea Mays
  misc_feature (1)..(2): n is a, c, g, or t
nnatatggctgataatggtgatgccaaagggggatctggcgcctatgcaattaatatagagaattttagtaagcggctgaaggtattctatgaccattggaaggagcacaagtctgatctttggggctcgtctgatgctattgcaattgctaccccacctccttctgatgatctccgttatttgaaatcatcagccctggatatttggttacttggatatgaatttccagaaacaataattgttttcatgcacaagcaaatacatgttttaagcagtcagaagaaaggaaatcttattgggaccctcaagaaggctgcaaacgaggctgttggtgttgacattgtgttgcatgtgaaaaccaagaatagtgatggtgctgacttgatggatgacatagtgcatgctgctcgtaatcaatcaaaatcagataagccagttgttggacacatagccaaagaggcacctgagggtaagcttcttgaaacatggataaaaaaattatctggatcaggcctacgactcgttgatgtaacaaacggcttctctgagctctttgctgtgaaggacaccacagagatcacatgtgtgaagaaggctgcttacttaacttcatccgttctgaaaaattttgtgattcctaagttggagaaggttatcgatgaggagaaggaagtctcacactcatcgttgatggatgacgcagagaaggctattctggacccactaaaggtcaaggtgaaattgaagcctgataatgttgatatatgctaccctccagtctttcaaagtgggggtaagtttgatctaaagcctggtgcgtctagcaatgacgagtacctgtattatgattcagcaagtattatcatctgtgcaattggttccaaatacagtagctattgctcaaatgttgctcggacatatcttatcgacgctacccctacacagaataaagcatatgagacccttaggaaagctcatgaagctgctattcaacaagtgaaaccaggcaatcagatgagtgcagtttatcaagctgcagtggctgtgattgagagggatgcacctgaacttcttcctaatctaacaaagtcagctggaactggaataggccttgaattccgagaatctggcttaaatctgaatgccaagaatgatcgtaggataaaaaagggaatggtttttaatgtatcccttggtttgcataacatccaggcagaaacaaccagtgagaagacaaagcagttttcactattattagctgatacagttttagtcaatgaaagaggacatgagatcttaacagcaccctgctccaaggcattcaaagatgttgcttattcgttcaacgaagatgatgatgctgttgctgctgaggttaagataaagtcgaagaccatagatgttatgccaaccaaggcaactctcaggtcagacaaccaggagatgtcgaaggaagagctcaggagacagcaccaggctgaacttgctcgccagaagaatgaagagactgctagaaggcttgctggggttggtactggatctggtgacggacgtggtcctgcgagggcttcaaatgagcttgttgcatataagaatgttaatgatgtaccatttgtaagagatttggtgatccaagtagatcagaagaatgaagctgtcctcttacctatttatggtagtatggttcctttccatgtttctactgtcaagagtgtgacaagtcaccaggacaaccgcacctgcactatccgtatcttcttcaatgtgcctggcatgccattctcaaatgatagcaagtttaattctcaaggtgctatctatctgaaagaaattacattccgctcaaaagatccacggcatagcagtgaagttgttcagcagatcaaaacattgaggaggcaagtggcatcaagggagtcagagagagctgaaagggcaactcttgttacccaggagaaacttcagattggaagcaacagaatgaagatgatgaggctttctgatgtgtggatacgacctgcatttggtggtcgtgggaggaagctcacaggaaatcttgaggctcatttcaatggtttcagatattctacttcaaggtctgatgagcgtgtggacatcatgtttggaaatataaagcatgcctttttccagcctgcagagaaagaaatgattactctccttcacttccatttgcacaaccatatcatggttggaaacaagaagacaaaggatgttcagttctatgttgaagttatggatgttgtacagacgcttgggggcagtagaagatcggcacttgatcctgatgagattgaagaagagcagcgtgagagggataggaagaacagaataaacatggatttccagaactttgtgaacaaggttaacgaccactggtcgcaaccacagttcaaggggcttgacctggagtttgatgtcccccttagagagcttgggttccatggtgtcccatataaagcttctgctttcattattccaacttctacatgtttggttgagctgattgagacccccttccttgtggtgagcctgagcgagatagagattgttaacctggagagggtgggctttgggacaaagaacttcgacatggctatcgtgttcaaggatttcaagaaagacgttctccgcattgactccatcccttcagcatcgcttgacgcgataaaggaatggctggacacaactgacctcaagtactatgagagcaggctgaatctgaactggcgccctatcctgaaaactataatcgatgatcctcagaagttcattgacgatggcggctgggagttcctgaacatggaggcgagtgactcagagactgaggacacagaggaatcagaccaaggctatgtgccttcagacgctgagcccgaatccgagtcagaagatgatgactctgacagtgagtccttggtggaatctgatgatgacgatgaggagtcagacgaggactcagaggaggagaagggcaagacctgggaggagctggagcgtgaggcaagcaacgcggaccgtgagcacggtgcggagtcggacagcgaggaggagaggaggcgccgcaaggcaaagaccttcggcaagtcgcgtgcgccggagcgcagcagcttcaagggagcgccgccctccaagaagccaaagttcaggtgaatgctgccttcggcaattcgctcgtgccaaagtgcagcagcttcaagggagcaccacctccaagaaggcagctctggttaatgggactccttgaagctttggcccccggagtagacgtgtctgtaggagtgtggtttgttatatctagattatctgcagtagcttagtccatctaaatgaaatgtgacagctgaactttggaagtcgcatcattggggaaacgaaatttaagtcgattgatttgttaatgccctcgttgatgtaatatttcccttgttcggtggatttccggtctgtataatatttatgcacgcttgcactttatccatggtatttgtatacccgtataaggcagcatggaggatgtttcttgcatgtggacgcattgattgatatatatatatatttaaggttcttttttttttctttttgttgcatctggttgtcgttgtaacagtgtacagccgcaatttgtttgccactaagggtctgtttactgattaacttgtctcattttacctaacttttctatctaagattagttcttcgatccgaaaaagtaactttatataatatgtggcgtaattaactcactttgcctaacttttcaatctaagattagtttttcgatccgaatgagtaactttatgcaagatatggcgtaattagccatcaaccaaacagtccgtaaaagacttgttcctcgaatgttttggtgatggcatctgcctatgatttgaagcccgctccgctgcgtttacagctgggtgtgagtttcctggccgcatgaagcatgaaaagatgggattcacagcggaactttcgttaggaatttgatggcaatcaagtttagttaaatttaattttcaaggctaggattctatgtgcacagccctgatatgcaccggatatcatcccgaatttatattgttatacatatacgaaaagcagtgaactctgctctgcaatcgtctgcatcgtcgtccttgctctctgttgcggcgacacgcacaggccagagcccgtcgggatggaaggcggcggctccggtgggcgggccgctgccgtcgtccccgcgcgtatgaccaccttgtcccggcactacttcggcggcagcgcgtctgagcgccaccacgacctccgcgtggacatcgtcgagtcgttgcagcgtctttgaaacatctggcgcgtcaaggcggaagttgccatgctgctgcctgatggaacgccgaggaagtgcttgatagattgccgccaaggcgtttgctacgtcgtggtgcggtgctacatgaagcacgagccagtggtttggattttcgccctcatggctctgctgctgtgctcttgtttcctgattttcttttggttgggtttacattctacatagcacagaacatccaggaggactacggcatgtttgtctggccatgcagtgtcatccttgccgagtatgtgtggcagcacagatcacggttctctgcttccagagttgttgaggagtgcttgctcgtgtgtcctaag

SEQ ID NO: 11897 - DNA, 476 bp, Zea Mays
acgtgatgtgctcaataaatctccgcattgttgtagagctcggagccacgaatgatgaatggtggcttttggtgctgggtatctgtaccatcctgtgcctggggaccctagtagatgaacgtgctttctgttaggttttgttcgtggatagcctaatcttcattcggcaatcattatgagttgtgcctgtcaccatgatttatatggcatcagtagtagggtgttacttgagggacacacgtttagttctaactttgtagtaaggcttagtatctggtgaacgatcatgattgaacagttaacggttcgcctctgcggctccagacttgcagcttccagcagctattgaccttatgcttttgatggcgacgcactacgtttcccgtttcccttcgtgcttctgttatccggcagctgttgtacaactagctcttggcaaggtcttgcagatggaattgggatcatataggccaagg

SEQ ID NO: 11898 - DNA, 1318 bp, Zea Mays
gcgccgtcccctgccgtcattcagtgtttggaggagttaaccaggcgagaactagaactggctgccgcgtcggcatcacgcggaagaactttggccgtgtcatgatggcccttgcagtggatgtttctcgttttgaaggagtgccaatggctcctccagacccaattcttggggtttctgaggcctttaaagcagataaaagcgagctgaagctcaatcttggtgttggtgcctataggacagaagagctgcagccctacgtgctcaatgtagtcaagaaggctgaaaatcttatgttggagaaaggagaaaacaaagaggttgctacacttcagtctctctcgggcactggatcactgcgtctcgctgcagcattcatacaaagatactttcctgaagctaaagtgctgatatcgtcgcctacctggggtaaccacaagaatatcttcaatgatgctagggtaccttggtcagagtaccggtattatgaccccaagactgttgggttggattttgagggaatgatagctgacattgaggctgctcctgaaggttcttttgttctgctacatggttgtgctcacaacccaactggaatagacccaactcctgaacagtgggagaaaattgcagatgtcattcaagagaaaaagcatatgccattctttgatgttgcatatcagggttttgccagtggaagccttgatgaagatgcattttctgtcaggctttttgttaagcgtggcatggaagtgtttgttgcacaatcttacagcaagaaccttggtttatattctgaaagggttggtgcaataaatgtcgtgtgctcagcaccagaagttgcagatagggtaaagagccagctgaaacgattggcacgtcccatgtactcgaacccccctattcacggtgccaagatagttgccaacgttgttggtgatccaaccatgtttggtgaatggaaacaagagatggagctaatggctggacggatcaagaatgtaagacagaagctctacgacagtttgtctgccaaggacaagagcggcaaggactggtctttcattctgaggcagattggcatgttctcctacaccggcttgaacaaagcgcagagtgacaacatgacggataaatggcatatttacatgaccaaggatgggcggatctcgttagctgggctgtccctggctaagtgtgattatcttgccgacgccatcatcgattccttccataatgtgaactaggctgaggcacaggcgcagtgcttgcacgtggctggaggctgtagcaggaggatatccttcaagccttcagg

SEQ ID NO: 11899 - DNA, 709 bp, Zea Mays
accctttctttattctcttcactcaaaagcggctaggcgacggggcttgccctttccccgccccaagggtacacggtcgccgccacctgccctaggccgcaggagggagcgttcgccgccccgccctccgtctcccgtcgcctcgccccgcgctccgtctgccgcccctctccggagaaatgtctgagcatctctttgaggacaccttcgtcgtcactagactcgaccctgatggcaaaaagtttgatagagtttctcgtgttgaagctcgcagtgagcagttagatatgtatatgcagctagatgttgccacagatgtttatcctatgcatgctggcgagaaatttaacatggttatagcgcctactctgaatttggatggcaccccagatactggctactatactcaggctggcagaaaaactctggcagacaattatgagtacgtcatgcaagggaagctttacaaaatctcagaagacacatcatccagccaaaacgctaaagtggagatgtatgcatcgttcggcgggcttcttatgctgctcaggggtgacccttccactgccgctagctttgagcttgatcagaggctctttctgctcatccgcaaggtgtaaaactgtggttgctgaccacttaggtgtttgccttgctcgccacttatttaatttccatccgtgggtgaagctgttatatactgttaaac

SEQ ID NO: 11900 - DNA, 2121 bp, Zea Mays
cctcttgtcggtaggtgtccctccctttactccctccgccctcccacagtcccactgcccttctcctcggtccatcgcaagctcctgcggtcctgcctacggccgtacggcggcatccacccttctgccgcatcgtctttctcaagacgctgccccaggtccatcgcgcctagggttcgccgagtccggcggcgctaagataatgagtgggcaccgaaacagtcatggaaagcgctactctgattatactgaaactggaggcggtaagagaagaaatcctggtgatgatacctatgcccctggtcctgatgacactgtgtatcgctacctctgcgcctctagaaaaattgggagtatcattggcaggggtggagaaattgcaaagcagttgaggactgagacccaagctaagatcaggattggtgagagtgtccctggatgtgaagagcgagttattaccatatttagctcaagtcgaagaactaataccatcgatgatgctgaagataaggtttgccctgctcaggatgccctctttagagttcatgagaggcttgccactgatgagagttttggtaacgaagacagcgaagaaatttcacctcaagttactgttcgcctgcttgtgccatcagaccagattggatgcattcttggaaaaggtgggcacatcatccaaggaatccgcagtgagactggtgcgcaaatacgcgtgcttagtaaggatcatatccctgcatgtgccattagtggcgatgaacttctccagatatctggggacatggtagttgtcaaaaaggctctttgtcaagtgtcatctcgcctccataacaacccatccaagtcacagcatcttcttgcatccagcttgacccaaccgtatccagggggtacccaccttggtggttcctctgctgcacctgttgtagggatcactccagtaattcctccttatggaggctacaaaggtgacgtggcaggagattggccctctttataccaaccccgacgggatgagagctctgcaaaggagtttagcttgcgtttactttgtgctgctgcaaatgtggggggtgtaattgggaagggtggtggaattatcaaacagattaggcaggaatctggggctttaattaaagtggctagctccaattcggatcctgacgatgactgcataattacagtttctgcgaaagagttctttgaagatcctgtatctccaacgattgatgctgcagttcgtttgcagcttagatgcagcgagaaaagtgattcagaattggctgagcagtcatatactacacgcttgctggtgtcaacatcacgtattgggtgcctaattggcaaaggtggctcaatcattactgagatacgaagaacatccagagccaatatacgcattctttcaaaagaaaatgtcccaaaggtagcagcagaagatgaagagatggttcagataagtggaggccttgatgttgcaaggcatgctcttgtgcaaatagctacaaggctgaaagccaatttttttgaaagagagggctcgttatctgcatttccatctgtgatcccttaccatcctttgcctgctggtgtttcggtttcggatgaaccaaaatatctaagcagagacactaagcctgttggacattacctatattcaagtgcttttcgtacatcggatgacatgattccttctgacagctatgcaagttatggtggctcccaggcacctggaggaggatatgcggcttacagcggatacagtgcccgctcctctagtagtgggttatctggtcatagttctcttcactatggaaagcatcatggttattaggatttagattgcttgataaagcaggtgttgtttatgaaagagtgaattagcctctggactctggagttgcacaacattgttaacgcagaagtgttattagtggaatgactctactatttgtttgtttatttgatgttttgttaaggtgtttcatgtaaatgctaactgtatcaggttttaattagaagattaattttagattatgtaagtttcataagatttgattctgagatattgtggacatgtactctaccgcaatacatggagcagttctttgtggcgttgac

SEQ ID NO: 11901 - DNA, 1798 bp, Zea Mays
ttgctgtttttgtcatgctcgtttcggctctgggattcggataggtggtctggtatggtgtaaattgatccagcgtaacgagcaaaagctaccggcaacactttgaggaatggctgaagaggatgtccagccccttgtgtgtgacaatggcactggaatggtcaaggcgggtttcgctggtgacgacgcaccgagagctgtctttcctagcattgtaggcaggccacgccacactggtgtgatggtgggcatgggccaaaaggatgcatatgtgggcgatgaagctcagtccaaaagaggtattctgacactgaagtacccaattgagcacggcattgtcggcaactgggatgacatggagaagatctggcaccacaccttctacaatgagcttcgtgtggcacctgaggagcaccctatactgctgaccgaggctcctctgaaccccaaggcaaacaggggagaagatgacccagattatgttcgagacattcaactgcccagcaatgtatgtggccatccaggccgtttctttccctgtacgccagtggtcgaacaacgggtattgtgctcgactctggtgatggtgtgagccacaccgtccctatctacgaagggtacacgcttcctcatgctattcttcgattggaccttgctggtcgtgaccttaccgacaacctgatgaagatccttactgagaggggttactccttcactacgactgccgagcgagaaattgtcagggacatcaaggaaaaacttgcctacgttgcccttgattatgaacaggagctggagactgccaggaccagctctagtgttgagaagagctacgagctgcccgatggccaggttatcacaatcggtgcagaaaggtttaggtgccctgaggttctattccagccatccttcattggcatggaatctgctggcatccatgaagccacgtacaactccatcatgaagtgcgacgtcgatatcagaaaggatctgtacggtaatgttgtcctcagtggtggctccactatgttccctggtattggtgaccgcatgagcaaggagattactgcacttgcccccagcagcatgaaggtgaaggtggttgctccgccggagaggaagtacagtgtttggattggtggttccattctggcctccctcagtacctttcagcagatgtggatctccaaggaagagtatgacgaatctggtccgggcatagtccacatgaaatgcttctgaatttctggagcagtatatctgttgcttgcattttcagttagttgggatgcaagtttgtcccgtggtctcgctagcattcttcgttctttctggatattgaagagctgttggccatggagcattgtgcaaggtggtaaagtcgattgatggtactacatgaagaaacatgtgcagtacttcagcagtatagatcgtcaggtcagtttagtttttttttcaacaacagtgccatattaggatgttcctgatgtgcgcagttggtctgggtttttacacaacgcaagggtgtcggctgtcgcccgtgcagtttgcgtctttgtgagatctgggtccgtttctgcactccagtacgtggaacaggtttcgcatttggtggccagtgccccagcgtggcgtgagtgttgatgatttgaacttggagctgtttgttctattcctttcatgaaacagatattatcgtttgtacagggataaataataaattgtttatccttcaaatgttttagatactgttggaacaaacttcgtttaattataatctcttggatttaattcg

SEQ ID NO: 11902 - DNA, 368 bp, Zea Mays
cacctgtgtactatgttaatacttggcagaaacaataagttgatgctggagctccagaattgtatctgtttatagaatgatggagattttgattcagtaatctggagtctagccatccgagatcctcaataatctgtacctggaaaccaaacagtgccaagtaacttttacggagcgttatgtgcagctcgtgtagaaaattcaattgaaccgtatttcctgtcgtgtaccttccagtaccgtattatattatatatttattattcaattggacctgcactcagaagttgcagtctgggacgtatttgcttttgcattttataacccgattgctgtttcgaatatttcgtgtatgatcttgggaatgc

SEQ ID NO: 11903 - DNA, 285 bp, Zea Mays
ggggggatacctgaaaagcaaaatcatcgttttgagcgaactcgattgacccattctcaccagtgtgttcattggtttgatcctctctttgatgaaatcggtaacttaatctgccccgtaagatatcttgatcattctctcggctttcatcaccagatactgatgtctcatagtccaactccatttcatcatcataatctgaatcttctcgcccctcctctgatgaaccaccaacatcaggtctaaataatatctcactcaatgagcgtaattttccatgtgtat

SEQ ID NO: 11904 - DNA, 1028 bp, Zea Mays
catgctatttcatttaaaatgagttagatcttctgaaagatacaaaagtgtctctttctgcaaaccatctgcagaaactgtgtttatcttttcaactaaccacaccgcttgggcacacatttaaacctcaccaggtgttcttgaaattgaggcatgagagtaaggttgaacacttattcgtggtacctggctctgcaaggcagttcaaaattgttcttgacttcctaggtttggtggagaaattttactacctttctggaagatatgaccttgagcttaccgttggtgatgctgtaatggaaaattcatttctacgacctcttggccatttggagttggacctgccagatgccccagaaaaagccccacgtcctcctgcacaagctgttgacccattctcaaaatttgggccaaaggcagagatatcacatatattccgcgcaccagagaagaggccacccaaggagctctcgctagcgttcacgggtctcacgcttctgccgtttattggattcttgatagggctcgttcgtcttggagtgaacttgaagaacttcccgtccttgccaggaccggccgcatttgcctcacttttccatgctgggataggagcagtcctgatgctctacgttctcttctggatcaagttggaccttttcacaactctcaagtacctcggcttcctcggcatcttccttgtgtttgtgggccatagggctctatcctacctttcctcggtgtcgacaaaacagaagacggcatgagtggacagagttttttccgaccatccatttcttgagggggggccattgcaggcccttgggtgtcttatgagggagggctcggtttatttcagttggctttgcagaatactgataactagaaaaagtagtaggacctcaccttcgtgtattatgatgatgcacatacaattttctgagtagaatggatgttgaatcatagaactaatgaataatatgaacactcgccttcgccccaagtgctagtttggaaacttaggatgtgtt

SEQ ID NO: 11905 - DNA, 910 bp, Zea Mays
tcccctcgctttcgcttcgccggcactccatccgtccatcgtggcccaggctgtcgttccgttctataaagggcgtcgagaggaaaccggtggaaccctacactgagaaccgcagagacaggcgtcttcgtactcgcctatctccgcgactcaaagctttccccaattcccccccttctcccatttctcaccaccgccgccgctccccccgttcaacaacaccatgagggagtgcatctcgatccacatcggccaggctggtatccaggtcggaaacgcgtgctgggagctgtactgcctcgagcatggcattcaggctgatggccagatgcccggtgacaagaccattgggggaggtgatgctgagtttgacgagggtgaggacggcgacgagggtgacgagtactagacgctctactggcgcggcgtcgtcgggcttgtgtgccactgctatcctgtgatctgccctgagtggctcctatcgtgttatgtttctgtcggttcttatctatctgtcgttgtgtggtttacaacttacgttgtaagactttattcccccgctttgctactgggttattaagtttggcgttattgttttcttgatctctgagatgctttgctttcaccacctgttttttttttgtcatctgtgtaattgagtcgacggacaatcattttcttgcttcgagcaggcgagagcagcacacgagttgcagacagatcttactgtggcaataaaaaaaataaacaataataaatatgtagcgaatattaatcaacacattgattctctagaaggatagtatattatataagtctcgtgagcgtcccaggtaatgatatcatcgaaattaggaaacaaaacgataaaagggggacaacaattgggcacacacttgaacaacatacc

SEQ ID NO: 11906 - DNA, 685 bp, Zea Mays
cgcgtgtcgccagcccatagatcagagcctagccagagccagagctgagagccgaggagggaaacgaagaagcggccatggcgatgaagcggccggcgcgcagcgacccacacctgccacccgaggaggcggcacgggtggaggccgaggttcggagctacttcgacagcgtcgcgccgaggcgcccggccaagccgccgcgcagcgacccgtcggtggacaccttcgcggaacccgccgccgtcgacgccggggaccacgacttgccggagctccgcaagctgcgcgacctcgaggcgaagccccagaagctggtgttggacggagggggaggggacgtggatggcggggaggattacgtggagacgcgatactacgatggcctcataggcatcgacaagcagcatcacacgactgggacaggctttatcaaagtggagagatccaatggcagcaccttcagtgtgatgactaacggctacccacctgccagctctgtccgctgcacgagcaatcctgcgacaaatgattggataccatcttctgaatcgatcatccctgcttcgaacaagcccagcaggagcgactcctgaccagcctttccttgccttgaagtgccgtggattgcttacctgcaaagataataaaatgcactgcttctgtgtggtagtaccgtacgcaccag

SEQ ID NO: 11907 - DNA, 82 bp, Zea Mays
gaacctcccaagtcattaggcccacctacagtagtccttgtccaacggacctcagacaaccctgcaggtgcacctgatcact

SEQ ID NO: 11908 - DNA, 1921 bp, Zea Mays
cggcccaaatagcatgccaaggggcaagcgcccaagctcacccgcgacgtcaagcctgccctaacctcgtgtttcccttgctcggcttcaccccatcgccgccgtcgcaacgtgcccgcctgtttcccttgctcgacttcaccccatcgccgccgccgccgtcgcaagcgacgatgctcgacatcaacttgttccgcaccgacaagggcggcaacccggagcttattcgtgagtcccagcgcagccggttcgcctccgtcgagctcgtcgacgaggtcatcgccctcgacaaggcatggcgcgaaaggcagttcgagctggacaagatccggcaggagctcaacgctaccagcaagaagattggcaagctcaaagccagcaagcaagaagaggaagcgaagaagctcatggagagcacagacgaaattaagaaaaggttggcagccaaagaagttgaggtgcaggaggccaagagcaccctcgacgccaagctcacgacgattgggaacatcgtgcatgagtccgtgccagtcagcgaagacgaggcaaacaataaaattgtacggacatttggagagaagagagtagaggaaaatttgaagaatcacgtggacctttgcaggatgcttgacattgtcgcattggagaagggtgctgatgtggctggtggtaggggtttctatttaaaggatgaaggtgtcctccttaacctggcattgataaattttgggctagcctttctgagaaaacggggatttaaaccaatgcaaactccctttttcatgagaaaggaaactatggcaaaatgtgcccagttggcccagtttgatgaggagctttacaaagttacaggtgatggtgaagacaaatatctcatagctacatcagagcagcctttatgtgcttatcacttaggtgatagaatataccctgctgaacttccaatcaaatatgctgggtactccacatgcttccggaaggaagctggttcgcatggaagggacacagctggtatcttcagagtccaccagtttgaaaaaatcgaacaattctgcattacaagcccaaatgacaacgattcttgggagatgcatgaagagatgctaaaaaactcagaagattactataaggagattgggctaccataccaagttgtttccattgtctctggcgctcttaatgatgctgctgctaagaaatatgatttggaagcatggttccctgcatcaaagaccttccgagagttagtatcctgttcaaactgcactgactttcagtcaaggagacttggaattgggtatggccagaaaaagaatgatgagcagtccaagcagtttgttcatatgctgaactctaccttgactgccactgagaggaccctctgttgtattctggagaatttccaaaaggaggacggcgtcgaggtgccaaaggcactgcaaccttatatgggtggaatagagtttcttcctttcaagcaacctttggatgtcaaacaagcttctgactccaaatcaaacaagtccaaatcaaagggaaatgctgcttgagctggatgaggaacactatgttaatttttgggcctaccagtacacaatacccatagcatgactatggcgttgcaggttttcgttttacccattttggtttcttggttgccacattatctaatgacctacctggcatacttatattgcaatagcatttcttgaaatctggaatatttgaccaccatcagctctaccggctgtgtttatcgcgttgccacagaacgctgcttgtttgtctccgaaaccaccagtgttctctgtagcacattagtaacaatttgctggtggatttgatatcatcttttttgaatgatggtgtattggtgtacttgtgatcgataatgaaaaagacatcttgtgttaaaaaagaa

SEQ ID NO: 11909 - DNA, 76 bp, Zea Mays
tgctgaaaattccttaatatgtaggatctagattaagcatgtagcgtggaagaactgggctgcggcttgccattag

SEQ ID NO: 11910 - DNA, 1463 bp, Zea Mays
cccacccccacccgatcccgatctcaccgtctccaccccgaccccctcccaccagtctccaacagaccaacagcatctaatcaatcaagacagccccgtgctagctcacccgccggggctcgccacgatgagaggcctcctcgcgtgcgccaccctcgcccgccgcgccgccgcctcctccgcgcccgcgcgcgtccgccacctggcgggcgccgcggaggcggcggaggccgagctcaagaggacggcgctctacgacttccacgtcgcccacggcggcaagatggtgccgttcgccggctggagcatgcccatccagtacagggactccatcatggactccaccgtcaactgccgcgccaacggcagcctcttcgacgtcgcccacatgtgcggcctcagcctcaagggccgcggggccatccccttcctcgagtccctcgtcgtcgccgacgtcgccgcgctcagggacggcaccggcaccctcaccgtcttcaccaacgagcagggcggcgccatcgacgactccgtcatcgccaaggtcaccgaccaccacatctacctcgtcgtcaacgccggatgcagggacaaggacctcgcccacatcgaggcgcacatggaggccttcaacaagaagggcggggacgtcaagtggcacatccacgacgaccgatcgctgctcgcattgcagggtcctcttgctgcacctactctgcagttgctgacgaaagaagatttgagcaaaatgtacttcagtgacttcaagatgattgacatcaatggatatgcatgctttctgacgagaactggctacaccggcgaagatggttttgagatctctgttccgtcagagaatgcagtggatcttgcagaggccatcctagagagatcggaaggcaaggtgcggctgaccggcttgggcgcccgtgacagtctccgactggaggcaggcctgtgcctgtacggcaacgacatggagcagcacatcacgccggtggaagccggcctctcatgggcgatcggcaagaggaggagggcagagggcggtttcctgggcgcagacgtgatcctgaagcagctccaggaagggccaaagatcaggcgcgtgggcatggtcacgcaggggccgcccgcgcggagccacagcgagctggtgagcggctcgggggagaggatcggcgaggtgaccagcggagggttcagcccgtgcctgaagaagaacatcgctatgggctacgtgaagtcgggaatgcacaaggctgggacggagttgaaggtggtcgttcgcgggaagtcctacgacgccgtggtcaccaagatgccgttcgtgcccaccaagtactacaagccctcgtagattatattcttgtacagagggacgccttgcgtttctcttttgtcgttgcggcttgttcttggcagattggttaagcattgcaactgtaacttctgtgagattgttg

SEQ ID NO: 11911 - DNA, 617 bp, Zea Mays
aaaatgactaaacgaatgccttcatatctggggtacgctttgattgaatacgagaagtttgaagaagctcaggctgcaataaaagaactggatggagctgagctttataaacaaagaatgagtgttgattgggcatttagcagtggccctgctaaacgcagaaatactcggaaaaggtcaccaccaagagctcgttcaaggaccccacccaggagaaggcactgatgtttccccagcatgtcttgaactacttgctatgtgtgacagagagcaagaagtctggggattccaaatattaccttggtgtatgtggatcacctgatttcgatggtggttattaaattgcctgttgtttccttattgggattccaaatattagctttgaactctggtgtaagttgatgagacatggatgtgcacttagacgcttaccattatgtttggcatgccagttggagacgattgttggaggcgattgtatgggatcatgcttttggatttttgacgagtgatgagttgatgttggatttttatgtttctgtgtacctgtactatggtgtgttacctttcctcattctgtagtcgctcaagaaatgtttttgttgtcgctcaagaaa

SEQ ID NO: 11912 - DNA, 1061 bp, Zea Mays
ccatgaccgaagtacagaaattgccagataatatacccaacaaagccagcacactgatcaatgttgtgatcagaaacgtgactatcctagctccacatgactcccccaacacggatggaattgatccagattccagcagcaacatctgcatcgaggattgctacatttctactggtgacgattccatcgccatcaagagtggctgggatgagtatggaatcgcctatggccgcgccagttctggcatcaccgtgcggcggatcacaggctcctccccgtttgctggcttcgcggtcggaagcgagacatcaggtggcgtggagaacgtccttgcagagcacttgaacttcttcaactcagggtttgggatccatgtcaagaccaacacaggcaggggcggcttcatcaggaacatcactgtctcggatgtgacgctggataacgtccggtacggcctgcggatcgttggcgatgtcggcaatcaccccgacgacagctacaaccggagtgcgctcccgatcgtcgacgcccttacggtaaagaatgtccagggccagaacgtcagggaggctgggctgatcaagggcatccccaactcggccttctcccggatctgcctgtcgaacgtcaagttcactggtggcgcacctgtccggccgtggaagtgcgaggctgtcagcggtggcgctctcgacgtgcagccgtcaccatgcacagaactgacttcaacgtctgggacgagcttctgtacaaattcgctttgatgctttgccagctagctgagctgctgctatgcttctgtatctacgagtatgtatactggtgctttaaagcttgggcacccaagtatttatcttcccgaaaattaatttggttttactaatttatttgaacctctctatacgaagagaataattcttgactcgtataggactgaacaaaaaagtgtcactggttttcttatttacctgactcaatgttttattcacaaagtacttgtttctaagcatgtcctacccacatcctctccttattacatagctcgaacttgaagagctatc

SEQ ID NO: 11913 - DNA, 70 bp, Zea Mays
tgacaggtgaaacgctcttgggaaaggtaagaaaagcacataccgaacttgtcaagtgattcaggggcac

SEQ ID NO: 11914 - DNA, 87 bp, Zea Mays
cttttgtttttctaaagcaaggctaagcatcaaaaatcttttgtaaaataggtgatcaaggaaggtaatcaaattcaaggaaggtaa

SEQ ID NO: 11915 - DNA, 1392 bp, Zea Mays
cttgtagttgtaattcctctcactgaggcagacatgcaagtagaactcgatagaagacgtccgggtcaaagtagaattacaaccccaagaaaggagactgatacatgcaaaattctatcagggacacatgatgggatgactactggtacaccaattcacgtctttgtcccaaacacagatcaaaggggtggtgattacagtgaaatgtctaaggcgtacagaccatcccatgcagatgcaacctatgacttcaagtatggagttagagctgtgcagggaggtggaaggtcatcagccagagaaaccattggcagggtggctgcaggagctcttgcaaagaaaattctaaagctcaaatcaggagtggagatcttggcatttgtttctaaagtgcaccaagtcgtacttccagaagatgcagttgattatgagactgtaaccttggaacatatagagagcaacatcgttagatgtcctgatccagaatatgcagagaagatgattgctgccattgatacggtacgagttagaggagattcaattggtggggtcgtcacatgcattgcaagaaatgttcctcgtggtcttggctctcctgtttttgacaaacttgaagctgaactggcaaaagccatgctttctcttcctgcaagcaaggggtttgagattggcagtgggttcgctggtacggactttactggaagtgagcataatgatgagttctatatggatgaggctggaaatgtgaggacacgaactaatcgctcaggcggtgttcagggagggatatcaaatggtgaaattatttacttcaaagtggcttttaagccaacagcaactatcggaaagaagcaaaatactgtgtcaagggagcatgaggatgttgaacttttggcaagggggcgccatgacccctgtgttgtccctcgagctgttcctatggtggaatccatggctgcgctggtcctgatggaccagctcatggcgcatattgcccagtgtgagatgtttccgctgaaccttgccctacaagagcccattggctctgctagcagtgcatctgaactgtcaccaaacctatcataatgtttgtcgtggaacatgtcccagctttccttctatcgaaattctggtctttgctaagcagtttgcaattcggaacccccataaaccctcgactattgtacctagagataaagtgaacggatatcaagatagaaatgcattaatgtttttgtgatgtgtagtataactgatatttaccccttttctttttttgagagaggacgcatgatgtcgtttgagcaataaagtttaatttgggagagataacagtgtcttcatatgatcagcacttgaacggtctatataaaggaattctgttaagaccac

SEQ ID NO: 11916 - DNA, 1549 bp, Zea Mays
ggagtccaaactccaaaccaaaccggcgcttctcccacgtcttctcgagttcccacgcgcccgcctgctataaatcgcatccctcaatccccactctttatcccctcctcagccatcgcctccctctcccctcaacccagcgcccccctcccgccgccgctagggtttctcctccctccccgcccacccctaaatcatttccgaagcttccagtgcgccgcagccatgagcgacggcaaggactccctcgacctctccgccctcggcgctgccatccccaactcggccgagctcagcgcggaggacaaggctaaccttgtggcgtcgatcaagaacacgctcgagggattggcgtcgcggcataccgacgtgctcgagagcctcgagcccaaggtcaggaagcgcgtcgagaagctcagggagatccagggcgaacacgacgaacttgaggcaaaatttttcgaggagagagctgctctagaagctaagtatcagaagttgtatgaaccactttactcaaagcgttacgaaattgtcaatggtgtggtcgaggttgagggtatcacagtagaaagtgcagctgaaacccctgcggagcaaaagactggagatgagacctctgctgatcaaaaagaagaaaaaggtgtaccagctttctggcttaatgcaatgaagaatcatgaaattctagctgaggagatccaggagagggacgaggaagctctcaagtacctcaagaacatcacgtggtataggatcagcgagccgaagggctttaagcttgaatttcaatttggtacaaatccgttcttcaagaattcagtgcttacaaaaacatatcacatgattgatgaggatgaaccaattttggagaaagccattggtactgaaattgaatggtaccctgggaagtgcttgacacaaaaggtgctaaaaaagaagccacggaagggttcaaagaacactaaacctatcacaaaaactgaagattgtgagagcttcttcaacttcttcagtccacctcaagtccctgatgatgatgaggaaattgatgaggatatagctgaacagttgcagaacgaaatggaacaagattatgatattggatctaccatcagagacaagattatcccacatgctgtctcgtggttcactggagaggctgctcaagatgaggagtttgaagttatggatggtgaggatgacgatgatgaagacaatgatgatgaagacgaagatgacgaggatgatgatgatgatgatgattacgattcaaagaagaccaagggaactgccggaggggaagggcagcagggcgaacgacctgcagagtgcaagcagcagtgagccgacgttccaggggccactcaggaaggaacagacggctcctggtctacagggttgtctccacttctctattgaggcgtctgggtcctacagggttgtctccacttctctattgaggcgtctgggtcctgtaccggcatctactcctttttcctgtacatgtataaatatcagaagcaataaagaataaggtgcctctgga

SEQ ID NO: 11917 - DNA, 1654 bp, Zea Mays
acggagcctacataacccttcccttcctcgcttccctcctccccgcgccgccataccctcgaacccgagaggaaccctaacaccaaaacgcccccggaggcagctaggagagctcgaatcaccagccatgtcggagcacgacctcacggcgctgatggcggcgcagctggaccgccacctggtgttccccctgctggagttcctccaggagcggcagctctactcggagtcggagatcctggaggccaagatccgcctcctcagcggcaccaacatggtcgactacgccatggacatccacaagtccctctacggcaccgacgacgtgcccgaggacatggtgaagcgccgcgccgaggtcgtctccaggctcaggtcgctcgaggaggccgcagccccgctcgtcgccttcctccagaacccgcagctcgtgcaggagttcaggcccgacaaacagtacaacatccacatgctccaggagcgataccagatcggtcctgaccagattgaagctctgtatcagtatgccaaatttcagtttgagtgtggtaactactcaggggctgctgattacctttaccagtatcgtgctttgtgcacaaacagtgagcgaaatgtgagtgccctctggggaaagctggcagcagaaatcctaatgcagaactgggacgtagctttggaggaactcaaccgcttgaaggaaataattgattcaaagctccagaacaggatatggctgatgcattgggctctgttcatcttctttaaccatgaaaatggtagaaatgggatcattgatctgttcttccaggacaggtacttgaatgctatacagacaaatgcacaccatcttattaggtatctagctactgcagttgttgtcaacaaaaggagaaggaatatgcttaaagagttgattaaggtcattcaacaggagcaccatagctacaaggatcccgtaactgaatttctggaatgcttatatgttaactatgattttgatggtgctcaacagaaactcatagagtgtgagcaggttatactgaatgatccattcctgggaaagcgcattgaagagggaaattttgtcagtgttcctttgagagatgagttccttgaaaatgctaggctttttattttcgagacatactgccgtatccatcggtgcatcgatatcagcatgcttgctcagaagttgaacatgagctacgatgaggccgagttgtggatcatgaatttggttagaagctcaaaactggatgccaggatcgattcagtatcaggaactctcatcatgacaaccaatcacgtcaatgtccatgagcagattgttgagagcttgaagggccttaatatgaggacctacatgctcgcaaagaacatcgttgagccagctcagcaggcaactcggtgaggatagcagacttcacagttttgagacgccaaggactagtttagagacaactgtaaacttttcgagctctattgtgtggcattggatttcaacacctggaaggtggcttgccgtttgatacagcttggagtattatgctgacattttcaatattttgtaatcggaacttcgtaacagtggatccttctcaatgtattgctattattttatgctgacattttcaacatctttctctattag

SEQ ID NO: 11918 - DNA, 688 bp, Zea Mays
aagaagaaagagaataggggaaaggtccccataatacaaaacaattcctgaaagaataccgggaataggcgtccatgttgatactgttgtcatgaatcctccctttggtacacgaaggaatggagcagacatggagttcctctctatggccttgcaggttgcttctcaagctgtctattctctacacaagacttccactagagaacatatcaagaaggcagccttgcgtggcttcaatgccatcagtgcggaggttctatgcgagctgcgttacaatctaccgcggacgtacaagttgcacaagaaaaaagagatcgacattgcagtcgatctgtggcgctttgttcctaacgcccaacgccgcagctagcgcgctcgctatgggccgaggggcacaggtgatggaatggaactgaacatgaatggaaaatgatcaaatggatatgtgtctcaaaaggctggacttgatcgaagagatcccaagcgtcacgcttgctgtgcttatcgtcttcttggtgccagtaagggtagctcagaatttgacgaactgtgtagagttttgtgggcacagatgatgctcccagtagtgtgcacaatgaatgctttgtatgtattgtgctctattgcctgtgctaacgctacagaataatatttacaattaatttggtgatcagtcagtggcgccgca

SEQ ID NO: 11919 - DNA, 90 bp, Zea Mays
ggccgcacctcaccgtcggaagttgtgccacccatcgttgttacctcgtattttcccaactcctcatcaaagcattgtacctcatgtcta

SEQ ID NO: 11920 - DNA, 2672 bp, Zea Mays
aagccctctgctctgatcgtcaagacacaaatttgacagagtatatagagcacatcacgtctgtgtcactgtgtatagagatatggacccagtccctcctgtactcgtatggaacagacaacccagtcagcccgtttctgattcttctgtcctcaacatcctgcgagcgcccccgtcccgccgcttccagaacctcatacaaccttcgagatgcgatgctccagccacagcttcacgttcacgggctccccactagcgagccatataaaatcctcctctcccttatctcttcctcaacctcacgccatttcccagcctgaacagcccccaaaaccaaacgaaaatcccatcgcccacacactccaatccacccttgttcattcctctcccttcctacttggtcagtcgacctctcaccgcaccgccgtcggcccatggcgaccacgaccttccccacctcgaccccattcttcgcggcccaccacggtccccgccggagccgaccctccatctccgccgcggtctacgcccgcggccgccgatggcgcccgctgcgggtggcgtgcgagaaggtggtaggcatcgacctgggcaccaccaactccgcggtggccgctatggagggcggcaagcccacgattgttaccaacgcagagggggcgcggaccacgccctcggtggtggcgtacaccaagtccggcgaccgcctcgttggccagatcgccaagcgccaggccgtggtcaacccggagaacaccttcttctccgtcaagcgcttcatcggccgcaagatgaacgaggtcgacgaggagtccaagcaggtctcgtatctcgtcatcagggacgacaacggcaacgtcaagctcgattgcccggcgattggcaagcagttcgcagctgaggagatctccgcacaggtgctgagaaagctggtggatgatgcatcaaagtttttgaatgacaaggtcacaaaggcagtgatcacagtccctgcttacttcaacgattcacaaaggacagcaaccaaagatgctggccgcattgctgggctggaggttctgcgtattataaatgagcctaccgccgcatcactagcatatggttttgagaaaaagaacaatgaaacaattctggtttttgacctcggaggtggcaccttcgatgtttcagttcttgaagtcggtgatggtgttttcgaggtgctgtctacatcaggtgacactcaccttggtggtgatgactttgacaagagaattgtagattggctcgctgggaacttcaagaatgatgagggtattgatttgctaaaagataagcaagcactgcagcgattgacagaagcagctgagaaggcaaagatggaactgtcatctttgacccaaacaaacatgagcttgccttttattacagctactgcagatggtcccaagcatattgagactactcttaccagggctaaatttgaagagctatgctcagatctccttgacaggctgaggacccctgtggacaatgcccttagagatgcaaagttgcaattcaaagatattgatgaggttattcttgttggtggctcaactagaataccagctgttcaggagcttgtcaagaaaatgacaggaaaggaccccaatgtgacagtcaaccctgatgaggttgttgcacttggagcagctgtgcaggctggagttctgtctggtgatgttagcgacattgtacttcttgatgtgacccccttgtccctaggtttggagacactgggtggtgtcatgaccaagattatcccacggaatacaaccttgcctacctcaaagtcggaagttttctcaacagcagctgatggccagactagtgtggagatcaatgttctccaaggagaaagagagtttgtgagagacaacaagtctattggtagcttccggcttgatggaatccctcctgccccacgtggtgtaccacagatcgaagtcaagtttgatattgatgctaacggtatcctctctgtcagtgctgtggacaagggtacagggaagaagcaggatatcacaattactggtgctagcactctgccaaaggacgaggtggagaggatggttggcgaagctgagaagtttgcaaaggaggacaaggagaagcgagacgccattgacaccaagaaccaagccgagtcggtcatctaccagaccgagaagcaactgaaggaactaggggacaaggtcccaggtgacgtcaaggggaaagtcgagtcgaagctgcaagagctcaaggatgctgttgctggtggctccacgcagacgatgaaggacgccatgagtgcgttgaaccaggaagtcatgcagatcgggcaggccctctacagccagcagggtgccccaggcgcaggacctggtgcagctgatgcttcttctgctggttcagcgggcacttctgagaagccaggtgacggaggcgatgtgattgacgcagattttactgacagcaaatgagggggcatgctaggtattagatggaggcggttttgccgcgagggagataatttgtttccacaagattgtctaggatgtggatgttctactttttggtagattggcacctaactgtggaatgaatatacataggtccttttcttctgctatcaagagcattcgacgtttgacctggcaaaaaaaaaa

SEQ ID NO: 11921 - DNA, 64 bp, Zea Mays
aatcgaccaacaccctttgtgggttctatgttagcgcgcagtttggcaccgtaacccggcttcc

SEQ ID NO: 11922 - DNA, 133 bp, Zea Mays
gcttaccagcatcaaacgtgactcaatacttatgagaatgttgataaattctggttcgggcttgtggtcgaacatctgacaggtgttgagatcttccgcccccatgacccggatggggctgatcacgaggggg

SEQ ID NO: 11923 - DNA, 901 bp, Zea Mays
ccgcagcccacagacccacacaagtcacaaggcagccacagccatataagcatccttcttctaaaacaattaagatggtgctatggaacataaaaacaagacacacaaagggaggaataccacaatacagggactaggtgtccctaggaccacccttctttgcagcctcagctgcagccttctctgcctctatctcagcaacatattcatcaatctcagcctcctcaagttcccggagaccatccttctttgtcatcactgcaacctcgatgttcttcccaccactttcaacaacctatcaaagtgcacgaatagcaagcttgatggtctccttgccggaggtctccttgtagttcttctccagaaactcacgcatagagttggagttccttcccgtggcgttcgccttccaagcagagaaggtaccagaaggatcggtctggtacagcgctggcttgtcggtgtaggggtcgaagccgacaatgagtgtggagaggccgaaagggcggactccaccactctgtgtatacttctgctgcagcccagcgatgtagcgggtgatgtactcgacggtgacggggtcctcgacggtgagtcggtggctctggcactcgacccgcgcgcggttgatgagcacgcgtgcgtccgccttcagccccgcgcatgccagagcgatgtggccgtcgggggagaagacggtgatcgcgcggtcgtagcgggccatcgtgctggcgtcgccggcggttagggtttgagcttgcttcctggccggtggtggtggccgtacctttgcttgtttgctgaattttttctgggccttgtcttgttcaggggcgtttgggaaaaaggggtgcagtctgtttctacttgggcttcgtgtttgtgtccgtcttgcctgcag

SEQ ID NO: 11924 - DNA, 904 bp, Zea Mays
gctccctttgcttcctccaccaccaccttttgtcggcgacgtaggcaaaacaagataaacatcaaccccaaccccaacgactccaactccaagtcaaagagagcagcaagagcacgtgccggccgccgatcaaatccaccgagcaatcgcgcgcggccgccgaggtgccaaggcggcggcggtcggtcggtctgcgatatacgatggcggcgccttactacggaggtcctccggcggcgccggcccccgtggcggtggtgtccccgcagttctgtgcgccgtacgtggtgcccctgacggtgaccaagaaggccatcagcctctccgacggcgacttcaccgtcaccgacgccaacggcgccaccgtgctgcaggtcaagggcgccgtcttcagtatccgccaccgccgcgtcctcctcgacgccgccggccagcccatcctcaccatgctggagaaggtattcagcatgcacaacagatgggaggtgttcagaggggacagctcgaacgagagcgacctgctcttcaccgcgaagaaatcctcgatattccagctgaagacggagatggacatcttcctggcctccaacaccgcgcagcaggtgtgcgacttcaagatcaagggcagctacttcgagaggtcgtgcgccttctacctcggcaactccagcagcatgatcgcccagatgaaccgccagtttaccgtcaccaatgtgctgcttggaagggacacgtttggcgtcactgtgttcccgcacgttgactacgtgttcgtcgctgctcttgttgtgatactggatgagattcatagggaacggtccgactgaggaacataccacaccacaccaccaagcttctccaccgttgctcgaccatgctatgctatgtatcatcatcacaggtg

SEQ ID NO: 11925 - DNA, 790 bp, Zea Mays
ggaccttttcctgttgagtttttttctcgaacactgttaaggccctcgaagatttttataccgcaatacctttggccgtttaaagactgagaaggatttactgaatgatgccgagcaaagtatgatggagtaccaaacatctattcagaacttgaagaaagaatcaaaatacactcttgacaaagtagctatcggtgaaagcgatgtgcagcgtgggcgaactgatctgagatctactgggaagcagatacaatctcttataggttccatttacaaagcagaatctacagctgcaggtctgatggatagactaagaaccattccaaccaggcaatctctcgagctgcgagcagaggtggcttccatggcctccgatttgaagaaccagaggtgtgccttgcaggaaaggatcaacaaaatatctgaatatggtgtccgtgtctgaactgctgcaccgtctgtacatttcccctcatagagcctcttttggtcctcccgtacaataaactgtgaatccaccgtgaggtgcgcgttttggttagacaggttccgattctaaccatattttctgtcagcattttgaatgctaggacagacatggtaactcatcacaaccataaattgttcctatcactttaacgttgagcattgctcgtttctgggaagcagatgggctgatggctactatcttatatatgcgattgcaaggaaaaactttgttccaccttgggtgctgtgcttcctgtatacaattctgctattccgtttcggaagaaaaaaaaaacaaata

SEQ ID NO: 11926 - DNA, 1190 bp, Zea Mays
aaaatgcgtgcacgatatatgtcgagggttcagaggtgggggatgacagaaacggggagataaagcccgaggaagctcaggaaatttggaaggtaatgctggagcagttcaaggctgaggccctgcggatgcaggccctgtcaatgcaggcttatgatgtctactccgagaggacgagggaggtcttgctggaagcatcagagaagctgaagatacaggcagacaaagcacagaaggacctgagcgtggtagctaccgaaattggtcaggagggacaggaatatctgatgatggcagctcggaactccccagactcgatcaaggatatcacaacaacgttcagggctcttggaaaattgaattggccatcagagtatgaggattatcatgtgggcattccgtttggtacctttcttaccgtagggggtttcctcaacttcatgttggccggaagtacctctgcccttcgttttggtatcattcttggccttgcactgttggctctgggaatctcaagtttgagatcacaaagagatggcggccgtcggcctcgtcttctggtgaaagggcaagctgcaatagccagtgtcatcttcttcagggagttttcagttcttctccagaatggctggtttccaaaaatcttcatggttctcctcagtggagtagtggcaggcttttacttctatcgcattgcagctggtagccccaaagagctgagcagcaacagtgattcagtgaactaatgcacttggatgaatcagatgatcatgggggaacgcagacccagaaggctatggcctgtttgctttcgatttccttcatcatccttcaattcaggcaaagctcggttgtaaggtgtccgcatgatgaccacatggattcagaagaattgcttgtttactcggccctcttcccgcactcctttgttcctttgctcatgtagtatagatgatagacttgaacaacatcaataaacgacattcaaaggccatgcagttagctcttcagtttgtctgctgtttgtttttcatggggacagcccgaaaggtcggtgaagcgttcaatgtttcgtgaagtgtccgaaaacagtcagtgttattactctgtagattccagctcgctcaaaactattcaaggccgatgacaagttgataacaattagtggcactgtgatttgttcctattcg

SEQ ID NO: 11927 - DNA, 2309 bp, Zea Mays
cttacgtgatgctgtgttttgtgcagcagtgaatttgggagcttgaagcattcatctgagacatggaaaaagtgatctgctgggcatatctccttcaacgcaagcagttctcgaaagaaactcttgattgctgtgtcttagctcgtgggaacactcctctctcctctctcgtgaactacacatagtgattatatgttcctctatgctcaacaacaagcaggctgatgcgatattttgctgaagttattatatttcagtctatgccagacatctacatgtagatggtgctcatataagtgggggttgatatatttgctgtgttcagcttacatctgttgcggccctagttagctatttgtcttttgtgtactatctgaggcaagagattgatcagctaggacttggcgaacacttgcctgtgttggctgttcatctgaagggggaaatttgcacgagacacctcggatattacaacaatggatagattcaagttgattaaggaagttggcgatgggactttcgggagtgtatggcgtgctataaataaacagaatggtgaagttgttgctgttaagaaaatgaagaaaaagtattattcttttgaggaatgtatgggtttgcgtgaagtaaagtctttgcggcgcatgaatcatcctaacattgtgaagctcaaagaggttatccgagaaaatgatatattatacttcataatggaatacatggagtgtaatctctaccaacttatgaaggataaggtcaagcctttctcggagtctgaagtccgcaactggtgctttcagatatttcaggctcttgcttacatgcatcagaggggctactttcatcgtgacctcaaacctgagaatctgttggttagcaaagatgtcataaagctagcagactttggtcttgcaagggaagtttcatctttgccgccatatacagaatatgtctcaactcgctggtatcgggcaccagaagtattgctccagtcatctgcttatgattctgcagttgatatgtgggcaatgggtgccataatggctgagttgttgacactccatcctctctttcctggaactagtgaagctgatgagattcacaagatatgcaatgtcatcggtagtccagatgagcaatcttggcctcaaggattgtcacttgcagaagcaatgaagtatcagttcccacagatcaaaggcagtcaactggccgaggtgatgacaacagccagtagcgatgcaattgacctcatctcatcactatgctcatgggatcctagcaagagaccaaaggccgcagaagtcctccagcataccttttttcagggttgtacatgtgttccactccctgtccgtccaaaagcttcatcacttcctagaacacctccatgtgttggatcaaaaggaaattcagagaacagtgtggctagaagattctcaactggaactctatctacaatgaaatctcatagcaatgcatccgcaaaattaaatggtttatctaagactggtgtacaaagaaaacttaatttggatcgtcagccatcccaaaagggtatgaagccaaccgagactagcaataaactaactacgaatcgggtaccagctcggaatagcccagggaatcctgtacttaggcattcacggagcttgcctgaaactggccgaggagcaatacagaaggtctcatcaattacagagaaactatcccaaatgtctgtgacctctagaacacggagcgctgtgaagcctgctgcccccatgatgaaggccggacatggcaagtcggactttcttgggaagtctgacgatatccctccagcaaagaggctgacaagaaaattggtcagctaaatgagggtatgtggagtgaaaattcgatcagctgcaggaggggtgttgtgtatagtgtgcagaaaccagtgtgcccgaagaggatagtcagcctgagcgtttgcccatcgatggttgtgcggatttgccatcaccacagtttcgctgcgtcgagacatattagaatgggtttgcaaattcctttgtgaagtgctagagcctgcatcaagccttccccacttccgggcggttgatctgcttttttcctgcgaaaagcttgcccccatgttttaataaacatgattgtgctattaatttggtttggtttgccttgcaatgttatcttgcaccaatatcgctgtcacaaactgtatgcacatttaacagcttgtaaatccttgagcccaacaagggatggacatttcacatttggtttgaatgcacatttaacgcagtgaggtgccaatttggcgc

SEQ ID NO: 11928 - DNA, 1530 bp, Zea Mays
tctcctccgaaacataaggttcctggagatgttcttttagttcaaaggggaaagtgcaaattcacaaagaaagcaaagtttgctgaagctgctggtgcttctgctatagtaatcataaaccatgtccacgaattgtacaagatggtctgcgaaaagaatgaaaccgaccttgacataaatatacctgcagttctcctaccaaaagatgcaggttctgctttacatacacttcttacaaatggtaacacagtttctgtgcagctttactctccagatcgacctgtagttgacactgcagaggtgtttctatggcttatggctgttggcacagtacttggtgcttcctactggtcagcatggagtgctagagaagcagttattgaacaagagaagctcctcaaggatggccatgaagacctactgaatgttgaggccagaggttctagtggcatggtagatatcaatgtggcatcagcgataatgtttgtggtggttgcgtcatgcttcttaataatgctttacaaactgatgtcttactggtttgtggagctactggtggtaatcttctgcattggcggtgtagagggtctacaaacatgcttggtggctctgttatcaagatggtttaaacctgctgcagaatcttttgtgaaagtaccgttccttggagccgtttcgcatcttactctggcagtttgcccattttgcgttgcatttgctgttgtgtgggctgtttttcgccagctcccctttgcttggattgggcaagacattctgggtattgcattgatagttacagtcatccaaattgtgagagtacctaacctcaaggtgggttcggttcttctcggctgtgccttcctgtatgatatcttctgggtgtttatctccaagagatggtttcatgagagcgtgatgattgtggttgcgcgtggcgacaagaccgacgaggatggtgtgcccatgctgctaaaaatcccgcgaatgtttgatccatggggtggatacagcatcattggctttggtgatatccttcttcctggtcttttagttgctttctcgctaagatacgatttttctgcaaagaagggcttacggtctggttactttttgtgggcaatggtggcctatggctctggacttctaatcacatatgttgcgctgaacctgatggatgggcatggacaacctgcccttttgtacatcgtgcccttcactcttggcaccttgatcgcgcttggatggaagagaggggagctgcagaacctgtgggcgaggggagagccagagagagtgtgcacgcatatgcatatgccgctgctgccgacgaccccaaactaaccacagggtcagtagaaaatcagcaagggttcctagcttctgcaaaatattgtatttgcctgctggtaatatgcaaaccaaatcatgccagtttaaaaggaggcactgcttcttggagacagcaaagtctgattgtgagctaactgctgcccaatgtgcagccatgcatgcgacaaatattcaagaacg

SEQ ID NO: 11929 - DNA, 1046 bp, Zea Mays
cttgattagcaatcactgctgcgcccgataggtggcagcgagccagcgagccagcgacccacccgactctgttccaacgagccttccctcccaaacttgcacgctgcccccgcgctcgcctccgcccccgatccagatccagggtggaatagggaacggccatacaccatggcggatttctccaaggaatcttgcccttctgtgaagaacattttacttctggattctgaaggaaagcgtgttgctgtaaagtatttctcagatgattggccgactaatgcatcaaagttagcctacgaaaagtctgtttttactaaaactctaaagacaaatgcacggacagaagctgagataacattgtttgatggttatattgtcgtttacaagtttgtacatgaccttcacttttttgtcaccgctggagatgatgagaatgagctcatcttagcaagtgtactacatggtttttctgattctgttggtcttctactcaggggtgatgttgagaagcggactgcgcttgagaacttggatttgatacttctctgcattgatgaaattgtggatgggggaatcatcctggaaacagatgcaaacaccattgctggtaaggttgcaaccaatgctgttgatggttctgtgcccttttctgagcagacgatatctcaggcactagccacagctagggagcaccttgcaagatctctactgaaatgaacaaccagcaatatgtatgacatatatgtgtgttaaaggttgggctactgaatgttaagggtctttgtagtcgttattcatcccaaagtgctgctgtgacagagcctagttgaatatccgagggattggtcacatgctcgttattttttttgaaccagtgagtttgtagctgccatatttcaggtaaaacataaaataaagagttgtaattgggtgtaatataattttcaccatacaaaaaaaatcatctcaactatcaaaccatggtaaaaggttcaaaattatctatcaaatgattatccctccaggtatggaggctttactcttgc

SEQ ID NO: 11930 - DNA, 88 bp, Zea Mays
acccgctgagtttaagcatataaataagcggaggaaaagaaacttacgaggattcccctagtaacggcgagcgaaccaggagcagccc

SEQ ID NO: 11931 - DNA, 56 bp, Zea Mays
tttttgaacgcaagttgcgcccgaagccttctggcggtgggcacgtctgcctgggc

SEQ ID NO: 11932 - DNA, 399 bp, Zea Mays
gaagcagaggaacgtacagatggtgggtccgcagaacctgcccaagcaagggaacacgaacaacaaccgtagtttccagcctagcggtagcggcaggccaaggagtagcggcaacgtcaatagcaacaggaactggtcaagatgagaggcaccgattccaattccgattccaattccttcaagagcggcaggatcccttttctttttctttttctttttacatcggctacaacaatttttagtctaggccagtagtacataaacagcaataaggcttgttttcggaattgcatgtttggcatgtcacaatgctcggctggctggtctttgccgatgaaacctgtaaagataacactaccaaattctgatcttgagcttactatccatgctaggacgctg

SEQ ID NO: 11933 - DNA, 1133 bp, Zea Mays
atgacgaaaaacgtctgcacagaaaaagagatggggcaaggtcaaggaagcaaatatgcagggatcattgtcactgccacatgcacctccgtggcaagtgtcctttggctttggcatcaatcaaatagacaagaggccacctctaccaccgccatccgcagtccatacagtgacccccacgaggtcaagaacctgtacgaggagaggaaagaacctggaagagaggagcttgaggagatggcgagcgccgagggcgagaggtgggtgggactggcgacggacttctcgcaggggagccgagaggcgctgcagtgggcggcgaccaacctgctccgcgccggcgaccacctgctgctgctgcacgtcatcaaggagcccgactacgagcagagcgaggccatcctctgggaatccaccggctccccgttgattcccctctcggagttctctgaccctattatcgcgaagaaatatggagcaaaacccgacatggaaaccttggacctcctgaacactacagctacccagaaggaaattatggtggttgtgaaagtcctgtggggagatccgcgtgagaagctctgtcaagttatccatgacaccccgttgagctgcttggttataggaagcaggggccttggcaaactcaagagggtgctcttaggaagtgtcagcgattacgtcgtgaacaacgcaacctgccctgtcaccgttgtcaagtcatcaagcaccgaaggttgatctcatcaccgaaatgcctgaatattgctgttgttataataaaagatggttggcctcatgaagaacatgcactagtttctagctacctgaaacatgttgaaccgggcaatcctattgtaataatagacaaagtgccttatgaagggcatggttatgtaataggtctgttctccagagtagatgtgccatgcttttgtgtcatcaccgaaagtgccttacgatgatagcctcgcggagcaggaggcccttgcggtccagctggctaggtgagatcaacacattccatgacatctctgcctcaagaaaaaccatggctgcgtaccttgatgggcagggcatcgtccaaggactggagcagggcatcatgccgaggccttgcgccttgccttcca

SEQ ID NO: 11934 - DNA, 2502 bp, Zea Mays
cttcggtcgccctcaatcattgattccccggataatttactctgctctacctctacccacctccattatatatatagtgcttctgaaccacccgagccacagccgtcagctcggcccgccggcgagcgcggacaacccgctggacttgagcatggtggacgtgcggctcccgatgctggtgtacgtgtcccgcgagaagcggcccgggcacaaccaccagaagaaggccggcgccatgaacgcgctgacccggtgctccgcggtgctgtccaactcgcccttcatcctcaacctggactgcgaccactacatcaacaactcgcaggcgctgcgcgcgggcatctgcttcatgctcggccgcgacagcgacacggtggccttcgtgcagttcccgcagcgcttcgagggcgtggaccccacggacctgtacgccaaccacaaccgcatcttcttcgacggcacgctcagggcgctggacggcatgcagggccccatctacgtgggcacgggctgcctgttccgccgcatcacgctctacggcttcctgcccatgcccaagaagtcgtacggcaagtcggacgcgttcgcggacaccatcccgatggcgtcgcacccgtcgccgttcgcggccgcctcggccgcctccgtcgtggcggacgaggcgaccatcgccgaggccgtggcggtgtgcgcggcggcgtacgagaagaagaccgggtggggcagcgacatcgggtgggtgtacggcacggtgacggaggacgtggtgacggggtaccggatgcacatcaaggggtggcggtcccgctactgctccatctacccgcacgccttcatcggcaccgcccccatcaacctgacggagcggctgttccaggtgctccgctggtcgacgggttccctggagatcttcttctcccggaacaacccgctgttcgggagcacgttcctgcacccgctgcagcgcgtggcgtacatcaacatcacgacgtacccgttcacggccatcttcctcatcttctacacgacggtgccggcgctgtcgttcgtgacggggcacttcatcgtgcagcggcccaccaccatgttctacgtgtacctggccatcgtgctgggcacgctgctgatcctggccgtcctggaggtgaagtgggcgggcgtgacggtgttcgagtggttcaggaacgggcagttctggatgacggccagctgctccgcgtacctggccgcggtgtgccaggtgctggtgaaggtggtgttcaggcgggacatctcgttcaagctgacgtcgaagcagcccgcgggggacgagaagaaggacccctacgcagacctgtacgtggtgcgctggacctggctcatggtgacgcccatcatcatcatcctcgtcaacatcatcggctccgccgtggccttcgccaaggtgctggacggcgagtggacgcactggctcaaggtggccggcggcgtcttcttcaacttctgggtgctcttccacctctaccctttcgccaagggcatcctggggaggcacggcaagacccccgtggtggtgctcgtctggtgggccttcaccttcgtcatcaccgccgtgctgtacatcaacatcccccacatccacgggccaggcggcaagcacggcggcgcgatcggaaggcacggcggcgacgcacaccaccatggcaagaagttcgacggctactacctctggccgtgaagcgccgagcagccagcatcgtcatgcatgcacatataccgcctgccctgatggtgacgatggtgagccgccaaggtgaagactgaagagtacgttcccgttcatccatccatcgtctccttagtactgctgcccggtgattagtcgatgaagagtgaaggtgaaggctacccacacacacacatttggtcgacgtacccgccaaaatttgaattttttttcttcccccttcttccttctcattcttttttcttttagttttgtccagaaatcgaaaggtgtgttgatttgatttagtttttttaattaccgtgccccgtggtaattaattatgtacgtacttatatatatatacattacgccgaagaggaaggagcactttgtataagagaggaatggggaacgtacttatgggtggggggccggggtgtcagcgtctgcctgtctgtactgtacatggcttagaggagtcacatgcagagagggagggccctggctttggggtggtattcttttggtacatggatcaagaataaattgaatttcattcttgttgtttggaaaagaggtgtacaccctcctccctcctggactctggttcctgtggagagtatgtatctttattattactgatgtaccacctgtgtgttgtcggtactgtaattggatagtaagtactacactgatctgctggtctaatcaatgttgttgttttatatggataataataatgattagtaagtcaatggtgaacatgagcttgctgtccattactccattgcgtg

SEQ ID NO: 11935 - DNA, 624 bp, Zea Mays
atctccgatcgtccgtgtccctcaccaaaagttcaaaaccccatccaattccaaatcccacttctcgccagttcacctccgcctccgctcctcccctccccctcccgtcctgccatggccaccgcagcacgcgccctcgtcgccgcacgcccggcacggccgctgctgccgtctcggcgcctcccgtcctcctcttccatccgtcccgcgcggcaacgtgctggcgtcgggtgcgtccgctgcatggctcggcggccggattccacctattccccgctgcgttcgggccagggcggtgaccgtgcaccgactgaaatggcgcctctgttccctggctgcgactacgagcactggctcatcgtcatggacaagcccgggggcgagggcgccaccaagcagcaaatgatagattgttacatccagacccttgcccaggtggtagggagtgaagaggaggcgaagaagaggatatataatgtgtcctgcgagcgctattttggattcggatgcgaaattgacgaggagacctccaacaaactcgaaggccttccaggggttctttttgtgcttcctgactcttacgttgatgctgagaacaaggattatggtgttatcttccttcgc

SEQ ID NO: 11936 - DNA, 343 bp, Zea Mays
  misc_feature (342)..(343): n is a, c, g, or t
gtgagtttctcttctttccagtgaaattgatgcatgaagcaggctacgagctgggcaaccttgatgctacgctgatcttgcaaaaaccaaaaattagcccgttcaaggagacaatcagattgaatctgtgcaacctacttggggcagatccatctgtggtcaatctcaaggccaaaacgcacgagaaagttgacagtctaggggaaaacaggagcatagctgctcataccgtagttctcctgatgcggaagtagaaaaaaaaacaaatagtacctaattgtatcgtgctacaagaaaaaggtcgttaagttatacttgcccttgttaaatgctctagccagnn

SEQ ID NO: 11937 - DNA, 59 bp, Zea Mays
ttttccctgagtacctctccgtaaggacctgttcatggagtgaccacccgagataacag

SEQ ID NO: 11938 - DNA, 1587 bp, Zea Mays
catttcccttcctctcaacgatggataagatacgaggtacatgtccaggttacacattcaatgccacctcacaagattgaaattttcaagtcacttgatgattgggctagagataatatcttgacacatctcaagccagtcgagaagtgttggcagccacaggatttcctccctgacccagcatctgaaggatttcatgatgaagttaaggagctcagagaacgtgccaaggaaatccctgatgattattttgtttgtttggtgggagacatgattaccgaggaagctctaccaacataccagactatgcttaacaccctcgatggtgtcagagatgagacaggtgcaagccccactgcctgggctgtttggacgagggcatggactgctgaggagaacaggcatggtgatctgctcaacaagtatatgtacctcactgggagggtggatatgaggcagattgagaagacaattcagtatcttattggctctggaatggatcctaggactgagaataatccttatcttggtttcatctacacctccttccaagagcgggcgaccttcatctcacacgggaacactgctcgtcacgccaaggactttggcgacttaaagcttgcacaaatctgcggcatcattgcctcggatgagaagcgacatgaaactgcgtacaccaagatcgtggagaagctgtttgagatcgaccctgatggtaccgtggtcgctctggctgacatgatgaggaagaagatctcaatgcctgcccacctgatgtttgacgggcaggacgacaagctgttcgagcacttctccatggtcgcgcagaggcttggcgtttacactgccagggactacgccgacatcctcgagttcctcgtcgacaggtggaaggtggtgaacctgactggtctgtcgggtgaagggaacaaggcgcaggactacctttgcacccttgcttcaaggatcaggaggctggaggagagggcccagagcagagccaagaaagcaggcacgctgcctttcagctgggtatacggtagggacgtccaactgtgagatcggaaacctgctgcggactgcttagacaagacctgctgtgtctgcgttacatagttctccaggttttgaccagatggtcccgtgtcgtcttatagagcgataggagaacgtgttggtctgtggtgtagctttgttttttatttttatttttctgttttgatgtacaacctgtggccgcatgaactggggcgtggagatgggagcgaccatgccgttctttgtctgtcgctggcggtgtgtttcggtatgttatttcagtcgttcagatctgttaaaaattttgtgagctatgcagttcagttcagctctgttctgttcgttagataccctaggtttctccgtggcctgaattctgcagtgtcgaaaacaaagcagagctccaactgaagtgtagctgactacttgacacatccagcatatatgtcttccaaaaaggtcgacacatcttgcagacaatgagctccaaccgacgaaagagcagctacctttctgcttgcactgcagataagcggcatacgattcatc

SEQ ID NO: 11939 - DNA, 1830 bp, Zea Mays
agattgggctggtccggccactccgacacccttatataaagtcccgaaccctagaggccagcaccttcctccccaactcgccgtctgccttctgcgcctccatttcggcctctgtcccttgcaagttcaatctcacctccaaccatgggtaaagagaagtcccacatcaacattgtggttattggccatgtcgactctggcaagtcgaccaccacaggacaccttatctacaagcttggaggcattgacaagcgtgtgatcgagaggttcgagaaggaggctgctgaaatgaacaagcggtccttcaagtacgcgtgggtgctcgacaagctcaaggctgagcgtgagagaggtatcaccattgatatcgctctgtggaagtttgagaccaccaagtactactgcacggtcattgatgcccctggacaccgtgacttcatcaagaactactgcacggtcattgatgcccctggacaccgtgacttcatcaagaacatgatcactggtacctcccaggctgactgtgctgtccttatcattgactccaccactggtggttttgaggctggtatctccaaggatggccagacccgtgaacatgctctccttgcgttcacccttggagtgaagcagatgatttgctgctgcaacaagatggatgcaaccactccgaaatactccaaggcacgttatgatgagattgtgaaggaagtctcatcctacctcaagaaagttgggtacaaccctgataagattgcctttgttcccatttctggttttgagggcgacaacatgattgagaggtccaccaaccttgactggtacaaaggcccaaccctgcttgaggctcttgaccagatcaccgagcccaagaggccttcggacaagcccctgcgtctgcccctccaggatgtgtacaagattggtggtattggaactgtaccggttggtcgtgtggagactggtgtcatcaagcctggtatggtagtcacctttggtccaactggcctgactactgaggtgaagtctgttgagatgcaccacgaggcgcttcaggaggctcttccgggcgacaatgttggcttcaacgtgaagaacgttgctgtcaaggatctcaagcgtgggttcgtggcctccaactccaaggatgaccctgccaaggaggctgccagcttcacctcccaggtcatcatcatgaaccaccctgggcagattggcaacggctatgccccagtgctggactgccacacctcccacatcgccgtcaagtttgctgagctcattaccaagatcgacaggcgatctggcaaggagctcgagaaggagcccaagttcctgaagaacggtgatgctggtatggtgaagatgattcccaccaagcctatggtggtggagacattctccgcgtatcctcccctgggtaggtttgccgtccgcgacatgaggcagacggttgctgttggagtcatcaagagtgtggagaagaaggacccaaccggcgccaaggtgaccaaggcggccgccaagaagaaatgatgcgatcccgtgtctgcttttgcagtgcctggataacttgccactaaagttgtgtatgcggttgttgctgttattgcgtggactgtttgctgcggtgtctcctgtttgtttgggtagcgcagcgtcggcctcttcaggtgtctgttgtctgttgtctttactatcagtaatgctcctgagacttgtatttctccttttggcgccgctaaatggaattttcgaacaatgattttcgtgttattattttacaaccttttcgaacaatatttacacgtctgatgtgttttgctgaga

SEQ ID NO: 11940 - DNA, 1008 bp, Zea Mays
ttccaactcccccacccaaaaagcccacgaactttcgacggttccttcctccctccctcccgctccaaccaaggcctacatatacgcccgcccaccacgcccccgaaaccatcaacccaacacggcgtccccgtcccgagtcaccaccgacccaagcaaaaccgcacgcaccctgccagcggccccccaactcccaacccaacccctactccagctagctcgcggcggcggccagcggccatggccttccggctgagcaacaacctgatcggggtcctaaacttcgtcaccttcctgctctccgtcccgatcctgggcgcgggcatctggctgggccaccgcgccgacggcaccgagtgcgagcgctacctctcggcgcccgtcatcgcgctgggggccttcctcctcgccgtctccctggcgggcctcgtcggcgcctgctgccgcgtcacctggctgctctgggcctacctcctcgccatgttcgtcctcatcctcgtcctcttctgcttcaccgtcttcgccttcgtcgtcaccaacaggggcgccggcgaggccgtctccggccgcggatacaaggagtaccgcctcggggactactccaactggctgcagaagcgcgtcgagaacaccaggaactgggaccggatcaggagctgcctccaggactccaaggtctgcaagagcctgcaggacaagaacgagaccgtcgcccagttcatgagttccagcctctcccccatcgagtggttgagaattgtgatgtgacattggaagccaatccgccagtgccaaacgcaaaaaacttatctagggcgacagtgatggttacttgcacgattgtgcatacacatatagggtttatttggaatacataatagactcgattaattaaaattttattttttctaataaattttacttatcgattagtctctattttatttgctagaccatagttagctaatacttaggctttttatttggcttccaagacttgacctaaat

SEQ ID NO: 11941 - DNA, 162 bp, Zea Mays
ggcctactccccatagaaactgtctacctgagactgtcccttggcccgagggtctgacacaaggttagaatccgagctcttccagagtggtatatcactgatggcatgaccccccggaagggggccttcttcgccttccacctaagctgcacaggaaaagcc

SEQ ID NO: 11942 - DNA, 3356 bp, Zea Mays
taagagacctgccaggctgccagcgtacgctagccaagtccctgagtaggcctcctgttttcccccacggcccacgctagccaagtccaggttctgaggttcacaaatcacaaccctagttggcggcgctcagatccggtggcatcctcctcccgcgtccctgtagcggcctccgacgacgaccttgtagcggcagcgtgtggcggcaatcgagcaagactgaagttaaggaagcagcagaaccatggcatcccgtttctggggacagggggacagtgagtctgaggaggaggaggtggaagaagttgagtcagaacagggcagtgatagtgatgatgatggaggtcgaggtggtgcgggacgcggtgcccaaaaccgatatttgaagaatcaagaagatgacagcgatgagtctgatacaggtcaccgtgtgatccgctccctgagggacaagcgcaacgaggagatgagatctattgttgatcagatgcgtaatgcaatgaagatcaatgactgggtgagcttgcaggagagttttgagaagcttaacaaacatcttgagaaggttgttcgtgtcaatgaatctactgaggtaccaaaaatgtatatcaaagctcttgtgttgctggaggacttccttgccgaagcccttgcaaacaaggaggccaggaagaagatgagcagcagcaattcgaaggcactcaatgcgatgaggcaaaaactcaagaagaacaacaagcagtatgaagagcagatccagaagtgcagggagcatccagagagttttgaagatgaagctgcagatgataaagatgtggatgatgacgatgctgatgaaagtgatgcagagattgaagatcctgataaaatagctatgtcagaatcagaagaggaacaagatgaagaggatgatgataaggatggttgggaacagaaaaggagtaagaaggataagctgatggataagcagttcttgaaagatccaagtgaaatcacatgggatattgtcgataagaaactcaaagagattatagcatctaggggaaagaaaggtactggaaggatcgagcgtgttgagcagttaacatttttgacccgtgtggccaaaacaccagctcagaagcttgaaatcctcttccatgtgatttctgcgcagtttgatgttaaccctagtctacttgggcatatgccagtcaatgtgtggaagaagtgtgtcaataatatgcttcttgtgcttgatatactccagcagtatcctaacattgtagtagacacctcatttgagcctgatgagaatgaaactcaaaagggtgcagactacaatggaacaatacatgttgtcggtgacctggttgcattccttgagagactggactctgaatttttgaagaccttacagtgcacagatccatacacaaaagattatgttcagaggctcagagaggaacccctgtttctggttgtcgcacagaacgtccaagattatcttgaaagggttggaaacttcaaagctgctgccaaggttgcactgcgccgtgttgaactagtttactacaagccccaagaagtgtacgatgcaatgagaaaactcgcagagcagcctgaggactgtgtggatgatgatgatgcagaggctggtgatgaacataaagcagtagatgacaatagaggaccatcaccatttgttgtgattccagaggctgtgcacaggaagcctacttttccagaaagcggtagaactttgatggatggattgatgttcttaatttacaagtatggggatgaaaggaccaaagcccgtgcaatgctgtgtgacatatatcaccatgcgatctctgatgagttttcagtggctcgcgacttgcttttaatgagtcatttgcaagatggtattcagctcatggacatatcatcgcagattttattcaacagagtcatggcccagttagggctgtgtgctttcagggctggtttgataaatgaagcccatggttgcttgactgagctctattctactgggagggtgaaagaattgcttgcacaaggtgtgcaacaaagccgataccatgaaaaaactcccgaacaggaaagacttgagaggagaaggcaaatgccttaccatatgcatataaacctggagcttttggaagccacacacttgatctgtgcgatgctgattgaagtccccaatatggctgccagcacctatgacaagcggagacctatgagcaaaacattccgaaggcttcttgaagtgagtgaaaggcagacatttgttgggccgcccgagaatgtgagggaccatgtaatggctgccacaagagccctcaacaagggtgatcaccaaaaggctttcagtgtcataaattcgttggagatttggaagcttttgaggaacagagagcatgttcttgagatgttggagcttaagatcaaggaggaagctcttagaacctatctcttttcatactcgtcttcgtacgagtccttaagccttaaccagctcactaccatgtttgatctcagcgagcagcatgcccacagcattgttagcaagatgatgatgcatgaagagcttcatgctagctgggaccagccaacaaagtgcatcgtattccatagtgtggaccaaactaggcttcaggggctactcttccagatggcagataagctctcggtcctggtggagatcaatgagagggcatacgaggcaagaactggtggtactctcgagggggtacctcccaggcgcaggggcgagggtcaggataatatgggaaagtggcaggataactttgtctcgtcacaggggcggcagggtggtggcaacaggtttggatactccggcagaggtgcaatatctggtcaaagtggtggtggacaccagagggacaggggcaatcagggttaccgcgggggctatggtggcgtttcaaggtttcaggatgcaaggggtcgcaaccagtctattccatcaggcagaggtggtgatggtggtgcacgcatggtgaacctgaacaggatgggtagagtttagaagtgataattttcagctcgagtaagcctgaaattctcctaaaagccaagttttgaatcactgctttttacatagtttcctgttctgggctgagccatccacctgtttcctacatttcgttgtagccttttaatttaaggggctaggaaattgaactaagagtttggtactgtttcgtgggagtgtgacttcactccaatatttgatatctatctgtgacacttgctataacctgtacttttcttgtttgtgttatgtggtttttatttggttatgaaaaataaaaaggcatgtcgcagatagaagatcgttattctat

SEQ ID NO: 11943 - DNA, 453 bp, Zea Mays
gaaaaatatgttgtcaatatgattgcaatatctgcgttgcaatcagttctccaggaagatttcaaggccactgagatcgaagttggtgttgtgagaaaagatgaccgcgttttcagagctctcacgacagaggagatcgatcagcacctgacggcaattagtgaacgtgactgagatgtcatatgctgcacatttcagcgctgcacacactgcgccgtgccattgtgcttcggcagtcattaagtttcatagtcatcaaaggaactgagtgtaccatttcacgtttaagaccgaaaacaagccccctctcgatgtactcgtttcatatcgttctgtggttgattgaaattggcacggtttggttttgggttgctaaaatgctaactatatttgcatgtggccaatattttaaccgtttatatcagtgtttgttctgagtccataagatttaag

SEQ ID NO: 11944 - DNA, 564 bp, Zea Mays
aagagatcagatatgggtgtggagagatgcgtgaacttggatggcctgacggaagcacagattgataaaaagctggaggagcttgccaaggccggcgagtctcttaaaaccaaatagttttggaactctatcctgccatgtttaacgttcccaaataaatgatgccatatgggtgagcaattgttactctatcgttatctgtagttgtgcctggaattaagtctttaattggcttaactttgtgaaataatcactactcttttacttgccatgcattttctagattacatgctatattgaaaagggaaaaaatcaatgatttgataagaagaatatatacctagtagcttgtgcatgagagattgatcgtgcaatatttctgcgcagttatatacataattgtatcacagttctatacttcagttctgcgcatgactgaaattgtgcagacacatgtacgattattatttgtttttttctatactttgatgccatgtataaagttttttttacttgtatgtattatagaaaaaaagaagatatatatatatttaaaagtattgg

SEQ ID NO: 11945 - DNA, 477 bp, Zea Mays
gcaacgcacgggcactgacctaccaccttcctccgctcgccgtgcttctgcttcctccgccaccaccgccggcatggctgcgcgctgcccctacttcgccgtcgaggagtcctcccgcggcatccgctcgggggagtccccggccgcggcgctccgccggatcctcgcgacgcctggtgcgcaccaggcgccctgctgctacgacgcgctcggcgcgcgcctcgtcgagcgcgcggggtttccgatcgggttcatgggcggtttctgtgtttctgccgcgcgacttggcttgcctgatgttggcctcatttcctatggagaaatggtagatcaagggcgtctcatcaatgaagctgtttcaatcccagtgattggtgatggagacaatggttacggaaactctatgaatatcaagagaaccataaaaggatatatcaatgctggttttgctggaattatgcttgaggatcaggtggc

SEQ ID NO: 11946 - DNA, 786 bp, Zea Mays
tttgttaatctgagttcactttacttcacttgtacctgaatcttcttcaacccagagatatataacaacgacttcaccactcctttgcaagttgttattgacaagtgcatccaatcatctccaatcgacacaaggagggctctttataagaatattgtcctgtctggaggctcgactatgttcaaagatttccataggaggttacagcgggacctaaagaagatagtggatgcacgggtccgtgcatctaatagccggcttattagtggggatgctaaggcccagcctatagaagtgaacgtggtcagtcatccgatccagagatatgcggtatggtttggtggctctgtgcttgcttcaaccgccgaattctacgaggcttgccacacaaaggcagagtacgaggagtacggtgccagcatctgccgaacgaatcctgtcttcaaagggatgtactgactcagagcggttccctgtggctgacgtcgtggatgatatccactcaaagcttaaatggggagaagtgacagtggtcgtggagacaggactgtcgagagggatcctgatcgtggggaagcatagccgtacgagctgtacaaaagagaagcgcaaatagataggtttatgtttcaccatacaatttagatgctggtaggcctgacaggatgggtttgccacccctgctgaattgggtggcattgtaatttgtagcgtcaacacttctggcggtgcgagattgctccttgtatacatgttgattcggcagcgatgttttctctctctcgg

SEQ ID NO: 11947 - DNA, 2591 bp, Zea Mays
gtccgatccgatggccttcggggcgacgagggttttgcctcaggcagtacaaatagcgcgcctcatccgcgccgcccccgcgctttttctctctgctgacgccgccgccgccgggagccgtaccccgggagagccccccagcccttatcaaaccctaaatcaaaaactatccaaaaaaatccgcaaaaaactagaaaaaatcccaaaaatcaccacttgattggagatggcggcgcaagggcaggcggcggctggatccgcgtccgagtctggcggctcaccggctgcctcagctgctgcagcggcggcggctgcgttcccggcgacttctctctacgtgggtgacctgcacgagagcgttcaggacgcacagctcttcgacgtcttcagccaggtcggcggcgtcgtctccgtgcgcgtctgcagagacatcaactcccgcaagtcgctcggctacgcctacgtcaactacaacaacactagcgacgctgcacgggcacttgaactgcttaacttcactcctatcaatggaaagcctatcaggatcatgtattctaaccgtgaccccagctcgcgcaaaagcggtgcaggaaatatatttattaagaatcttgataagtcaatagacaacaaagctttatatgacacgttctgtgcatttgggaatatcctttcatgtaaaattgcaacagacccctcaggagaatcaaggggatatggttttgttcagtttgagatggatgaatccgctcagtctgccattgataaactcaatggtatgcttatcaatgacaagaaagtgtatgttggaccttttgttcgtaagcaggacagggaaaatgtctcgaacaatatcaaattcagtaatgtgtatgtgaagaatctgtccgatactgttactgatgatgagttgaaggagatgtttggaaaatatggaaccataacaagtgctgttgttatgcgggatagtgatggaaattctaggtgttttggatttgtcaattttgaaaatgcagatgctgctgctcaggctgttcaagagttgaatggcaagatattcaatgataaggaactgtatgttggaagagcacaaaagaagtctgaaagagagatggagttgaaggagaaatttgaaaagaatattcaagaggtagctgagaagttccaaaacactaacttgtatctgaagaacttagatgataacattgatgatgaaaagttgcgtgaaatctttgctgagtatggcaatattacttcttgcaaggttatgcgggattcttatggtgttagcagagggtctggatttgtttctttcaaatctgctgaagatgctaaccgagctcttaccgagatgaatggcaaaatggttggaagcaagcccctttatgtagctcttgcacagcgtaaagatgacagaaaggcaaagctacaggcacagttttcacaaatgcgtcctgttgcaatggcaccttcagtaggtcctcgcatgcccatgtttccacctagtgttcctggagttggtcagcagctgttttatggtcagccacctccagccttcatcaaccctcaggctggatttgctttccagcaacctatgatgcctggtatgaggcctggtggtccaatgccgaactttatgatgcctatggttcagcagggacagcaaccgcaacgtcctgctggtaggcgtgctgggtctggtggaatgcagcagcccatgccaatgggtagtcagcaacagatattccctagaggtggtcgtggctaccgctatgctactggacgtggaatgcctgatcctggcatgcataatgttggtgctgtgatgccatctccatatgagatgggagggatggcaatgagagatgctggtgtctcacaacctgttccaattggggcactagccactgcgcttgctaacgcctcaccagatcagcaaagactgatgcttggtgagaacctgtatcctcttgttgaacagctggagcgtgagcaggctgccaaggtcactggcatgcttttggagatggaccagacggaggttcttcacctgctggagtcgccagatgctctcaaggctaaggttgctgaagccatggaggttctccgctcagcccagcatctccagcagagcaatgcctccaccgagcagcagctggctaatctatcactgaatgatggcgtcctctccagctgaatgtttctgatgattcagaaattgctggcaatttttgcttgatacctatctctagaatgcaattactttgtttactttattggaattttaggtgctgctctataattagctgaactagggggtggatttaattgccttgaattggttattttggttatatgaatatgttatgtcggagctcaggtctgtcattttggtatatggttatgttagcccttgtccgtttatcacccgaattatcacagattgaattttagagcgtcattgcttttctagctgatattttgttaagcaactcgttgcctcgagatgatcgattaggctatgatttttttctagcagcgtactaatttttatcttttatttcaaaccctagtataaaatggtatataaa

SEQ ID NO: 11948 - DNA, 903 bp, Zea Mays
taagaaagcattttgtcagctagaaaatcaggatttcctgtgctattcggagatggttcacgccctgcagttctgcaatctgctggcataacgtttccaaaagctatcatggttatgtatactggaaaggaaaaaacaattgagtctgtaagcagattgcgtcaagctttcactgcggttccgatatacgctagagctcaagacctctcacatttgttagatcttaagaaagcaggcgcaacagacgttgtcctggaaaatgccgaggtaattttgtaaacaaattctgtgtttacagagcagcatataagaattcatgcgatcacttttctctggtcaatctttcgctgcagaccagcttgcagctaggttcaatacttttgaaaggactgggcgtcatgtctgatgatgtatccttcttgagtaagcttgtgagggactcaatggagctacaagctcaggaagcactgaaagacattggggaccaagaagttgatattatgaagcctcttcaggtaagagtgtcagatttagtggagagcaatggtaatagttcaagaatggtagccccagagcagtcgttaagtctaagtagccgcccagacataaaggcaataaaaccaccagtggcgaatgggatacctgatatgaaggtggaaaatgacaagacaggatacgattttgacagggtggattctgaaaatggtgtgacatactgtctattggaatctgatgaccaaagcgatgaagcctccagtacaagcaaggaaatgatcgatcagtctgctgatacaagggttaatgtcaatgataagaagatactctagctctacttgtaggatcaagttcattggtgattggctgatcgctgggctgatcagaactgccgcatttcttgcagag

SEQ ID NO: 11949 - DNA, 656 bp, Zea Mays
ggacggctgccaccgcggcccggatgtttccctgccaccataaatgcgccgcggccgtcctcgctgcccaacccttcgctgcgccgccgcctccgacatcgtctcttcgtccccacgagcaaccgataatccgccggcgctgagatgttggtttatcaagacctcctatctgtgggtcacccaaggtcctgttgatgtagacattggtgccaatccatccgccgagggtggtgaggatgaaagcgttgatgacacagccgtgaaggtggttgatattgttgacacattccgtctacaggagcaacctccttttgacaagaaatcatttgtctcttacataaaaaaatacatcaagaatctcactgctgtgttggagccagagaaagcggatgagttcaaaaagggtgtcgagggtgcaaccaagtttctccttagcaagctgaaggaccttcaattttttgttggtgagagcatgaaggacgaagcgtccgtggtattcgcctattacaaggatggtgccactaatccgacattcctctatttctctcatggtcttaaggagatcaagtgctagattagttacccatgttgggtactatatatgttctattgttatagccacaactatagctgccctgcctgaactgaactcaaac

SEQ ID NO: 11950 - DNA, 724 bp, Zea Mays
cgggcagctgcgctagcaacagcacaaaaggagagatgtggtaattgttgccacaaggaggatcgtgaggccgcccaagaagggttcagctgttcagcgccctcgcaccaggactctgactgctgtccatgatggcatcctggaggatgttgtcttcccagctgagattgtggggaagcgtgtcaggtaccgtctggatggtgccaagatcatcaagatcttcttggacccaaaggagaggaacaacacagaatacaagctggacacctacactacggtctaccgcaggctgtgtgggaaagatgtggtctttgagtaccctatggccgaaaatgcataaatatgacgcccggatatccccattttattttgttgaatctggatgtttctttggggtctcaactagactgctccgtatgtacttcaaaaaccatagttttgatgccaaagttgttgcctaggaatttggtactcgggaattggtagcggacctgaacaatgttaagttttgagcatttaaatttacctttgtcatgataacatgttgcgagtttttatttaattgctggacgtgtttgatatgccagactgcattgttcgtttgattctacctagaatcaaatcaatatgcaactacaagcctcgcacctgtaacgtctaacctgggtttttcttgttcatttaaactttgtaacatcatgtccactctgacttgctctggcag

SEQ ID NO: 11951 - DNA, 80 bp, Zea Mays
ctgggaagggccatttgtcatcgccaaggttctgaagcccgggacctacaagctggccaacagtcaaggcgaggtctaca

SEQ ID NO: 11952 - DNA, 901 bp, Zea Mays
tcatcgtatcgtatcatgaggattaatgctctagagatgtggttccgtacggagtgacttcggctagtgtatcactgatgactctaaatatgccaggcaagggttacacgagtagagttcgttgtcgggagcagcagcgacgaacgacaatagtatctatgcttggaaggaaatcaacggctagagcaactgttgtcccagaccccgactataggttaccaatcgctatacttgggattgctagtgcttttgcatatgccgacaatcttctcgctgctgcacctgtaggactgctggggcttcttcttttgttccagactacaagagtgaggttcgtctttgataacgaggccctggaggtgaaggttggagagcagctgcaggagtcaggtgaaaatgtattcgtcggcggcaagaaccgttggaagtactcaacgttcgtaaactgggagctgtggtggccacagtttcctgtcttggtttacttcaaggagacccaaacgaagcccgaaggacagatccacttcttccctgtgatattcgatggtcgacaattgtacgatgtgatggtggagcgtgctgggccctcgaagacgagtggccctaaatagttgcagctgatcttcctaccgtcgttttgctccctcgggctccctcacatttaaattgtaaaaatggtaaaattatatacaaacggggttcgattccaaccacggttcttagctttaaacccatcttcatacgtacctaaccaacaaaaacacacatctatgtgttttatattttatattttgtatttaaacataaatataaatataaatcgtaacaatatatatatatatatatatatatattgttaggatcgtaggtgggaaaaagaagacacaaagtttaacgtgga

SEQ ID NO: 11953 - DNA, 1263 bp, Zea Mays
ccagatttgaagtttttatcttgtaattaagtctttgcaatgcaacagaacactacttgataaaggatatgagagagctggaaacgagcaatttgtggcagagataagcaaatgggttttccatgagaggggacatctaaaggctgttaatgttaggcatcacaaggttggggagaccaatgaaccaggcatgtaccgcattaatgatgacctggaatactctgttgagatctatgaatggtccggaacaagctggaagccgtatgttgctgatgatgtgcagcttcaatttttcatgatgagcccttacgttctgaaaactatgtcgactgacaacaagggtttgtattcaacaaccttcaaagttccagatgtttatggagttttccagttcaaagttgagtaccaaagactgggatatactggtctgtcttttacaaagcagattccagtacgtccttacagacataatgagtatgagagattcataacatcagcgtacccatactacaccgcctcattttcaacaatgggtgctttcttcgtattctcgtttgtgtacctgtaccacaaataaaggactcatgggagcgcacaagtctctggaggctgacgtgaccaagatctgtgggcactgaatgttgtgctataagccaagagttacccggcgccaattttatggaaccatgtttttgtactgccaacttagataacatttgacgaccgtgaccgcactcatgggaaatttactcgtgctaggatgttcgatctgcccccacttcttttttttctttcttggaccctttctgatcagcacttgtcagaacgtttacagtctatagcactgaaacgtgattttggaagtactacacccccagtaattttgcactcgtgcccagttctgatttctgatcctgggtgtggacttcaaagtctgcctattatacttccgcaattgttcgtgtttataacctggacgcacgtattttttttcacgggcttattgaacatgatgctcgaagagtgcactaaacatgccatgcacgtattttttttcacgggcttgttgaacatgaatgctcgaagagtgcactaaacatgccgcttcatgtacagaattcgaaatttgtaatgttatatgagcattttctcgggcagtggatgcattttaggtgccgtttggttcacatttgtcatgtacatttgtcatgtaatgggtaattgataacgttaaaccatgtttatttaagtttaactgtaatt

SEQ ID NO: 11954 - DNA, 1222 bp, Zea Mays
atatacaccgaggcccgagccaccgaggaaaactcgagggggaataaaatcccagcggcttcccccaaacaaaacctcttctccgccagagtccgcgtcggccagatcaaacgaatcggcacgacgcatcggcatcgcctccgacgatcttgagacaaacaaaacccaccgctgcggcaactccgcctcccgctgacacggggatcgcctgacaacaggcagagaaaagaggcgcagggtttgcccgcgaagatggaggacgtggacgtctcgcggcagctgaagcagatgacgaacttcatccgccaggaggccgtcgagaaggccgccgagatcgaggccgccgccgccgaggagttccaaatagaaaagttgcagctggtggaagctgaaaagaagaagatcaggcaggaatatgaccggaaagagaagcaagttggcatcaagaagaaaattgattactcgatgcagctcaatgcttccagaattaaagtccttcaagctcaggatgatttggtaacagatatgttggagtcagcaaggaaagagctactgtgcataagtagagatcaccccacttacaagaagctcctcaagacacttattgttcagagtttgctgcgcctgaaagaaccagctgtgcttctccgctgcaggaaggaggatcttcaacttgttgatttagttttggaatctgcaaggaatgagtatgcagataaagcaaaagtatatcctcctgagatagtggtagatcgtcaaatctatctgccatctgctcccagtcattatcaggcacctggcccctcatgctccggtggagttgtgctagcttcccgagatggaaagattgtctgtgaaaacacactggatgctagattgcaggtagttttcagaaagaagctgccagagattcgtcagagccttttcgggcaggtagctgcgtagccaattcttgaaagcagaacgtggcccagtactctttggggtaccctgacgatgtcgaggagaaactttggcagctctcaatagtgatttatcacacttttggacctcgattattatttgtgtatacttttttcctggttatggatacctttgaatcctgcacagagcaaataaactgtgttcatttgtgggacgatcgtttgttgcaataaggcatcgagatgtgttgcgatgccacttctgttatagcatcatgttttttcgttgaaaaaataaa

SEQ ID NO: 11955 - DNA, 89 bp, Zea Mays
gccgccgcctggttgcggcgtgaggaagaaaaggcgcggggcgttgatcttgtgatcaacggctccggatggacgatagtgtgatgggt

SEQ ID NO: 11956 - DNA, 74 bp, Zea Mays
tggcaaaagagagcgactcttcggaggatgaggtggcgccaaggaataccatgggagacatgcctctagagtaa

SEQ ID NO: 11957 - DNA, 2138 bp, Zea Mays
accgaaccaaacaacacacgtcaaagcggaaaacctcagaaaaccacaataaatcatcctcgtccaccactgcccccgctctgctgcaactccactcggcccggccgccctttccacccaccttgatcctctgatccgttggtgcttgaccgatccatggacacccatatcggatccgtgaacggggcggcgtcgaaccagacggttggctgcccggcgtcggcgccggggtgcccgatggcgtccacgccggcgcagcccgcggcgaccctgtcggcgggggaggcgtcgctggggcgccacctcgcgcgtcgcctcgtgcaggtcggcgtcaacgatgtattcgcggttccgggggacttcaacctcacgctgctcgaccacctgatcgccgagcccggcctgcgcctcgtcggctgctgcaacgagctcaacgccgggtacgccgccgacgggtacgcgcgcgcgcgcggcgtcggggcctgcgccgtcacgttcacagtcggggggctcagcgtgctcaacgccatcgcgggcgcctacagcgagaacctgcccgtcatctgcatcgccggcgggcccaactccaacgactacgggaccaaccgcatcctccaccacaccatcggcctccccgacttctcgcaggagctccgctgcttccagaccgtcacctgccatcaggcggtggtgaacaatctggatgacgcgcacgagcagatcgacacggccattgccacggcactgagggagagcaagcccgtgtacctcagcatcagctgcaacctccctgggctgcctcatcctaccttcagccgcgacccagtgcccttcttcctcacccccaggacgagcaacaagatggggctagaggctgcagtggaggcaactgtcgaattcctgaacaaggcggtgaagccagtccttgtcgccggccccaaactgcgtgtggcaaaggcaggaaaggcatttgtcgatatggtagatgccagtggctatgcctatgccgtgatgccatcggccaagggtcttgtgccagagactcacccccacttcatcggcacctactggggcgccgtcagcaccgccttctgtgcggagattgttgagtccgcagatgcctacctctttgcaggccccattttcaatgactacagctctgttggctactcattcctcctcaagaaggaaaaggccatcatcgtccagcctgagcgtgtgatagtggggaatgggccggcattcggatgtgtgatgatgaaagagttcttgtctgaattggctaagagggttaataagaacaccactgcctatgagaattacaagaggatctttgtacctgagggccagccgctggaaagcgagccaaatgagccactgcgagtgaatgtgctcttcaagcacgtccagaagatgttgactggtgatagcgcggtgattgctgagactggtgactcctggttcaactgccagaagcttaagctgccagaaggctgtgggtatgaattccaaatgcagtatggttcgattggatggtcagtgggtgcattgctcggatatgctcagggtgcgaaccacaagcgtgtgattgccttcattggtgatgggagcttccaggttacagcacaggatgtgtcaactatgctgcgatgtgagcagaacagcataatcttcctgatcaacaacggtgggtacacgattgaggtggaaatccatgacgggccatacaacgtcatcaagaactggaactacactggctttgtggacgccatccacaatggcttgggcaagtgctggacctccaaggtgaagagcgaggaggagctgacggctgccattgagacagcgctaggggagaagaaggactgcctgtgcttcatcgaggtgatcgcgcacaaggacgacaccagcaaagagctgctggaatggggctctagggtttctgccgccaactcccggccaccaaatcctcagtagaagtcccgcaggctccaagcctcggagtgccagtagtgatagtaagctgtagcacggtgggggctcaaccgaataacgtgaacgcattgccctttctgttacgtgttttattttattgtgtttctgtggtcgtatatctgttttgtgacgtaaaaaaaaaa

SEQ ID NO: 11958 - DNA, 1140 bp, Zea Mays
ctggctcccgtcaactccgcgatggagtggggatacaggcaaggaggttggaagctcagttagatgaccaaatgattgcataccgtaaattggtttctatgaaatcagacggttcagaggacaacattgagtctgatatagaaagatcactgaagcagttacagcaagtgaattcgcaaatgcaaacttgggtatcatcaggaggttctgaagttctttctcatactctgactcgtcatatggagattttgcaagaccttactcaggaattctatcggcttcgatcaagtctcagggcaaaacaacagcatacttctctccttgacttgagagattttgacagagcaaagtttgatgttgaggagccgtcagactcagctgatcaagttcttctcagggaacaagctgcgattggcaggagtactggacagatggataacgtgatatcacaagctcaggcaacacttggttctctcatgacccaacggtcaacattcggtggcatcactacaaagataagcaacgtcagcagccagcttccaacaattaaccacgtcctctcatcgatcagaaggaagaaatccatggataccatcattctttcgctcgttgcatctgtctgcacgtttctcatcttcatctactggctgtcgaagtaggtttaccagagcaaagatattacagtgttgtaagcttgggaccacaccaccagtaccggtacagatagtcttcattggtgtttgtacaatattattggttgattgaatgctgttacgattcgggcgtgctgtagccaccgtgtctccagctgtgcaactgctgccaatactgtgaactgaactctgtacctcgtgtacttcggcataactaagggtggagcaactggcgttgctttagctgccccatgttggcatgttgctcagatgtcggcttaaaggtggatcttcacctatgactatagttgacaatataggctctatattttatacaataaaatataaggatgaggctctatttgtttttatttttgaactaaaaataatttagaaccctatcaatttgtaaagaaacatttggatcacgatctattaccacccctacctatgtcgtaagcctctgttatcagacattttcgagtca

SEQ ID NO: 11959 - DNA, 67 bp, Zea Mays
tttatctgtagtgtgcgtatgttttttgtggccaccgaggcccaaacataccgtcgtcgtgttgtaa

SEQ ID NO: 11960 - DNA, 78 bp, Zea Mays
attacttgcctatgctacttaccatgactttaagctttatcaaatggacgtgaaaagtgtcttcctcaatggaccaat

SEQ ID NO: 11961 - DNA, 107 bp, Zea Mays
caattaaactcgacaaagcaagaaagtttaaaaagacgagcgcaatgcaagcaactgaaatggcacaagaaacgcttacaatgcaagctcctatttatatgtccaga

SEQ ID NO: 11962 - DNA, 569 bp, Zea Mays
gaaaaatcctggaggaataaaaagtgctgctgcgacgacgagcagcagcagcggttcggccggcgtgtacagccctccagcgatgggtccgtcggccctcaacgacaacagcgctgccgccggcgtcgtcctcccgatggctggcgctgggcggctgctgatcctggcctgctgctcgctcgtcgctctctactacctcggcgcgtgatgatcgtgtgaggacgagacgccgctccccgctgccgcttgctgttgttggggtgtcttgttccttagcccttttcttttctcctctagtggcagtggcaggcaggagagaaccttgtgacgatgggcgcactgcactgccttccaccggtggaggagagcttggcagtgtgaggcccctgtaaatcttaggttctagggagggagggatgctgtgttgacttcttggacatgtgtgctcattgtttcatcggtctttgtttagggttgatgcgctaagcttcgcactgcctgacttgtggctgatgttgctcatgagccgtgttgtttcccttgccctgatggagagtggttcatctgct

SEQ ID NO: 11963 - DNA, 1708 bp, Zea Mays
gttgaaaccatatgcggcattttgctttttgcgggactttttcgagacatctgatcacagtcaatggggtcgtttttctcagttttccaaggataaggaatagtgtcgatacatgggtatacccaaccttgtttcgcatgaataccgctactggagcgcctcctgattattttgacaagaatggacaaaattggggttttcctacatataactgggaggagatgtcaaaggataattatgggtggtggcgagctcgtctgacacagatggcaaagtacttcacagcatacaggatagaccacatcttgggtttctttaggatatgggagcttccagatcatgctgcaacaggtttagttgggaaatttagaccttccatccctcttagtcaggaggagcttctaagtgaaggtctatgggattttaatcggatgagccaaccatacattcgtcaggaaatactggaggagaagtttggatccttttggacagtcattgcagccaattttctaaatgagtaccagaagcagtgttatgagtttaaagaagattgcaacacagagaaaaagattattgtaaagattaaaacaagtgctgaaaagtcactgtgggtagagaaagaggacaatatccgccgtggccttttcgatttactacagaatattgtccttatcagagatccagaggactccacaaaattctatccccgttcaacctggaagacacatcaagttttagggaccttgatgaacacagcaaaaatatcctcagaagattgtattataactattattttgttcgccaagaaaatctctggcgccaaaatgccctgaagactttgcctgtcctgctgaactcgtcagatatgttagcatgtggagaggaccttggccttatccctgcttgtgttcaccctgttatgcaagaactggggttgattggattgcgtatccaaagaatgcctagtgaaccaaacttggaatttggtattccttctcagtatagctatatgacggtttgtgctccctcatgtcatgactgctctacattacgtgcttggtgggaagaagatgaaggaagaagaagtcgtttctacaagactgtagttggcagtgatgaggagcccccatctcgttgcaccccggaagtagtgcacttcattgttcagcagcattttgacgctccatcaatgtgggcaatctttccacttcaggacctccttgcactgaaagacaagtacaccacaagaccagcgccagaggaaacaatcaatgaccccactaacccaaagcactattggagattccgtgtccacgtgacattggagtccctgctgaacgacaaggacatccaggcaaccatcaaggacctggtcacaagcagtgggaggtccttccccggaaagaaggcggaaggtgccgacgagagcggggagaagctgtccaaggtgcagctgaatggtaaagcttaggaaaggattgcgagagctgctggaagtgaccacggttacaagtaaataaatagaataaggcgacagattgcatcaccgtgttgatccaggtgatgctgtttctggtaggaaattcttacccatgtgatgttctttcaactctggaaataagaagcaccctctaccaagtcagaaagtgaaataatccatccagtgtcggttttcattaatagaattttcgttgaccgcccagttatt

SEQ ID NO: 11964 - DNA, 1125 bp, Zea Mays
gctagctcgacgtttacggtggtctcgctttaaaatgcaacgggcagtgcaggccgtcaggtcacacggcaatgttcttaaatatgctgttctacaacacatcagcgctcccaagccagcaatgcttcctgctgccttttctcgtttcatgtcagtttcatctgctcgcctagaggatcgtggatttgaaactgccactgtagcagatgtcttgaagtctaaagggaagagtgctgatggatcttggctctggtgcaccacagaggatagcgtctatgacgctgtcaaatctatgactcagcacaacgtgggagctttggtggttgtcaaacctggacagaataaatcaatcgctggcattgtcactgagagagattatctccggaaaatcatagtgcagggaaggtcttccaagtcaactaaggttggcgacatcatgactgaagagaacaaactgatcacagtgaatcccgacaccaaggtcctgcaggcaatgcagctcatgacagaaaaccgcgtcagacacatcccggtgatcgacggcacggggatgctggggatggtctccatcggcgacgtcgtgcgcgcggtggtggccgagcacagggaggagctgaaccggctcaatgactacatccagggaggctactaggacggcgtgtgcagcgacgaccccctccgatcccgccagtcagtgaagtccgcctttgaaatccaataactcggaacaatgatgatgacgaaataggccgtgttttcttggacaatgatgttaagttcggcaaggttttcctttctctttttttattctactgcgtggtctatgtgtatattgccaaaggcatgcgtgagccatgcgcccggtgctggggcgcagagaccatctgatggtggaaacaccggaaataagagcgtgccgctgtgtgtttcctttgaaggaataaaaatggtgttcgtgttgtgcattgcttattgttgatgttcgctttggattaaggccttgtttatgaacggtacggattcagtgcagtactgtacgtgcagaactgggaaggctttactttatgaattacatcttctgtttttagcttcatcatgaaatattttcaacagattcgtatttag

SEQ ID NO: 11965 - DNA, 1728 bp, Zea Mays
cactcccaaattcatttttctaaattaaaaagggggaaagggaaagattatcttctccgtcccctcccccctcccctcccgtacagctgtctgtctcggagcagcgggcagcggcggccggcaggcaatgcaatgaagaaatgctcggcgttggcctcggcgtccgactgatggtagctgttgcccctgcgcctccagttccagccccaccaggcaaaccgccccttcctctctgctcctctctccgccaccgctcctccggctggtggttctccaacggcgacgcccatggaagagacagcaccgccgccaccacgagcagcagggcgacgaggcggaagtggtggtccgaccccgacggcagccaagaagactacggttcctcttctctagaggaggacgagtacggttacggttacgactacgattacgaggatgaggctgcgttccccggatttggaggggctggggagatgttcgacgagccctggttctccaaggtattcaagacgtacggattcatgctaccggtgatgcttgcatccatgtttgctgtaacagggctaaaggcctttctaatggccatggcgatcccgctcggtcagtcggccatatcatttataattgacgctgtatggccaaggagaaaaggcaaccgtgacgacaggtggaggagaccagtccaagaggaggaggaggaggaggaagatttccctagggacgccactgactttgcaacaggtggtcgaggcagatacagcagcagctattatgaggggaggagagggaggcagagctaccagtcaagtgtctctaacgattttgctgatgctgcctcagctgctgttggagctgatgatagcaccaagagcagcagcagtggagatggcggaggcaacaaaagcagcggtggatatggaggatgggatgagcttctggacaacaataacaacactgctgctgcccgggaggcaaagaggagcagcaactcattctcagctggcaacacttattacagcacgaaatcgcggccttcggcgactggggaggcagatgcggattataccgccgctggcggtggcggaagagcggagcagggagtaggagctcctccggaaagaatgagaatgagacgacggcgggtgccgagaacgatggggctgggcagtaccaggtacaagcaggcgccactcttgatgcgcctgttggtggcagtattcccattcctgggatcatggttcagtgtgctctgaactgtgctccttcgttccaaattataagacgttttggttgtcggctttctctagattcatagctttttgctatgtacttggatatacactatgtctacaaacgttataaaagcaatgtgtatagaaatgtcataatttggaacaagcaatgtatatagaaaagtcatgatttggaatggagggagtagtattatatattagcccatgttggctcactcatgaattcacatacaagtaaccagtggcagtaagcaaaagattatgattgtgaaactgccttcatccggtctccaggcagtcgcagaagtttgattcaatcataggctggagccgaatggaatcagaagtgaagctgtggattggaaggaagacaagtgtcgtgaagaagatcgattgattcaggcagtgtgcctgcagcatcagctaagcggaaaagaccaagagtgaagcaagttgttaatcagtaccctactat

SEQ ID NO: 11966 - DNA, 888 bp, Zea Mays
gccacatgctaacaaacaagataggccagagattgttgatgggcgcatatgtggagacatatctgtatctcgtgcttttggggacataagatttaagacacaaaagaatgaaatgctggtgaaaggagttaaacaaggaaggtggactgataagttcatctcacgaatacaatttaaagatgatatagtaatctcgtcacctgatgtatctctggtagagcttggaccagacgtggaatttgttctgttggcaactgatggtctttgggactacataaaaagctctgaagctgtagcttttgtcagagatcaactccgtcagcatggtgatgtccagttggcctgcgaggcacttggtcagaaagctctggatcaacggtcccaagacaatattagcatagtcatagctgacttggggaggacaaactggaaggcgttgcccgatgaaaggccgaacttgttcttggaactaagtcaagcagtcgcgactgtaggggttgtctcaataggaatttgggtctcgtcgttccttgggttacagtagaactagctactccgtccggatgtgtatattacctactgagtttacatctttctgctagcagtagcagctgcaaaatatatgtatattcgtatatagtgtgtgaattgatagggtaatctgtttgggtaatactgagtgaacgtgtgaagtactgatgaagatcgtgtagttgagctcctggtgagtcatgagtcatgacagctgagtggcttttgagtaatcctcatgtcaaaaaaaaccaagcaaaagaagaagaagaaaaagatcttctcatcagttgctaattgctacaaagccataaacaaatgaaggagtattgaataatggaatcgaataagtgcatg

SEQ ID NO: 11967 - DNA, 66 bp, Zea Mays
agattctctccacagccagattttcagaaaaactggtcagaaaaaagctgaaccaaacaggcccat

SEQ ID NO: 11968 - DNA, 109 bp, Zea Mays
ccgccgcggtttttttttttttttttttttttattttttttttttttttttttttgtttttttggttttttttttttttttttttttttttttctttttactttttttt

SEQ ID NO: 11969 - DNA, 72 bp, Zea Mays
ggataggaaggggtggaagtgtgcaattcacgtgccagaaccttgatttgtagtttcgcttttcctccttaa

SEQ ID NO: 11970 - DNA, 73 bp, Zea Mays
ttcccatcaacaaggcgccagacctcctgacccagatgttccaccttcagtttcagtggttacaacattagct

SEQ ID NO: 11971 - DNA, 71 bp, Zea Mays
acagatttaaaaaaaaaaaaaaaaaaaaaaaaaaaaagtgtatacatacagactcacccccaagataatcc

SEQ ID NO: 11972 - DNA, 94 bp, Zea Mays
gcttaaggtggcttcgagcttcgtcaccagctttgctccgtccaccctttttccatactaattttataaatctattcgcaatacttcgggccag

SEQ ID NO: 11973 - DNA, 725 bp, Zea Mays
cgtgggtagaataaataaattatgcaagaatttccaaaagattgttcgaatttgtgtatgttgtcctctctctctccaccgttggatggcaacataccgcctatccacctgcgctcttcccgttccccaactgcaacatcctctatctctctctctctctctctccctctctacctgccccgttcctcaccagtctcttccgccggcgtcgacgagagctgcgctaggtgatctcgactgcttcctcgccccccatggcgacggcgctcaaatcgttcctgaacagccccgtcggccccaagaccacccacttctggggccctgtcgccaactggggcttcgtcatcgcgggtttggttgacatgaacaagcctcctgaaatgatatctggcaatatgacagcagccatgtgtgtgtattctggactctttatgaggtttgcatggatggtacagccccgaaattatttgcttctggcatgccatgcttccaatgaaagcgtccagctctatcagttatctcgctgggctaggtctcaggggtacctggagaagaaagaaccagaggccaaacagtaaagaggaaaaatacaatgactcaaagaagttcctaccacgaagatcagtcattgcgaaattttgctccggtcgctcggcaatgtcatcctggattcgaatatatgtaaatattgattgaaaaaaaatccatctttggtcacaatgtac

SEQ ID NO: 11974 - DNA, 790 bp, Zea Mays
ctgatctggtgcgtgctgtgccgaaagagggcggaccttctcgccgcgaaacaggatgacatgcaagctgctggagttgctcttgttttaattggaccaggtagtgttgaacaggcaaaggcattttgtgagcaaaccaaattcaaaggagaagtgtatgctgaccctactcactcatcgtatgacgctcttgaatttgcattcgggttgttctccacctttacgcccgcggctggcctcaagataatacagttgtacagggaaggatacaggcaggactgggaattgtcattcgagaagaacaccaggacaaaaggcggatggtccaggtatcgataacatcctgtacatccacaaggacaaagaagccggagatgatcctgacatgcaggatgtgttgagagcttgctgttcctagaaaatcagtgtgccccacgaccacacagtcactctatatctcgttgtaaaagtcaggttgtaatcagccctcaatcttcagcgatcctgttcaggatgcatgggctctcttttttcgtaacatacgacgcacggggaaccttacgtttatgttttggtagcaagggggaaaggattgtaagggctagaatccccttgctatttaattctgagtaacaagaggattttagcccctcaaattccttttatttttcttgctcccaaacaagctcgtgcgtgtacataacatatgtatggttctgtatagaaatcgatgaagttctgagtatctgctaggaataatatataggacgtacgagactcgttgttgttg

SEQ ID NO: 11975 - DNA, 1868 bp, Zea Mays
caagcgagcaatacaaaatcagcgagcaggcgggctggcatcggccggttgcggtggcatccataggactctcagattcccatctcgtcttcttatctccacttctccctccacacacatcccctcctctctctcctctgtttataaaactcgccaggcgcaatctctctcgctccgtccatccccgtcgccagcatcgcttccacttcggtctcagcgacggtcgccaccaccgctcccctccctctccccctcctcgcccagcggcaattaccacagcctccccagcaagccgggatggctgcactcaaggcatcgttccggggtgagctcagcgccgcttccttcctcgactccagcaggggacctctcgtccagcacaaagtggattttacgtttcaaaggaagggcaaacgagctatttcactgagaaggacatgctgttctatgcaacaggctccaccaccagcatggcctgggcgagctgttgctgagcctggccggaggtcatgggatggcccaaagcctatctcgattgttggttcaactggttccataggaacacagacattggacattgttgcggagaatcctgataagttcagagttgttgctcttgctgctggatccaatgtcacgcttctagctgatcaggtcaaaacattcaaacctaagttggttgctgtaagaaacgaatcattagttgatgaattgaaagaagccttggctgattgcgaagagaagccagaaattattcctggggagcaaggtgtcatagaagttgctcgccatccagatgcagttacagttgtcacagggatagtaggttgtgcagggctgaagcctacagttgctgcaattgaagctggtaaagacatagcattggcaaacaaagagacacttattgcaggtggtccttttgtgcttccccttgcacacaaacacaaagtgaaaattcttccagctgattctgagcactctgcaatatttcagtgtatacaaggcttgtccgaaggtgcacttcgtcgcattattctaactgcatcaggtggtgctttcagggactggccagttgacaggctgaaagatgtaaaagttgctgacgctttaaagcatccaaactggaatatgggaaggaagatcacagtagattctgctactttattcaacaagggtttagaagttattgaagcacattatttatttggtgctgaatatgatgacattgagattgtgattcacccacagtctatcatacactctatggttgaaacccaggattcatctgtcctagctcagttgggatggccagatatgcggttaccaatcttatacaccttatcatggccagatagaatctattgctctgaggtcacctggcctcgtctggatctttgcaagttgggttcactgacattcaaagctcccgacaacgtaaaatacccatcaatggacctagcctatgcagctggccgggctgggggcaccatgacaggagttctgagcgctgctaatgagaaggccgtggagttgttcattgacgagaagattagctacctggacatattcaaggtggtggagcttacatgtaacgcgcatcggaacgagctggtaacaagcccgtcactggaggagatcgtccattacgatctgtgggcgaggagatatgcagccagtctacaaccatcttctggcctgagccctgtccctgcataataggtcgtcacgacaacgttgtacagcaggagttctaagatatgatgtgtttgtggctcctgtttccatgttcaattttcaggcctccacatgaataaaatgcatctattccatgtgatttcttttatggatgaagtgtgcgaaaaaaaaat

SEQ ID NO: 11976 - DNA, 112 bp, Zea Mays
gcctgtttttttgctgggatagacctccaatgctgtcaccgggctcttgcgatcatgctctttcctctcctcagtaggcttggtcaaagaataagggaagtacgtagctgag

SEQ ID NO: 11977 - DNA, 1298 bp, Zea Mays
aaaggaactaagtgggggacatgagtacatttcacattgtaatcagaaacaggaaggttgatcgatgctctggaactgatgaggcatggagtgaagcgctttcttgttcgcaagagtgggagctggaaaggcattaccaagagattttcagtgctttataatggtaagtggctgaagaacatggaatcaacatctccaagtgcagccagcagcagcagcacgcagctatccccacgttctggttctgcagaaaagttctgctgcctatcaagggaagatgttctccggtttctcattggatgccttggtgctcttgctcccatcccgctgactcagatatcttcccttggagccatcaatccgcagtacagttacgtggaagcatctgcgcctgcgatggaagcaattcagaagatccctcaagacccatgcgccgttgctgtagtggagacgatgccagatggaactcgtagcatactaggagacatctctacttacaagctgtggaaatgtgactatgtttcagctgcatgggcactggcaaacctgtcagctgggcagtttgtcatcggtgccgacgagaatgggtcaacacccatctcagtcttcccagagcctcccatcagcccatcgtcaccggtggaggagatcagtcctgggcgctcgccaagggcgaagaagttcagcagcaggagcatcgggtttctgaacaacacccagatgtcagcgtggcggacacggagcatgtaccaccggggcaggagcaccccactgatgtgcaagaccacaagcaccctcgcggccgtcatggcgcagatgttgtcccatcgggccacacacgtctgggtgacggacgcagagtcggaggaggacggcgtcgtcgtcggcgtggtgggctacaccgagatcttcaatgccgccaccaggagcacctgcccaagtccgacagcatcttgatgcaccacatcgtgctgtacagtatactgctgttggttgatccgttggtgccccggtgcacgctgttgcactgaactgtacaatgtactttgctcatttgttggtttgtctggagagtttttagtcttttagatattcttggtctgcatggagcaggacttggtggtatattgttgcattcgttgtggacggtacgaataagaattcgggtttgcctcggagtctagtccattttgcatgctcgcctgcagcagtgcagctgtcgatgtactctatgactgtatatggaaatggaatgttctctgtttcctttcacatgcttgcagccttgcctgagagtc

SEQ ID NO: 11978 - DNA, 981 bp, Zea Mays
tttaaacctcaattcagtatgcttcttttttttttgcatccgcgcgcgcatcagatggatacacgaatcatcatccccaccaaatgggcatgaacaacaaagaaaaaaagaaaggaatgaaccgagcgaggccaagatcaatggcaatggcagtaggagtggcaatggccgctctcccgcgccgcgcccgcgctcgcgcagggggtccgggcctggagcggcggcgccgccacgccgcaggctctccggagctcctcgtacctgcggaggtcgaagccccgggcgcgcatcacgcgcttctgcttggccgcgaaccggctctcgaagaagccttcgaacgacggctccttcttggtgcggaggaagaaggcgtagccggccatgaagtacatggacgtgacgtagaagcagatgggctccatcacgtcccacgacagctcccagaaggtgagccgcatgaacccggccgtctggatcaccaggtacgtcagcccgcaccacagctcccgccgcacccgcgccgccgccgcgcggtcgatctccgccttctccgcctccatggccctcagctcctcctccctcgcggggtcgatctccgcggcggcggcggcggcggcgtgccgcacggggatcgcgttctcgattgccttcacgaccatgtcgggcctgaggaagacggtctttccgagcacgatgacggatccggactcgtcgagcgcgcgcgcgacggaggggcccgcgtccgggccggcggcgtcgcagcagaggccgtcgaggttgatccgcgggaatgcgacgccgaccccgaggtcccggatccggtcggccaggggcatgaagcggtcgggcggcacggcggggcggaacgccggctgctcctgcaggaaccgccggagcccgaacgtcgccggcgacgacgacgacgacgacgcgaagcactgcgccacgggctctcctcagcacggccgccattgctgctga

SEQ ID NO: 11979 - DNA, 622 bp, Zea Mays
cgaaccaattgccattttggtgcattgagcattggttcggctcggcaagaatggagtggaggaagtgcttggtctgggtgagctcaacgagttcgagaagaaggggctggaaaacctcaagggcgagctcaagtcttccatcgacaagggtatcaagtttgcccacgggaactaggcaccttgcccggcttctaacaattgatgccccttgcatttttgtttgactgcctatttttcctgccccccgtatggttggggcaatgaggcgtagtggtcgataataaaacccagcggaacaaagaaaacgtgtaccagaaactgtttgcaaacaccggtgcctttttttttgtgttgaaccaccattagttgagccgtgagggaatggtgaacaagctttccacttgctcatttccgagcgcttctctttgattgtatgcatggtttggactcatgactggacttcttggcagttggcttggcacccaggaatctaatcactggagttgctgctgttatcgagattttgcagcgttgcattctgatcggaactgttgagctggacaatttgatggttctaaatgcatcgtatggatgcttgttcgtatgcacccattgatgccac

SEQ ID NO: 11980 - DNA, 259 bp, Zea Mays
ttagatgtccaacggggacgtgtacgagcggacgcacgacgagcttgacttcgagttcctcgggaacgtgcgcggcaaggagtggcgcgtgcagaccaacgtgtacggcaacggcagcacggcggccggccgggaggagcgctacggcctctggttcgaccccacggaggacttccaccgctacgccatccactggacccgcgacaggatcattctgtctgatgacgaatactgacgcgggaaggacggaaggtgttgt

SEQ ID NO: 11981 - DNA, 1011 bp, Zea Mays
tctcggaaactgaatgatctcttggacgctcttgatttcaaccaagttgtgatattcgtgaagagtgttagcagagctgccgaactgaataagttactttgtgaatgcaacttcccatcaatctgcattcattctggaatgactcaggaagaaaggctaacaagatataagaacttcaaggaaggccacaagagaattcttgtggctacagatttagttggcaggggcattgacattgagcgtgtcaacattgtgataaactatgacatgccagactcagctgatacttatttgcacagggttggaagggctggacgttttggcacgaagggacttgcaattacctttgtttcctctgcttcggattctgatgttcttaaccaggtgcaagaaaggtttgaggtagacataaaggaactgcctgagcaaattgacacctcgacctacatgccatcataaatgggaaggacaactgagaagagaggaggataggggagtgagcagccgtctggagatggttacctttgaactatccgatctggaggatttgatttgcctcctttgtgtactttaaaaagggcagccaggatgatgatctgtattttaagacaatgctgtctgtttgggtttaggattttgctttgtcgaaaactagcacacttattgtactactgagcagcatatttgttttcatccctgggttaaatgatgcgtctaaacacttctgctggcctgaaaagagcaccaccgtcttggtctcccagcagcaggcagcattgactcgctaaaaggttacaattctcagatgcggatgagccagtcgtattcagcagcctgtagttacaattctcagatgccgatgagccagtcgtattcggcattctgtgttttgtttggttatcttttgctgagccttggaaacagtttctgtttttgcaaaagcgaaaaacaaacgcaaattaattgaagtggtgaaaaattaatggttccttttaccttattataaaaaaa

SEQ ID NO: 11982 - DNA, 1048 bp, Zea Mays
actgctcgagctcagctcaaggaaccacagaaaatggcgtcacttctccgccctctcgtcctcgtgctcctgatcgcctcctgcgcagcgcagcagtcaccgccggcgcagcccccgccaacgccgaacgcgccaccggccaactcgccgccccaggcgcctccagccggcaacccgccacccgcgcccaccgccactccacctccggccccgaccactccgcccccggccccgaccactcctcccccggctcccacaacgccgcccccggcgccgacaactccacctccggcccccaccacgccgcctccgtccccaccggcgtcgccaccgcccgctcccaccactccgccaccgtctcccccggcaagcccgccgcccgctcccgccaccccgccaccgtctccgcccatggcgacaccggctgcgtcccccaagagccccaagacgccgagccccgccgccgcgacgtccccggcgccctcgctctcgcccgcgggcacgccgacgaacgaagactcgggtgcaagcgcgcgcgcggtcggcttcgccacggtggtggcgttggcgggcgcgggcctcgccgtcttgctttgagtagtagactccgactcttcttcctgtcctcactagtcacgccgatgttgtcaccccctccgcgtgcctcgacgttgctgctcgctccatttcagtttcatcttttttttttcctttggtgttgttatttaattttaccggccctacgatcgattcttgatgtacgacgacgacgatgatgatgcattggttgctttggatccgcgggcggcggggcgggtggtggttagtgttctgcccgcgggtgtcgactcgccacgccatgtacttttaccgcactacattttggttctatagagagaggatttgtgtacattctcgtgcattatttctatggccgttgaataaaatctctgtgcagattcactcgatctcgacgaccttactagtaccggggtgctgaaatatttcgcagtcctttgtaccgtgtttggactagatcggtcccata

SEQ ID NO: 11983 - DNA, 4142 bp, Zea Mays
ccaacctggttcgatagtgatttcatcttcctctaccaggcggctccgtggtccgtgctgatcaactgcatcaaggatcgtcgccggcggcgcgctggcagcagttcgcacggcgagatcggattgatcgagatcttctaggcctggacctgcgctagacctcgaagcctcgatcgcaccgcatcttctctctctgctgctggtccgctccgtcgccgccgaccccgccgccagcttccccttccacctaaaaggacgacctctggccgcccttgtcccgccccgacgcctcggtttccactgcataggcgtggtgcggcgatccgtccgggcctagggttgcgagagacactatagggtacgaccctaggagcatccgcctccacgtgggtgaggcggaagagggaggatgacatcgctcagccgtgagctggtcttcctcatcctgcagttcctcgatgaggaaaaattcaaagagacagtccacaagctcgagcaggagtccggattctatttcaacataaagtactttgaggacgaagtcctcaatgggaattgggatgaggtggagcgctaccttggtggattcaccaaggttgacgataaccgctactccatgaagatattctttgagatccggaagcagaagtatctggaggctcttgataagcatgatcggtcaaaggctgttgaaatcttggtcaaggaccttaaggtctttgcatccttcaatgaggagttgttcaaggagatcacacagcttctaaccttggagaattttagggaaaatgagcagctctcgaagtatggtgatacaaaatctgcaagacaaataatgcttgctgagctgaagaagctgattgaagctaatcccttgttccgtgacaaactacaatttcccagcctgaagacttctaggttgcggacacttattaaccagagcttaaactggcagcaccagctttgcaagaaccctagacctaatcctgacatcaagaccctttttgttgatcattcatgtggacaaccgaatggtgcacgtgctccatcaccagcaaacagtccgttacttggatctatgcccaaacctggaggtttccctccattgggtgctcatggaccttttcaacctgcaccaacacctgtcccacctctggctgggtggatgtcaaaccctccagcaataacacatcctgctgtgtctggtggtgccattggatttggcactccaacaaatcctgccgttttgttgaagcatcctagaacacccacaactggtaatcctggtatggattatccatcaggagattctgaccacatttccaagagaactagaccggttggcatgtctgaggagatgaatcttccggtgaacatgctgcctgtgacttatccacagagccataattaccaacaagatgatttccacaaagctgttgcacggaccttgagccaaggatcagcacctatgagcatggatttccatccacttcaacaaactcttcttcttgttggtaccaatgttggcgacattggattgtgggatgttggtaccaaagagagactcgttgtaagaaacttcaaagtctgggaccttggtaaatgtacaatgaccctacaggcagcactggttaaggacccagctgtgtcagttaatcgcataatatggagtcctgatggaaccttgtttggtgttgcttattcaaggcatattgtacagatttattcctataacggtggcgatgatattagacaacacttggagattgatgcacatgttggtggtgtaaatgacatagcatttgctcatccaaataagcagctatgtataattacatgtggagatgataagacaattaaggtatgggaggccactagtggagctaagcaatttacctttgaaggacatgaagctcctgtttattctgtgtgtccacattacaaggaaaatattcagttcatcttctcaactgctttagatgggaagatcaaggcatggctatatgataatttgggatctagagttgactatgatgcaccaggtcattggtgcactacaatggcatatagtgcagatggttcaaggttattttcatgtgggactagcaaggatggtgaatcacatctagtagaatggaatgaaagtgaaggagcagtgaagagaacatatcagggattccgtaagcgatctatgggtgttgtgcaattcgataccacccggaacaggtttttggccgcgggggacgaattcatgattaagatatgggacatggacagcacgggtcttctgactaccattgatgctgatggtggcttaactgcaagtccacggatacgcttcaacaaggagggaactctattggctgtctccactgctgacaatggtatcaagatcttagcaaatgctgatggacttcggttgctgcgcacactggaaaatcgttcttttgatgcttctcgtaatgcatctgaggctgtaacaaagcctctaataaatcccttgactgctgcggcaaatgcagctgcagcaagcagttcaggagctggtgctccgtcagctataactgcaatgaatggtgatagcagaagtttggttgatgtaaaacctagaatagctgatgagtcacttgacaagtcaaaggtatggaagcttatggagataactgagtcaagtcagtgcagatcaatcaaactggcggataacatgagaacaagcaagatttcgagattgatttacacaaactctggtcttgctatcttggctttaacttcaagcgctgttcatctactctggaaatggccacgcagtgatcggaattctggaaaggcaaccgcaagtgtatctcccactctatggcaaccaccaagtggcatcttgatgactaatgacacgactgacaataatcctgaagaagctgttcactgctttgctttgtcgaagaatgattcatatgtcatgtctgcttctggaggaaaaatctctctgttcaacatgatgactttcaagacaatgacaacgtttatgcctgcaccgccggcagcaacttttcttgcatttcatccccaagataacaacataattgcaattggaatggatgactcaaccatccaaatctataatgtccgaattgatgaggtcaaaagcaagctcagaggtcactctaagagaatcacaggtcttgccttttcaaatgtgctaaatgttttagtctcgtcaggagctgatgcccagttatgtgtttggaacacggatggatgggagaagcaaaagaacagatttttgcagataccatcaggtcgccaatccaatatcttggacactcgtgttcagttccaccaagatcaaatgcactttcttgttgtgcatgaaacccagattgccatctatgaaactacaaaactagaaccagtgaagcagtggcctgttcgagagaattcacctccaatcacacatgccacattctcgtgtgatagtcaactgatctatgcaagctttatggatgccactgttggcatatttaatgggtcgagtttgagacttcaatgtcggattcttccagcttcgtatcttcctccaaatatcagtccgagcgttcatcctgttgtggttgcggcacacccttcggaagcaagccagtttgctctagggctgactgatggtggtgtttttgtgttggaacctttggaatcggagagaaaatggggaaatcctccaccagtagagaatgggtctgctagcaacttgtccacaccgcctcctaatggagcttcaagttctgaccaaccagaaagatgattaagaagttggaactggtagatttttcgtggcacgagtctaaccaagaagacagggcttcaaagggtggtgcgactaaccttggcagataggttccaagggagccggacaatgcgctcaataaaaataagttcaacagaagtttgtccgttgcttgtataaatatttgtattgactatcgagtgaggagtcctagtatttcatttttgctttgtttgcggtgctgtgaaaaggatcagtagataagctgtagtacaacaactatcagactggctgtacttacctatatttatgactattagttaatgtatgttgtttcatttgcctttttggctccgttcaaaca

SEQ ID NO: 11984 - DNA, 744 bp, Zea Mays
gccccttctatataaaggccttcatttccgttcgaaaagccgcgtgcaagcaccgcagaaacaaacaaaaaaacacccgggaaatccaagcagctgttgcaaccggttccttcgaggagaacgtgagaaagaagcatgaggccccaggtgctgctcgtcgcactggccgtcttcgccgtcctcgtagctctgccactgggcaaagcgcacgaggaggaggaggaggaagggcttgaactcgaagccagcaggaggcggtggccgtgctgcgaccagtgcggcatttgcaccaggtcgcagccgccgatatgcgagtgcagggacacgtcgacgaccggctgccacccggcttgcaaggcgtgcgccctgtccatctccgacggcctcttcgtgtgcaaggacaagatcgtcaacttctgcaagcgccgctgcacccgtcgtactgatgatgatgatgcgtgacttataatctaagtgggcaaataaccttgccaataaataatttccgttcggagctccatttgcatctttctcaagatgcagacgacagggtttaaataatcaaggcgatgcttgcttgctcgtcgcctttttactcgtacagtttctgaaataaagagcatgggtatgttatgctcggagatatatgtagtcatgagacgtaaaagaatgcaatatacgctttggttatgtgcatctttagatgccatagaccgaggcatgattatttcgcggtgataaaca

SEQ ID NO: 11985 - DNA, 744 bp, Zea Mays
aactatgagactagcagagctactcgaagaggaaggagctgatataatccaaactgagggtgggaaatgttctagcccgacaaaacctggagtgcttggattgattgaaaaggcaacaccaacactcgccgcagcatactccatctctcgggctgttagtattccagtgatgtgctcgtcagggttaagctcggtgactgcaccaatggcagtaactgcaggagctgctggagttggagtcggttctgctattaacaaactcaacgacgttgtggcaatgatcgctgaggtgagaagcattgcgcaagcaatggagcttgcgccaagaatcgtgtccgaaaccctgagaacaattagttactagtggctaggaatacccttgccatttctgagcaaacttgagcagtcaataagaaagcaaaagagaggcatcgactctgcattttattctctctacgctgtcttttgcctgtggcagtgaatagcgcattagcatcatagaagtattagcttgatcaatggaagttgttcatgcgcttcttcatcgctgcaagtgttgtcatcttgtcgaactcacaataagcttagataagtgctgggtttgtgggaacatcgtttgtgcaatataaatgagatcttgcacctacaaatttgactcttctttttgtgctgtgctcagagaaattctatacctagaaaagttcacgagcttcaaatagtacacttgttgatacaagacctaga

SEQ ID NO: 11986 - DNA, 1291 bp, Zea Mays
gttgaaaccgtagaagaatctcttgctggcaccgacactgaagaaaatggaggtggcggatgtctaaaattatttacaaactggccgttgatgtcagctattactttatattgtatcttctctcttcaggatgtggcttatgcagagacattctctctttgggctgtcagtgacagatcgtttggtggattaagctttactaccacagatgtgggcaatgtccttgcgatgtcaggtctcttcctttttctatatcaaatgttgatctatccgttccttgccaaaacggtggaccacatcacattagtccgtgcagtggcgttattgactctaccggttcttgctagctacccattctttccttcgttgtccgggttcgggctcatggtggtagtaaattgtgcatcttttctgaagaatacattctcggtaactaccattaccgtgttcaacattttgatgaatgaagctgtgactcaggatgtaagagccgcagccaatgggatagctgtaacactaatgtccatctctaaagcggttgctccagctgttgcaggaatcatattttcgtgggcccagaggcgtcaaacagctgcatttcttccaggcgaccacttggtgttcttcatactgaacatcttcacgttcatcggtttcgtcttcaccttcagaccgtttttcgttcgaggcagtgccaagcactgaaacatggatgaaccggacgacgacccatggtatcctatccaggggcaatcgaatataaattttcttccggcgtggccaagggaggtgccgagtctgtaccagtacgacgactcaggccagaacacacggcgtatggtatggtacacagcaaggccgtgttgttgctgtaagttttgtaatttctgtttccttctcggcttcgcagcatgcagttgctgtatatgatggaagaacactctgttactgggcatgttgcgcggtttccacgcgtgtaagtaatgtagaagtcgctatggtaggtatttccataccgtcattagtggatcattgattttttttttgtaagaaggttattgcaatgccctttttccgggcatgaataagaaaaaggaaatatgcttatatgcatggtatgaataagtgagcaatagacttgtactgtgttcttgatttatttaaaatcagactaagagaactggtgacattttaaaccattcgtacaagaaccttgtactacctcagcacgttctcatttgaccatgcaattctggtcggtgaaattcttttcagccttgtgttggcgcca

SEQ ID NO: 11987 - DNA, 1246 bp, Zea Mays
cgagaagtgcaatggttaattttatcacatgcctctcctatcaggattgatctttacacatacagagcatcctgatctcatcaatgatatgctgaatgtgcttgcacttcgtttagatcataccagagttgtagacataatgcgcaaggctggtcaattgcatcttgtgaaaccatatatggttgcagttcagagtaacaatgtctctgctgtgaatgaagccttgaacgaactttatgttgaagaggaagactacgagagactccgtgaatcagttgatatgcatgacaactttgaccaaataggtcttgcccagaagcttgagaagcatgaattgctggagatgaggaggattgctgcctacatttacaagaaggctggcaggtggaagcaatccattgctctatcaaagaaagataacatgtacaaggattgtatggagacatgctcacaatctggtgaccgtgaactgtcagaggacttgcttgtctatttcatcgagcagggtaagaaagaatgctttgcttcctgcctcttcatttgctacgacctgatccggccggatgtcgctcttgagcttgcatggatgaataacatggtggactttgccttcccgtacctgttgcagttcatccgtgaatacactagcaaggtggatgatttagtgaaggacaaaatcgagtcacagaatgaagaaagagccaaagagaaggaggagaaagatcttgtggctcagcagaacatgtatgcgcaactgcttcctcttgccctgcctgctccgccaatgcccggcatgggtggccctccacctccgatgggcggaatgggcatgcctccgatgggcgggatgggcatgccgccgatgggccctggtccgatgccagcattcgggatgccaccaatgggaagctactgagatgttttttttggcagagagcttagatgatgatttgatatgttcctgtgtaagcagaggcggaaacctcattggagttgtagatggttacattttggaattaatattctttatggtaccaggaaatttttggcgagtgaaatcttggccagagtcatcggataggacggggatgattaggttggttgagcatgagctggtgaaagctggtaccatttgtatagtgtgatgaaatctttgtagacattttgcttgtgtaataataatacttgttcgcacagcgaaggacaaacaaatgtatgctgacttgtgacgtcctgttcattgcaa

SEQ ID NO: 11988 - DNA, 544 bp, Zea Mays
cagcccatgtgaaaacctccacgcgattattgcatcttatccagacagccccgcactcctctcttcagtctctctccccttcgcggctcccaccgcgtgccgccgccctacaccaggtgccccccacgtctgcatcgggcccgtctccggcgacgaacgcccagcagttggcaagacatgacattggcccttgatcaaaagcgatggaagaaagcttttgagaaaaagcggcagcaaccttaagctcattgttctttccaacttcttgggccagttggatgagcactgtttctggtcatcaattgtggcgcatgaagcttcaaagttctctctatatacacatgatgtattgactgaggttctacttttggttttcttgtttagcgttacaactttctcagtttatgcatttggtccatctcagatcatcagatgacattcagaatgatttgtctattctcaaaatctctattatctttttaacatgctgctccctccgtggctccgttccaatgttctgccttttatatatatattgcttttg

SEQ ID NO: 11989 - DNA, 1392 bp, Zea Mays
atgtttgcgccttcctctctgtctgcacaggaagagaagcgcatgcaaacatactctccccaaatcattgagttcttaaactacaagactaacgttggaagctataaggagaacagaaatgaagacagtaaagctagacctccacaagaagttccattgaatgacagcgttccagatgagcatttgaagaaaattaaattggaggatgtttcatgccctctctgtatggagatgctgtatcaacctgctgttcttaattgtggtcatgtgtattgtgtatcctgtttgtcatccttgaatgaggaaacgctgaagtgccatgtttgtggaagtcttcaccctggagatttccctaatgtttgcctggaccttgatcatttccttgaagaatattttccagcagaatatgaattgagagggcagaaagttcaatttaagaaggatcagtgcaatcgtgaaacatcatcttcaggtacttcaggcagaaaaggaagcactagggcactgcatgctgaagacccgtcaaatattcacattggagtaggatgcgactcatgtggggtatatccgatacgtggtaagagatacaaatgccaggactgcactgagttaataggctttgacctttgcgaagcctgctacaactccagttcaaagctcccaggacgctttaaccagcggcacacccctaatcacagaatggaagttgacaattcagcactcgtgcataggatactgagacaccatggcatacccgaggaaggccctgagggactgatgatggaagtggttggtcctgatgcaatggtgcagatactcattgataatcaaggaatggaggagggcaatgacgagggcccaggagaggcggccattgaagaaccagttggttctcttggctcaatgtcgcgtctgtcgcatctattcatgtataatccagaaatggaggatggcaatgacgaggactcaggagaggaggcggccattgaagaaccagttggttctcttggcgcaatggcgcctctattcatgtatgatcaagaaatggaggacaacgaggaggatcaggcacactagatgcagattgcaccagctgcagcgaagcctttgttttgtgttgctggggcggctctacttatgtaatgtggaatggagggattgcgcaagcttaaaagtatggctggatcggccttgttttttaactggttctctagttactgccatctaatagccaacatttttcccgcttttgtaaatccgtgcagttgtttgtttcaaaggaaaatgcaataaggatatgcagaactatattccttattttaaactctactcctttcgtcccgtgaagcaagtcattttaggctatccgcaaccattacctctaaatttttt

SEQ ID NO: 11990 - DNA, 156 bp, Zea Mays
tgacagaatgattaggagttgattctctctcttttttttagcaatgtatcaagtccgcccactcgcccaaaaccgcggtgggcggcgctgttctgcttctgtgaccgtatagaaacgacttgttcttcgacattttgaacacgtgagtccccgtct

SEQ ID NO: 11991 - DNA, 233 bp, Zea Mays
ttccatttgctgttataggatcatgttgctagttgcccaaatgaaagagaacgagtaacaaaggcggggactgaagtaaaatggcaaatagatacgtggcgagtgggttcagctgctcttcaggttacaaggtcaattggtgatgatgacctcaagccagctgtcacagcacaacctgaggttattgaaactgctttatcagctgatgatgagttcctgtttcctgcatgtag

SEQ ID NO: 11992 - DNA, 2916 bp, Zea Mays
taaaaactactggctgcgaaagaccacagacatgcggaaggacgagagaaagaaacatcgtaaaatattgggggcttctattcggccggatctctctcttctctctctcccaaccaagacgtgttgagctgtttcccagtccttcgtcgctttccctccgctcaggcctcagcagcatcagctccccaccccaccccacgcctcccctcctcttccttcataagctcactctcaaacggaggtggagcggagctagcttctgcagggtaccactagtaccagtaacctctggggattttcctgtgagaagagggattggcattggactggactggagcttgggggggagccaaaagcaaaaagaagcccaggattagcgtgtggcggattgcgtggctatttcgggaggcgagagaacgagaggcgtggggcctaggccgggggaggcggcggctccttggaccggccattgatggcgccgtggagcggcttctggggcggcaagcccggcggcgacgcctaccggggcacgccggtggtggtcaagatggagaaccccaactggtccatctccgagatctcctcgccggaggacgacgacgaggacatcttggccgccgccgccgccgccggccgccgcaacaaggggggccgcaccaagaacgccaagcagatcaggtgggtgctgctcctcaaggcgcaccgcgccgccgggtgcctcgcctcgctggcctccgccgccgtcgcgctcggcggcgcggccaggcgcagggtggccgcggggaggaccgacgccgaggccggcgtcgtggccgccgccggcgagagccccgtggtgcgctccaggttctacgccttcatcaaggccttcctcgtcgtctccctgctgctcctggccgtcgaggtcgccgcgtacttcaacggctgggacctcgccgcctccgcgctcgcactccccgccatcggcctcgagtcgctgtacgcctcctggctgcgcttccgcgccacctacgttgcgccggggatacagttcctcaccgacgcctgcgtcgtgctcttcctcatccagagcgccgaccgactcatccagtgcctcggctgcttctacattcacatcaagcgcatcaagcccaagcccaggtcgcttgcattgcctgatgcggaggacccggatgccgggtactaccccatggtacttgtgcagataccaatgtgcaacgagaaggaggtgtatcaacaatcaatcgcggccgtgtgcaaccttgactggcccaaatccaacttcttggtccaggtgttggatgactcggacgacccactcacacagactctgatcagagaagaggtggccaaatggcaacagcagggtgcccggattgtgtacaggcaccgtgtgctgagggatggttacaaggctggaaacctcaagtcggccatgagctgcagctatgtgaaggagtacgagtttgttgccatctttgacgcagacttccaacctcatcccgactttctgaagcgcactgtgccacatttcaaggacaatgatgagcttgggctagtgcaagcaagatggtcctttgtcaataaggatgagaacctgctgactcggttgcaatatattaacctttgcttccactttgaggtggaacagcaggtgaatggagtgttcttaaacttctttgggttcaatggcactgctggggtgtggaggatcaaggcattggaggactcaggtggatggttggaacggacaaccgtggaggatatggacattgctgttagggcacatctccatggctggaagtttatattcctgaatgacgttgagtgccagtgcgaattgcccgagtcttatgaggcttacaggaagcagcagcatcggtggcattcgggtccaatgcagctattcaggctttgtttaccggacatcatcaaatgcaagattgcattttggaagaaggcgaacctgatattccttttcttcctgctccggaagctcatactgcctttctactccttcacgctgttctgcatcatcctcccgatgacgatgttcgtgccggaggccgagctccccgactgggtggtgtgctacgtcccggccctgatgtccctgctgaacatcctgccgtcccccaagtcgttccccttcatcatcccgtacctgctcttcgagaacaccatgtccgtgaccaagttcaacgcgatgatctccgggctgttccagctggggagcgcgtacgagtgggtggtgaccaagaagtcgggccgctcgtcggagggcgacctcatcgcgctggccccgcccaaggagcctgtgaagcacgcgacgaggacgggctccgcgccgaacctcgacgccgtcgccaaggaggagcaacagcagcagcagctggcggcgtcgaggaaggacgccgccgcgaagaagaaggagaagcacaaccggatatacaagaaggagctggcgctgtcgatgctgctcctgaccgcggccgcccggagcctgctgtcgaagcagggcatacacttctacttcctcctgttccagggcgtgtccttcttgctagtaggccttgacctcataggcgagcaggtcgagtgaaatgtgtaaaacaggaaattgataggtgtggggaaaaaaaaacggtgagtcaccatggatggaagtgctgggagaggagggggatgtgttatttctggctggctgccatggcacggcggcatggcatggcatggcagcagctcttgggcgcttcttggctgagattcggaacatgcgttgtgcggttgagccttcccggatctgtcctggctgcacggcatggtatcccacacgtgagagagcaacctcctccgcctgtacggaggtgtagatacagttttctcttgttttttcatgtgtgtgggcctgtagga

SEQ ID NO: 11993 - DNA, 674 bp, Zea Mays
cacaagctccgaattttaagtttacctcgtgtcaacaaggaaatcgtcaaaatgcagagagtgaatgctccagctgggcagatgcagctaaagggcttgattgaggcctatgttgataaaacgggcagcgagaaaggtattgcgattttgagggaatgggaggcctatttgccgctcttctggcaactggtaccgcccagtgaagaagactcgcctgaggcttgtgcagagtttgagagagtacttgccaagcaagcaaccacccaattgtctgcgaagtgatcgaatcagactacaggaaggtggtaggtgttttctatttgacacaaagtgatctcatcttatcacttcaagaaaatcgaagaccataaccggcgctctgaggcaccgaagtgcccgtctgaagactgcaactttgtggaggctctgcccaggccatctttttgagttgagctaacagaaccgagggttcttctcgacgctcgtgcacctaggtaacccctgtaaattggtttgctgacgctaggctgcaaggggcctgccctgtttgaactgctgtactgtacatgattcttggccgttgccctgtgtaattatgttttggttagctcgtaaatttatacgcatccaatggaggcatacaatgcaaaaaaataattaagatacaacaataa

SEQ ID NO: 11994 - DNA, 1792 bp, Zea Mays
gtcagtttcttatgaacacgccctcaactcaactggccagctgctgtggggactctgcaaaggatatcacttacaaagtcgtcgtgcaagtttgcgctcaaggggctcaagaactggatgaagcccgagaaggtacctgcggccataactacattcccgtcctccgcccaaatcgtgccggagcccctcggcgtcgtgctcatcatctcagcctggaactaccctttcatactctctatcgacccagtcattggagcaatcgctgctggaaatgctgttgttctgaagccatcagaaatagcgccagctacctcgtcactgttagcaaagctgctacccgagtatgttgacaactcctgtattaaagttgtggagggaagcgttccagaaacaaccgcactcttggaacagagatgggataagatcttctacacaggtaatggaactgtaggacgtatagtgatggcagcagccgcaaagcatctgaccccggtagctctggagcttggtgggaaatcccctgttatcgtggattcaaatgttgatctccatgttgctgctaagaggattgttgttggcaaatggggatgcaacaacggccaagcatgcattgctccagattacatcataacgacaaaatcatttgcaccggagctggtggcctctttcaaaagagttttggaaaggttctatggggaggatcctctggaatcagcagacttgtctcgtattgtgaattcgaagcagttcaaaagattgacaaatttgatagaagaaaaaagagttgctgacaagattgtgtacggcggcaaggctgatgagaagcaactaaaaatttctcctacactattgttagatgttcctgaagattcagaaattatgacaggcgaaatatttgggcccttgcttcctattgtgacggtcgaaaagattgaggaaagcttcgacttgatcaatgccaagcctaagccactagccgcctaccttttcaccaagaataggaagctgcaagaggagtttgtggcaagcgtccctgcaggagggatgcttgtaaacgacactgcgctacatctcaccaacccgtacatgcccttcggcggcgtcggcgacagcgggatggggtgctaccacggcaagttcggcttcgactgcttcagccacaagaagggagtcctgatccgcggctttggcggggaggcgaacgccaggtacccgccctacacgacggagaagcagaagatcctgaggggcctcatcaacggcagcttcatcgccctcatccttgccctcctgggcttccccagggagaagcgttagatgctccggcctcttgtcggtttcggtacagcctttttagtccctgttcgtcgtcaggtgcacagtatacaccgtcatattctgtcaaatagatgcaatgcaacgactgcgcgccgtgcttgtgttgcaagcgtggataatgcatatatattgtagcattgacatgatgtgcgttattgcattacgtaagggagttggataaataagtgtgatttgtttgtcaattattcagtgttgagaatggatgatacttgcatacagtttacttcacgatttaggggactaaagtttagtctgtttagttttagtgactaaaagtactcgaaacgcatcaaatgacacttataagaagactaaaatatcttttaacatggtgaaattaatatagtttaaaggtgaaattaatatagtttagtgttttttagttatcctttgagacactaggaattaaaacagggaagtgtaaatgaaataa

SEQ ID NO: 11995 - DNA, 2260 bp, Zea Mays
tacaaaaccaacacagcgcaataggaaaaggaagctgcgctcactgagtttcaggctctggactttccctgttcttgtagacggcccctttggagttgtctctgcagttgagttcatcggaattgtcttgtttatagtttttgttgtctactcaatgacctattatgccgtggaagctgtgagccttgtctcgaaatttgatatcccatcaatgactgagaggggcggttgggttgttctgcatgctcttcctcttcctgccagtcgcccgaggctcggttctcttacggcttatcgatattccatttgagcatgctacaagataccacgtctggttggggcatctcacgatggctctatttacattgcatggcttgttctatgtgatctcatggtccatgcaagggcgcctccgtgaagaactgagacagtggaaggaaattggagtagcaaacctgcctggtgtgatcagcttggcagccggcctacttatgtgggtgacatcacttcacccagtgaggaagaggttcttcgagctcttcttctacacccaccagctctacgtcgtcttcgtcgtgttcttggcgtttcatgttggtgacttcatcttcagtatttgtgccggagctgtgttcctcttcatgctcgaccgctttttgaggttctggcaatcaagggccaaagtcgacatcatttcagccgcctgccgcccgtgtgggacggtggagctagtattctcaaaaccagcaagcctccactacaatgctttgagtttcatcttcattcaagtgcgcgagctatcgttcttgcagtggcacccgttcagtgtatcttcaagtcccatggatgggagataccacatgtcggttctcataaaagtactcggcacgtggactgaaaaactgaggagcatcatcaccgatgtacaggagaagaacgggggtgactctgagctgcaatgcgggcgcatgacagcctgcgtggaaggcccatatgggcatgaatcaccctaccacttgatgtacgagaatctcgtcttggtcgcaggaggcattggaatatcgccattcttggcgatcttgagcgacataatccacaggatcgaggagggcaagcaatgcatgcccaagaacgtgctggtcctttggtcagttaagaagtccaaggagctttctctgctgtccgccgttgatgcccagaccatcagctcatctgtctcggacaggttgcaactggatatccaggccttcgtgactcaagaaccccatcctcctttggaggatggcatcgtcggggacgaccagaaagtccctggcatgttcgtcaagaacggtacagccatgtctgggctggtcggcaccggggacaacttctgggcggccatgtacttcctggcgtccacgctcggcttcctcctggcgtacgccctggtgcaggtgtactacgtgaagccgcacaacgtggtggcgtggtggtacctgggcctcctgttcatgctgtgcatggttgccggcgtcgctctacccggcgggctcgtggtcctcctgtggcatctgtcggagaagcagaggttggaggacgacaagtgggacgcctctcagtcaccgcgcgccgagcagacaggccccttggctgcggcgggtggtggtgacgacgacgctgctcccagcgtcagcctcgccgccctgcggacgacccggtacggctgccggccgaacttcgaagcggagttcgcggcgttcgcggagcgcgccggggacgcggcggacgtgggcgtgctggtgtgcggaccgcaggggctgcagacgagcgtagcgagggagtgcagggcgcggaacctccgccgcggcggcttgggggcggccaagagcaggagcggcgcggtcttccatttcaacagccacagcttcgacctgtaaactacgtacgtctcgtttggtcggttcaacgatcatcagtacatgttgcacagcacacacgcacagacgatagttggatgtacatgttgatccgtcataatttgatatcgtgtatatatatgtatagctgatagttaatatagttaagttatataagagatgtataaatctgtatgcgtatactataggtgtagcatatgcatgcatgatagaagcacgaaggttaaatgctgacgaatcacgtgaaatcatgtcatgtttcgcgtctaatgcgtgaatttgtatttttcttatgcgtttgtgagtacgtcaaaactacgttgcaacgcaagatttatctt

SEQ ID NO: 11996 - DNA, 1620 bp, Zea Mays
gcggtgatcaagacattttttttgttttatctgcctacaactacaatttgagggtttggatgtgacagtacaacagtgataaacatacttactcatcgcgattcggtgcagcgtggactcattcaacaggaatacagggctatgtatcatgaggaactctcccaccgtatttcatctgaactcagtggaaaccacaagaaagctatgtcgctgtggattcttgatcctgctggacgtgatgcaactgttttgagagaagctctaaatggtgacactatggatctgagagcagccactgagattatatgttccaggacaccatcacagttgcaaataatgaaacagacttattatgctagattcggtacttatcttgagcatgacattgctcaccacacatccggtgatcaccagaagcttttacttgcatatatggggattccacgctatgaaggtcccgaggttgatcctacaattgtgacacatgatgcaaaggatttgtacaaagctggtgagaaaaggctgggtacggacgagaagatttttatccgtgttttcactgaacgcagttgggcacacttggcatctgtttcttctgcttaccatcatatgtatgaccggaaattagagaaggttatcaagagcgaaacttctggaaactttgaatttgcacttttgactatcctcagatgcgcggaaaacccagcaaagtattttgctaagctcttacgaaaggccatgaaaggtttaggcactgatgacatgacacttataagggtggtggtgacgaggaccgagattgacatgcaatatatcaaggcagagtacttgaagaagtacaagaagccattagctgaggctatcaactccgagacatcaggaaactatcggacgttccttctttcacttgttggtcatggccattaggctatgtttcgaccatgggacatgatatttctatcgatccaccctaaatgcagcgacctacctggaaaacttatgatgttgccatttatctgtcgtgactcctggatctaactgccacatatcacatatgcggttcctagtatgcttgtttaaagtattcgtgtatatatttccatccgggtttcttgttggaagattctggatgggataccagatcagctgttgctggtcacagtgggcttgactggtgtctctatgacgccaatattattatgtcatgttcttgtggtatttccttcatttgttattctgtttttcgctgcttatcccatatccctgttttctccgtccttcacggagaccaacgtcttaggacataacccagagatataggggtacgtttcttggagtataaaagataggttttgtatcttattgtaagatatgactcatacgagggttgtatatatgaagctgtttgttggacttaaaagaaccgtgttaaagatatgtcattgttagaacaactactccctccgtttctttttatttgttgctggatagtgtaattttacactatacaccgacaaataaaaagaaacagagggagtacaagagcttcctaaaaagttgttccccaaaacatcatattaggggctgctgaaaaacaaactcctctaaaaaaaatctaaa

SEQ ID NO: 11997 - DNA, 315 bp, Zea Mays
aggcaaaacagccccagaccgcgtgcgtttcgcttctgcccctgctgtttctgtttcttggcgtccatcccctctttctctcgtggcgacgacggcgaccgtcacaccccccctatgtgctaggtgccagggtccgtcgggtccttcgctggcgacgagcaactaccaggcgacccagtggtgtgttcgggaacgtttccgcgggcgggcggcggcccccagtggcgaagatgatctgactaccgacgtacgcagcacgaggcgttcgttgccatcttcttctcctttgagcaaggggtatgcattacaggctag

SEQ ID NO: 11998 - DNA, 646 bp, Zea Mays
ttcagttcctggagttcctgatgtgagcaaatccacatggcaatcacttgtggtggagagcgagcttcccgtcctcgttcagttctgggcctcatggtgtggaccgtgtaagatgatagaccccatcgttggcaagctctcgaaggagtacgaaggaaagctgaagtgttacaagctaaacaccgacgagaaccctgacatcgcgacccaattcggcatccggagcatccccaccatgatgatattcaagaatggtgagaagaaggacgcggtgattggagccgtgccagagagcaccctggtcacctgcatcgacaagtacgttggtgggaggtgaaatctcaatctgggccactagccttggacttccatatgtagacggatgggtatgtgtataccgttcatatcgaactgctgttgagtagttgtatgtagataataatgtgatgctcactccaataaatgcgattcaaggatgggcaagtcatctggatgaaaggttgcttttggtctagctttttaggttctatgtttcattcattgagttgtggtctgtatgtagatctgatgagtcatatgcagctaattttcctcacgtgaatcagcatctgattgttctcgattggtgagttaatcgatcaggagc

SEQ ID NO: 11999 - DNA, 1527 bp, Zea Mays
cccatgcctgccaggctgtcatgccatgatctgttgcctgttccttatgtggcgcttttacactacctatgctagtttgcctgatgctacatttccacgatggttaagctgactatgatagcgcgtgtcactgatggccttccattgtcggagggattagatgatagtcgggatctcaaagatgctgacttctacaagcagcaagcaaaactgttgttcaagaacttgtccagagggcagcatgaggcgtcaaggatgtcaattgagacaggaccgtaccttttccactacatcattgaaggccgtgtttgctatttgactttgtgtgaccgttcttatcccaagaaacttgcattccagtatctcgaagatctcaaaaatgaatttgagaaagtcaatggcagccaaattgaaactgctgcaaggccatatgcatttattaaatttgatgcattcatacagaagaccaagaaactgtatttggataccagaacacagaggaaccttgctaagctgaacgatgagctctatgaggtgcaccagatcatgactcgcaatgttcaagaagttctcggtgttggtgaaaaactagaccaggtgagtgagatgtcaagtaggttgacttcggatactagaatctatgcagagaaggcgaaagatctcaatcgccaggcattgattcgtaaatatgcccccgttgctattgtgattgggatagtagtgatgctcttctgggtgaagaacaagatatggtgactggtgccatcttgcgttcacagttatcatgctggaaccagctgagttgtcttgtcttccctcgtgcaaccatatgtttgatcgtggttccaaaaagaaaagaaagatggctcgatggtttatcccgcatctgccgattcaagcgactactttagctatcaaaagcaaaaccacggtagtagagatagccttggaactgcacatttctattaactggacatgtataatagttctcgtgagcgcacaccatgtaatcgtcgaaattcatccatgtgttgtgacattttttgagcacagttgaacatgtggtggagcctggaggcaggtcattctcagcccaatctgacgtaataggtgagagggctattgcataacaggtggacctagctaggagaaacacaacatgaccccattatgggtcttgttcaatcatcatcatcgaagagacaaaggtcctgtttggggttctttctgcttctctcctctctctctctctctctctctctctctctttcataacttggttgcaaatgattgagtatcctaggatgtggtggtttatgttcatgaagcatgtatggcgcttgtgttgttgctcttgtaactaatactcatgtagtggaactagcgagtagtgctaatacaacactagtattgcttagtctttgcacacttttattgatagtatgtgaggaacttctagtgttcaaactcagcaccttagtaaggggtgtttggttagagggactaaagattagtctctagttttta

SEQ ID NO: 12000 - DNA, 1851 bp, Zea Mays
cgcatagtttttcgttggatgtttttgctcatcgcgtggatagccgtgggcccacaatagtttctgtaaatcttgaggccagatcaatggctgacggtgaggatatccagccacttgtgtgtgacaatggcactggaatggtcaaggctggctttgctggtgatgatgcgcccagagcagtgttccctagtatagtcggccgccctcggcacacgggtgtgatggttggaatgggccagaaggacgcctatgtaggtgacgaggcacagtcaaaaagaggtatcttgaccttgaagtaccccattgagcacggtatcgtgaacaactgggatgatatggagaaaatctggcaccacaccttctacaatgaactgcgtgttgctcctgaagagcacccagttctgctgacagaagcacctctgaacccaaaggcaaacagagagaagatgacccaaattatgttcgagacattcaatgcaccagcaatgtatgttgctatccaagctgtcctttccctgtatgccagcggtcgcactacaggtattgtgctcgattctggtgatggtgtgacccacaccgtgccaatctacgagggatacgcgctccctcatgccattcttaggctggatcttgctggccgtgatctgactgactgcctaatgaagatcctcacggaaaggggttattccttcaccacgacggcagaacgggaaatcgtgagagacataaaggagaagctggcctttgtggccctagactacgagcaggagctggagaccgctaagagcagctcctccgtcgagaagagctacgagctgcccgatgggcaggtcatcacgatcggcgcggagaggttcagatgcccagaggtgcttttgcagccgtcgctgatcgggatggaagctcccggcatccacgagaccacctacaactcgatcatgaaatgtgacgttgatatcaggaaggacctgtacgggaacatcgtcctcagtggagggacgaccatgttccctggcatcgctgacaggatgagcaaggagattactgccctcgcgccgagcagcatgaagatcaaggtcgtggcgcctcctgagagaaaatacagtgtttggattggtggctcgatccttgcgtcgctcagtacgttccagcagatgtggatatccaaggatgagtacgatgagtctggccctgctatcgtccaccgaaaatgcttctgagctagctatctgccgcgcctttcatagcgtgtcaagctgttgagatctgcgttgttgagttgagtgtctctatggagtatcacatactttctgcatgaggggggaagagtatacccaactaagcgcatgcctttcggatgccctgcttcgtgattcagatgctgctttctttcaagtgatatgtcgatgtagtgtgcgagcaatgtatttggtttggctacagctgttcctgtcgtctgtgcgtaaaacattagctatgtatctatccatatctgcatatttgaatgtatggtcgttttctcatatggtgtcaagttaaaattcttatgttctcttattaaattttagttacccatatgtggccataatagccatgatatcttgtgaaagggtctttagctgggttggttggttggtctaataagtataatattttgtgaaaggggatttagctgtggtggttggatgatctgaataacacttctcctgtcctgagtttaaaaatatcttgtctgttattctagggacttttttttaatataataccaatgagctatcttatgagtttgttttgcacaaaaaatgaatcaaatttgacaaaagtacttaagcaaaaataggagaattgccg

SEQ ID NO: 12001 - DNA, 151 bp, Zea Mays
gggaaacttaccaggtccagacatagcaagggttgacagactgagagctctttcttgattctatgggtggtggagcatcgacgttcttagatggtggagcgatttgtctggttaattccgttaacgaacgagacctcagcctgctaactag

SEQ ID NO: 12002 - DNA, 963 bp, Zea Mays
ccgcgcagttagatccacgctagtaacagttaccgcccgcacgcaatccttgtttttcaagcaagaaatggagctctccctcgttgggttgcagaatgctgggaagacgtcgctggtcaatgccgttgctacaggtggctacagtgaggacatgattccaacggtaggcttcaatatgcggaaagtcaccaagggaaatgtcacgattaagctttgggatcttggtgggcagcggagattccgcactatgtgggagcgctattgccgtggagtttctgctattctgtatgttgtggacgctgctgaccgagatagtgtcccaatcgcgaaaagtgagttgcatgatctgctgacgaaacagtctttggctgggattcccttgcttgtccttggcaacaaaattgacaagtcagaagcgctttcgaagcaggccttggttgatcaacttggactggaattgataaaggaccgggaggtttgttgctacatgatctcgtgtaaggattctgtgaacatagacgtcgtcatcgactggcttatcaagcactctagaacagcgaagtaggctttctgtgtgtttgtatcgcttgatgcacggtgttttatcttttgtgaatctgcgcttcccagaagcctggttccttggtccccatgttaaaagcggccaccttgtaatttatggtttctttggtgtcacagacgaactgcatggtatctagactagaaacatgtattccctttgtaaatcctttgaacctttgattattcttactgtgaatgccgtccagtgtttttattctgcacataacaaaccagacctatgctcatgctaaaatttcttcacagagaaaaaagagagaagtccgaatttggtcaagtgtttatattggtagtacttcgatcaaaaagtgtgggtgtttgagactgctttattatattttttacggttctggtctaacttta

SEQ ID NO: 12003 - DNA, 74 bp, Zea Mays
gcaggagagggacgggctcccgagggagccatcgtcggagacgcctgacgatgacgatgacgacgaggatgacg

SEQ ID NO: 12004 - DNA, 2943 bp, Zea Mays
ctcgcgtcgtgactcgtgaggcggtgagccttctgccctgctggcttctttctagtcaccgccttggaaaggagccagtgggcttactcaacgggccgaatggttgcccgagagtgacgagcagcccagcagctgcccgccgctaatctgcgtcgacaaaaccaggcgggctgccactagggttttagtgcttctctcccggcggcgcctccacatctcgtctctcagatcgggaggcgaaaccaaggcatacatatacatatttgtagtggtaccatcataacaagtaaagatggtgaagttcacggctgaagagctccgtgccatcatggacaaaaagaacaacattcgtaatatgtctgttattgctcatgtggaccatggcaagtctacacttacagattcccttgtggcagctgctgggattattgcccaggaagttgctggtgatgttcgcatgactgatactcgtgcagatgaagccgagcgtggcatcacaatcaaatctactggtatctctctttattatgagatgactgatgagtcactgaagaactacaagggtgtctgtgtgcaaactgaaactgtgcttcgccaagcccttggtgagaggattaggccagttcttaccgtgaacaagatggacaggtgcttccttgagcttcaggttgagggtgaggaagcttatcagactttctcccgtgttattgagaatgccaatgtcatcatggcaacatatgaagataagctccttggtgatgtccaagtatacccagagaaggggacagttgccttttctgctggtctgcatggatgggcctttacactcactaactttgcgaagatgtatgcatctaagtttggagttgatgaatctaagatgatggagaggctatggggtgagaatttctttgaccctgccacaaagaaatggaccaccaagaacacaggttctcctacctgcaagagaggatttgttcagttctgctacgagccaatcaagcaaatcatcaaaacctgcatgaatgaccaaaaggagaaattgtggcccatgttgcaaaagcttaatgttaccatgaaggctgatgagaaggagttgattggcaaagctttgatgaagcgtgttatgcaaacgtggcttccagccagcactgcacttcttgagatgatgatattccaccttccttccccggcaaaggctcaaaagtatcgtgtggagaacttgtatgagggaccccttgatgatgtttatgcaactgctatcagaaactgtgatccggagggtcctcttatgctgtatgtttcaaagatgattccagcatctgacaagggcaggttctttgcctttggtcgtgtcttctcagggaaggttgctactggtatgaaagttcggatcatgggtcccaactatgtccctggccagaagaaggacctgtatgtcaagagtgttcagcgtactgttatctggatgggaaagaaacaagagtcagttgaggatgttccttgtggtaacactgttgctatggttggtctggatcagttcatcacgaagaacgctacactcactaatgagaaggaggttgatgcatgcccaatcagagcaatgaagttctctgtctcccctgttgtgcgtgttgctgttcagtgcaaggttgcttccgaccttcccaagctagtagaaggtttgaagcgtctggcgaagtccgatcctatggttctgtgtacaatggaagaatctggtgagcatatcattgctggagctggtgagcttcatcttgagatttgcctgaaggatctgcaagaggacttcatgggaggtgctgaaattattgtttctcctcctgttgtgtccttccgtgaaaccgttcttgagaagtcctgccgcactgtcatgagcaagtcacctaacaagcacaaccgtctgtacatggaagcgcgccccctggaggagggtcttgctgagaagatttggtgcttcggacctgagaccaccggcccaaacatggttgttgatatgtgcaagggagtgcagtatctcaatgaaatcaaggattctgttgtggctggtttccagtgggcatcgaaggagggtgcactggctgaagagaacatgcgcgggatttgcttcgaggtctgtgatgtcgttcttcatgccgatgctatccacaggggtggtggccaggtcattccaactgccaggagggtcatttatgcttctcagctcacagccaagccgaggctgctggaaccagtttacctggtggagatccaggccccagaaaatgcacttggtggcatatacggtgttctgaaccagaagagaggacatgtattcgaggagatgcaaaggcctggtaccccgctctacaacatcaaggctttcctccctgtcatcgagtcctttgggttctcaagccagctgagggctgcaacctctggtcaggcgttcccccagtgtgtgtttgaccactgggacatgatgggctcggatcctttggaggctggctcccaggctgcccagctggtgctggatatccgcaagaggaagggtctgaaagaacagatgactcctctttctgagtttgaggacaagctctaatcttttcgtttttgctactgttactggttttaattgtcactcggagtctgggaactatttatatcttgtttccttttagttgtcaagtgcatgtttctgaacatcattggtcatactgtactatccaagtgctgttgagacacttttttctatcaatcgtgatgtaacagttggtatatgctggcttggtggaagtgtttgtagtaaatgcttgtgctatcttgatttaattcttgttcccttacattgcttattagtctttcggttgttacgtaggctaaaccatgctctatcaaaactccgtatttggtagatgttaataaaatattctattatgctaggtt

SEQ ID NO: 12005 - DNA, 855 bp, Zea Mays
attctataaaacctctgcccgggggctagggtttcctcccagccgtcatcgtttcgcgtccgcctcagcccgccgcaaggagagttcaggagacatcttcgagaagctgaaatggctcctaaagctgctcctgccaagaagggtgatgccaagacccaggccttgaaggttgccaaggctgtgaagtctggggcagccaagaagaagaccaagaagatccgcacgtctgtgacatttcaccgccccacgaccctgaagaaggctagggaccccaagtacccacgaatcagcactaccggaaggaacaagcttgatcagtaccaaattctcaagtacccccttaccacagaatcagcgatgaagaagattgaagataacaacactctggtcttcattgttgacctcaaggcagacaagaagaagatcaaggctgccgtcaagaagatgtatgacatccaggcaaagaaggtcaacaccttgatcaggcctgatgggaagaagaaggcttacgtgaagctgactcccgactatgatgctcttgatgtggccaacaaaatcggaatcatctaagtgctgcattaggcatctgttgtttcctagttcaatctgttgtgtcctagttctatgtgaaaccagagttttgtagctatggatctcaatcgttccattaccatgtgttatgcacacttctgaatttgatatcatccaagtgaccggttgaactagtttgcgttctgcacttcattacacttggacaccgtcagtctttatgaccagtaattttgtttgtcgtaataggttggttttgcaactcgaccaaataattcgaccaaataaccgtgtatgtgttgtatc

SEQ ID NO: 12006 - DNA, 1541 bp, Zea Mays
caaccagccaggacaaacaaggtgacatccatggtcaatacagtgatcttctaaggctttttgaatatggaggctttcctcctgaagccaattatctattcttaggtgattatgttgatcgaggcaaacaaagtttggagactatatgccttcttcttgcttacaaaatcaagtaccctgagaacttttttcttctgaggggcaatcatgaatgcgcctcaataaacagaatatatggattctatgatgaatgcaagcgtcgatttaatgtgcggctatggaaggtcttcacagaatgttttaacactctacctgtggctgctcttatcgatgataaaatattatgtatgcacggtggactctctcctgatctagcacacttggatgagataaagaacttgcagcgtccaactgatgtaccagatcaaggtctactgtgtgacttgctttggtcagatccaggaaaagatgctcaagggtggggcatgaatgatagaggggtctcatatacctttggtgctgacaaggtttcagaattcttgcaaaagcatgatcttgatcttatctgtcgtgctcaccaggttgtcgaggatgggtatgaattttttgctgacagacagcttgtcaccatattctcggcccccaattattgtggtgaatttgataatgctggtgcaatgatgagtgtcgatgaaactttgatgtgctcattccaaattctgaaacctgctgagagaaaaaacaaatttatggggtccaacaaaatgtgatagtgaaagccattttgcttccagcagctctagcctgttaaggttctcctgtggatgcatcgagacaacagcatgctggcgccaagtttgagggcagcattgggctactatcagagaaaccaaataatcccatacctaactgttcatctggaagttactcatcatgacaagtgcctgaaatttttcctctttcctgttaccttgtgtcagaacattatgtagctgtagatatattgattatggaaggatgaagttgccaaattgacctgaggagattcctttctccagccaggaaaaattctgaacatcaaggagtttctgtttgcaagtttcactatttaaaagcagttatgttgcttgtgcggaggtaagtactggaccgaggtactattatcagtttcatggatatggactgttgtgatagtttcgatagaggtgtcaaacatcaattagggtgaagtggtgagcaacatttcaaggaggtgctgatgcttgctgacaacctatgaaaaggcgtttctgtagctgactacttggtttgtccgtcagacaattctagacgtgaattttgatctgttggctagattagctgccaagtaggtatttcgtatctctagatttatgggattcacattcactcattcttgttgctattcacttgcctttgttatgttgctacatgggtgccaaacgcggtctgcaaagcagtcgtttcggtttgtttggtaatgcattttgcgcacaaccctctgggcatggttttgttttgcc

SEQ ID NO: 12007 - DNA, 1041 bp, Zea Mays
gaaatgagaatggattgactttccaagagaagggaacaactggagctatgataaatgcagacgacagtggagccttgtggacactgatcacttgcggtacaagtacatgaatgcgtttgaccaagcgatgaatgcgctcgatgagagattttccttcctttcgtcgtcaaagcagatcgtcagcgacatgaacgatgaggaaaaggttattgtctttgaacgtggagatttagtttttgttttcaatttccatcccaagaaaacttacgagggctacaaagtgggatgcgatttgcctgggaaatacagagtagccctggactctgatgctctggtcttcggtggacatggaagagttggccacgacgtggatcacttcacgtcgcctgaaggggtgccaggggtgcccgaaacgaacttcaacaaccggccgaactcgttcaaagtcctttctccgccccgcacctgtgtggcttattaccgtgtagacgaagcaggggctggacgacgtcttcacgcgaaagcagagacaggaaagacgtctccagcagagagcatcgacgtcaaagcttccagagctagtagcaaagaagacaaggaggcaacggctggtggcaagaagggatggaagtttgcgcggcagccatccgatcaagataccaaatgaagccaggagtccttggtgaggactggactggctgccggcgccctgttagtagtcctgctctactggactagccgccgctggcgcccttggaacggtcctttcctgtagcttgcaggcgactggtgtctcatcaccgagcaggcaggcactgcttgtatagcttttctagaataataatcagggatggatggatggtgtgtattggctatctggctagacgtgcatgtgcccagtttgtatgtacaggagcagttcccgtccagaataaaaaaaaacttgttggggggtttttcttctactctgtagtctgttcttgctagaacaaagtagataattgtctaaatatttctagcaaagtaacaataaaaaaaaga

SEQ ID NO: 12008 - DNA, 1844 bp, Zea Mays
ccgatcccgcagtcccggactcccggtcccagtctccaaaccctatacgctatacccacttgccgcactggccatcctccggccccaccggccagtgatacgcactcctcccctcaaagccctagccagacgccgccgccgcacccgatctggctgcctcggtcgatttctaattctcctcgcgagcccaaaccctaaacctaaacctttcacccgccgccgccgccaccaccagcactgccactccgccaccaccgtcccgaagccccctcccagcgccatcgacttcatctcggattgaagcaatgtcgtcggacgatgaggtcagggaggagaaggagctcgacctctcctccaacgacgttgtcaccaagtacaaggctgccgccgaaatcctcaacaacgctctgaagattgttgtgtctcagtgcaagccaaaagtcaagattgttgacctttgcgagaagggcgactctttcataagagagcaaactgggaatgtttacaagaacgcaaagaggaagattgaaaggggtattgctttcccaacctgtgtatccgtcaatgacacagtttgccacttctcaccgcttgcaaccgatgatgccgttctggaagaaaatgacatggttaaaattgatatgggctgtcatattgatggctttattgctgtggtggcacatacacatgtaattacaaatgggcctgtcacaggaagggctggtgatgtgcttgctgctgccaacacagcagcagaagtcgcaatgcggcttgtgagacctgggaagaaaaataaggatgttactgaagcaattcagaaagttgctgctgcttatgattgcaaaattgtggaaggtgttcttagccatcaactgaaacaatttgtgattgatggtaacaaagttgtgctcagtgtctccaatgctgatacaaaggttgatgatgctgaatttgaagaaaatgaagtatatgcaatcgatattgtcaccagcactggggaggggaagcccaagttattggatgagaaacagaccaccatctacaaaagggccgtagacaagaattatcacttgaagatgaaagcgtcaaggtttattttcagtgagatcagccagaagttcccaatcatgccttttactgctagggcattagaagagaagcgtgcgcgtttaggcttggtggaatgcatgaaccatgaactattgcagccgtaccctgtacttcatgagaagccaggcgatcttgttgcacacataaagttcactgtgctgctgatgcccaatggatcagataagataacatcacatcctctacaggagttaaagcccaccaaatccattgaagacaatgcagagataaaggcatggcttgctttggggacgaaatcaaagaagaagggtggtgggaagaagaagaaaggcaagaaaggagatgcagcagaagcagatcccatggaggaggcgacaaacggtgctacaagccaagaataattctgatttttggaattactgccaccagcttttttcttgtttcttcgctgcatctgatggtgttatattacattcagttgtggaaaaattgagtactatttctagcttctaagaaatgaagcatcctattatcgcatctaatggcgcaaagataatcgacaaggcatgcccagtgttcgttctctgttcttcgtgacgacgctcgtcacttggatttttcggagttcctcccagcccggaaatttcttcctggacattgccaactgctgagatgtagcatccggatacaaatgttcgaattacgtatacaatgttactgtgtatgttttctcggctaacctctctctgttgtct

SEQ ID NO: 12009 - DNA, 1476 bp, Zea Mays
ctggttttggctgtgcctttgtggtaccattacttcagcacaagcataccaaatgaaatgaatggccatgtctgttgccttgcatcctgaaaggacagctgtggaaaataagaaacctgatatgaaacagaggagagtggttgtcactggcatgggtgtagtgacgccactagggcatgatcctgatgaattctacaataaccttttaaggggtatcagtggaataagcgagatagaggcatttgattgttctcactatcccacgagaatcgcgggagaaatcaaatcattttcgacagatggttgggttgcaccaaagctagctaagcgaatggacaagtttatgcaatatttgataacagctggaaagaaagcattggagaatgctggaatcactgaagaagtcatgaatgagttggaaaaatcaagatgtggagtcctcattgggtctgctatgggtggcatgaaggttttcagtgatgcaattgaagctttgagggtttcatacaagaagatgaacccattctgtgtaccttttgcaactacaaacatgggttctgcgattcttgctatggatctgggttggatgggcccaaattactctatctctactgcttgtgctactagcaacttctgcattctgaatgcagctaatcatatcagaaaaggggaagctgatgttatgctttgtggtggttctgatgcaccaatcatccctattggattgggaggttttgtggcctgcagagctctttcacagagaaacagtgatccagcaaaagcttctcgaccttgggatgtggatcgtgatggatttgttatgggagaagggtctggtgtgcttgttttggaagaacttgagcatgcaaagcaaagaggtgcagaaatatatgctgaatttctaggaggaagtttcacatgcgatgcataccatatgacagaacctcatcctgaagggaaaggggttattctttgtattgaaaacgcattagcagattcaggagtaacaaaggaggacattaactatataaatgcccatgcaacatctacacagatgggtgatttgaaagaatttgaagctctcaaccgttgttttggccagaatcctcagctacgagtgaactcaacaaagtcgatgacaggccatctgctaggagctgctggtggaatagaggctgttgctgctatacaagctataaggacaggttgggtgcatccaaatctcaatttggacaatccagagaaaaccgtggatgctggtgggcccgcagaaggagagatgtgatgtgaaggtggcgctgtcgaactcgtttggatttggcgggcacaactcatcgattttgtttgcaccattcaagtgatagccgttgacaaatttcttgtggtgggctacacaccgtcgaactgagaccttgtataagaatgtatttaccggacgcagcaatatctcctgtactgcaagattaggaagacgat

SEQ ID NO: 12010 - DNA, 2402 bp, Zea Mays
ggaggagctcgttcgtggactgccatccatcgagcagggtgctcctcctggccaaatgggagcaagctatcctcgcatgtttctggtcctcctgctgcttcatggagccagtgctgctttgaatcctccaacagcagggccaaaatggcagactctgagcggtcgtccccctcaagtcgtagctcgaggaggattctctgcgaccgcataggcttctgtaagacagggctgacccttgataactcgacgactgtcgctgagatcttccccaagatggacaggacgtacaagctgcagggagaggatgtccatggctggttctccctagatttcaccgcggagcagctggttcagaacgtcactttgatccagaacatcttttctcgcccgagcacattcgatgcctcctttgggatgtacacgctcgatgatgtcgttgaactccacccccctcaaatatggctgaatgtagagtacaattcattctttatggagcacaagttaagcagcgaggactacatactagagctaccaaaagattttagcctcacgtacatctcctcgccggagattgggttcctgaaaagcttgagtgggaagctcaggaacgccaagacaaagctcatcttccggttcctcaacgaagacgtcgaggagccttcgaccaagaaaacgtacggggagctcctgaaagatctgaagtccatcaaggagtttgcagctggcgtccttgtgcccaagacgtacatctggccactgaaaaaggaccagtacttggcgccatccaccagcttggtcaaggatgctcatgccctcggcctggaagtgtacgcctccgggtttgccaacgatatcatcttgagctacaactacagctacgatcccactgccgagtacttgcagttcatcgacaatccagacttctctgtcgacggtgtgatcacggacttcccgcccaccgcatcaggagctgttgcttgcttggctcattccaagggcaatcctctaccacctcctggaaaggacaccaggccgttgatcatcacccacaacggcgcgagcggcatgttcgccggcagcaccgaccttgcctaccagcaggcgatcaaagatgccgccgacgtcatagactgcacggttcagatgtcaaaagacgggacggccttctgcatgcagtccgctgacatgtccagctccacgaccgcgtccaccgctttcgcgtccaaggcctccactgtccatgagatccagaacaagtccggcatcttctcgttcgacctgtcatggagtgagatcgcgaccttgaagcccgacctcatctccccgtttgctcaggcaggcatgaaaagaaatcctcaagcgaagaatgccggcaagctgatgactgtgccccaattcttggacttggccaaggccagcaacatcaccggtatactgatcgaaatagagcatgcttcgtacctggccaagagagggatcggcgtggtggaggcggtgtccagcgcgctgaccaaggcgggctacgacaaggagaccaagcagcaggtgttcatccagtccgacgactcgtcggtgctcgcggcgttcaagaagttcacgacgttcaggagggtgctcaacatcgaggccaagatcagcggcgcctccaagccgtcggtggatgacatcaagaagttcgcggacacggtgaggatcaaccggaactcggtggcgcaggtcaccgggtacttcatgacgcacttcaccgacacggtcagtagcctgcaggacgccaacctcaccgtcttcctcggcgtgctcaagaacgagttcatgaacctcggcttcgacttcttcgctgacccgacgatcgagatcgttacctactcgtgggcggtgctggccgacgggctcgtcacggactaccctgccaccgcggcttcgtacttcagaagtccatgcagtgacatgaacctgaacctgagctactcgatcctgcctgcacaacctggcgctctggtgaacctggcagcccccgggacgctggctccggcgggagcaccggcaccattgctccaaccctccgacgttgtggacccgccgctgcctccagttaaagctgtgatcaccgccgacgcgccagcgccagaggcggctgacaatacctcctcggcgtccagctccaacgcggggaatggcctcttgtgggctgccatcgttgccctcttgtccctgagctttctgcgctgatcccttcctcgatggcttccattgtactcccgcatgtccccctcccccctacatcctcgaatgtgctgtaacataatgttccttaaatagatataacctgtcattaacctgcacataaatacaggtcagaaaaagtttaccctgcaccaattcatgattggatagtggatact

SEQ ID NO: 12011 - DNA, 2284 bp, Zea Mays
gctttttgtccaccgtgaagttgtctttgttctgtggttttgcacttgggacttggcttcggattttggacagtgtgacgttcgtgtgcgctaaggtcatcattgaatggctgcaacgatgggttcaatatctgccaatggttcttaccaaacaaataggcccagtgcactaaagcaggcacctcacatgcaattccaacaatgttgcaacggtggacttaggttcttaagcaagcattcccaatccacgcgaagtaagatacaggtggctaaaagaagagctacagataatggaattcatccaaagactacgggacatcgggcacctattgtatgttctgctgggatgactattgtatttgttgcaactgaagtgcacccatggtgcaaaactggtggcctcggtgatgttgtaggaggactgcccccagctttggctgctatgggacaccgtgtcatgacaatagctcctcgttatgatcaatacaaggatgcatgggatacaagtgtccttgttgaggtaaatattggtgacacggtagaaactgttcgcttcttccactgctacaaaagaggagttgatcgtgtttttgttgatcatcctatgtttcttgaaaaggtatggggcaagactggagcaaaattgtatggtcctactactggaactgactatcgagataaccagttgaggttctgccttttgtgccttgctgctttggaggctccaagagttctcaatttcaacaattctgaatatttctctggaccatatggggaagatgttgtcttcgtagccaatgattggcacactgctattttgccatgttatttgaagagcatgtataagccaaatggaatttataaaaatgctaaggttgctttctgcatacataatattgcctatcaaggtagatttgcccgagcagacttcgatcttcttaatctacctgacagtttcttgccatcatttgattttattgatggacatgttaagcctgttctagggagaaagcttaactggatgaaggcagggatcattgagagtgatctggttctaacagtcagtccacattatgtcaaggaactcacatctggcccagataagggtgttgagttggatggtgtccttcgcacaaagcctctagaaattggaatcgttaatggcatggatgtttatgaatgggatccttcaacagataagtacatcagcgtgaaatatgatgcaacaacggtaactgaagcaagggctctcaataaagagagtttgcaagcagaagtcggattgcctgtggactcgagcatccctgttatagttttcgtcgggcgtctcgaagaacagaaagggtccgacatactcattgcagccattccagagttcgtgggcgagaatgtccagataatcgttcttggcacgggaaagaagaagatggaggaggaactaacgcagctggaagtgaaatatccaaacaacgctagaggcatagcgaaattcaatgttccattggcacacatgatgtttgccggggctgacttcattatcgtcccaagcaggtttgagccatgtggtctcattcagctgcaagggatgagatatggagtgattcctatctgttcatccactggaggacttgtcgacacggttgaggagggcgtcaccggattccacatgggttctttcaatgtcgagtgtgaaactgtagacccagccgacgtgacagcagtggcgtcaaccgtcacgcgagccctgaagcagtacgacaccccggcattccatgagatggttcagaactgcatggcgaaagacctgtcctggaaggggcctgcgaagaagtgggaggaggtgcttctgggccttggagtcgaggggagtcgagctggcatcgacgacgcagaggagatcgccccacttgccaaggaaaacgtagccactccgtgagggcttggtggtgcctcgactcggaaacacgcgttggtgataggaagcgtcttctaggatcctcctgggcggccttgtggctggtggagtgaggtgtccagtcagacacggtttcgcctctactactagtctactactactacctcattgtaatataatccttggcattctaaaaaatgccatgcctgctctaattcttctgttcttgcgcaacatacacttcccgcttccgttcggtcgacaacggttatgtaaatatagcgaatgctagcgggcagctcgaatcatcccaagtggtagggtcacgatggagttgtttgaaatggctcgttcttgtgcatagttcgc

SEQ ID NO: 12012 - DNA, 91 bp, Zea Mays
gaggacaagttctacgggctcgagctcaaccacatcgcccggcggtacaacgagactacggacgagctggctaagatagcctcggggcaga

SEQ ID NO: 12013 - DNA, 134 bp, Zea Mays
tatccgagtagcacgtaccatcaaacaaactataactgatttaatgggccattcgcagtttcacagttcgaattagttcatacttgcacatgcatggcttaatctttgagacaagcatatgactactggcagga

SEQ ID NO: 12014 - DNA, 2365 bp, Zea Mays
ctagtccactcttctggtcctctcgcttttgcgctcccttggtcgtcttcgtcccctgctcgtctcccgtccgttttcggatgcccactccgaccaaaaccctagctacttcgtgaaggtggaggggaggagatggcggcagcggatgggcgcagcggcgacttccgggtcaggggtggcagcgttgggggtcggatcgaccgactggtggtggagaacttcaagtcgtacaagggtgagcagacgattgggcctttcgtcgacttcacagccatcatcggccctaacggcgccggcaagtccaacctgatggacgccatcagcttcgtgctgggcgtgcgctcaacgcaccttcgaggcgcgcagctcaaggacctcatttacgccctcgacgaccgcgacaaggaggccaagggccgcaaggcttccgtccgcctcttctactgccaacccaaccaggaggagctctgcttcacccgcagcatcaccggcgccggcggcagtgagtaccgcatcgaccgcaaccaagtcacctgggacgtctacaacgccaagctcaggtccctcggcatcctcgtcaaggcccgcaacttcctcgtctttcagggtgatgtagaatccattgcctccaagaaccccaaggagctcaccgctctcctggagcagatctcaggctctgatgagcttaggagggagtatgacgagctggaggagcagaaagccagggccgaagagaagtctgctcttgtgtatcaagagaaaaggaccattgtcatggagcggaagcagaagaaggtgcaaaaagaggaggcagagaagcatctacgccttcaacaggacctgaaactgttgaagacagagcattacctttggcaactctataccatcgaaaaagacatagagaaaattgaagctgagcttgtggaggatagagaatctcttcagcaagtgcaggaagagaatcgatccagtgactatgaactgactgcaaaaaagaaggagcaaagtgcatttctcaagaaaatcacattgtctgagaaaagcataaccaagaaaaagcttgaactcgacaagaagcaacctgagcttcttaaattaaaagagcaaatatctcgtctcaaatcaaaaatcaaaagttgcaagaaagagattgacaaaaagaaggatgatcacaaaaaacatcttggagagctgagaaggctgcaaagtgatctggttgaggtcacagaagctattgaggaattgaatgagcaaggacaagatacaagtggaaaactgttattagccgacgaccaactccaggagtatcatagaattaaggaggatgcaggaatgaagacagcaaagctaagagatgagaaagaagttatagaaaaaaaattaaatgctgatgctgaagcaaaaaagaatttagtggagaacatgcagcagctggaaagccgtaaagatgagatatcatcacaagaacgtgaactgcagacaaaacttagcaagattctccattctattcccaagcttgaaaatgagctcacacacttgcatgaggaacacaacaaaattgcaaaggaacgccaatcttcaggatctgaataccaaatgctgaagcagagattggatgaaatagaaacacaactacgggagcttaaagctgacaaacatgaaagtgagcgtgatgctcggttaaaagaaaccgttggacgtctaaagcggctattccctggagtccatggccgcatgcttgaactttgcaggccctcgcagaagaaatataaccttgctgttactgttgccatgggaaagttcatggatgcagttgtagtggaagacgagaacactggaaaggaatgcattaagtatctgaaggagcagcggcatcctccgcagacatttattcccttgcaatcagtccgtgtgaagccgataattgagaagctgcgaactcttggtggatctgcacagttagtttttgatgtcattcattttgaccgagttttggagaaagcagttctgtatgctgttggaaatacacttgtctgtgataaacttgatgaagctaaagccttaagttggagtggtgaaaggtataaagttgttactgtcgatgggattctgctgactaaatctggcacaatgactggtggaacaagtggggggatggaagctagatcaaacaaatgggatgacagcacaatagaatctttgaagaagaagaaaaatctgttggaaaataaaatgtcagaacttggttcccccagggagttgcagagaaaagagcttgccatatctgagaaaataactggacttgagaaaaagttgcactactcgaatgttgaacagatatttgtttagtatggctcttggtctt

SEQ ID NO: 12015 - DNA, 1917 bp, Zea Mays
gaaagagaagagctagatcatgcagtacaggagaagcattgatcaaattgttcagaaaagagtactccgggtgaaacacaacctcgtgatgatggcttgtcgaaatccaaggatagggacaaagatagagaaaaggacaaggacagagatcgtcgccgagaccgtgacagagatcgagggagagacagggaccgtgatagggatagggacagggacagggatcgggacagagacaaggatcgccaaagtaggcatcaccgtgaaagacgggaacagcgagaccgtcctgatgatcacagagtccgtgattctgaaagaagaagagaacgcgacaaagatgggcatcgtaggcatcgttctcggtctcgttcaaggggtagagatcgaagatctaggtcacgttcaagaagcaagcgagttagtggattcgacgccccacccccgcaagcaatgggttcaacatttccagttattccaaccccaagtcagttaccaggctcttcgcttcccaacattggtggcatgtttccaaacatgctccctttcggtgttgctgggcagttcaatccccttgtcatccagccacaagcaatgactcaacaggctactcgtcatgctcggcgtgtttatgtcggtggccttcctccatctgctaacgaacagacagtggcaatttactttaatcaagtcatggctgctattgggggaaacactgctggtccaggtgatgctgttctcaatgtatacataaatcatgacaagaaatttgcttttgtggagatgagatctgttgaggaagcaagcaatgcaatggccctggatggcattatgttcgaaggggcaccggtgaaggttagaaggccaacagactacaacccttcccttgcagccgccctgggcccaagccagccaagccccaatctgaatcttgctgcagttggcctaacagcaggatctaatggaggactagaaggtccagaccgtatttttgtgggtggcctcccgtattacttcactgaagcgcaagttcgggagttgcttgaatcattcggtcctcttcgagggtttgatcttgtgaaggatagggaaactggtaactcaaaaggctatgcattctgtgtttaccaggacctcaccgtcactgacatcgcttgtgctgcactaaatggtatcaagatgggtgacaaaacccttactgtcagacgagcaaaccagggggcatctcagcccagaccagagcaggaaagtatcctattgcaggcacaacaacaggtgcagttgcagaaacttgtgtatcaagttggagcgcttcctacaaaggttgtatgcctcacacaggtggtaactgcagatgaattgaaagatgatgaagagtatgaggacattatggaagacatgaggctagaagcaggcaaatatggtaatttggtgaaagttatcatcccacgccctgaccccagcggacagccagttgtaggagttgggaaggtgttcctggaatatgcagatatcgatggtgctgccaaagcaaagacagcgctgcatggaaggaaatttggtgggaacccagtggtcgctgtctgctatgcggaggacaagtttgccaatggggaatatgatggatgaaaatcttatccctcttgaactatagcagtagccggtctttgtctttggctctatgctacctgcttgtttaattgcaacaaagatgaacggtctctcatttaagctgaacctctacctgtattgatatccctggattttttctgagccaccacctgttgtgatttgtgaacgttgtaagaataggtttctttgcttgggttcgcttgttgctgtcgaaaatatgtaacgaatgttattaataaagaatttcttgtatgactttactaccgtgtgtttgatttggtttgagtt

SEQ ID NO: 12016 - DNA, 1984 bp, Zea Mays
gagccggttgaagtagaaactaccgaaacgagtctagcaaacaaacagcagcctgagcacccgaggagactccgtgcgaccgaagccagagccagcggaaccgaacggaagcgagacccccggcggctagcgagatggacggcggcgccggcgaggaggggaagcaggagcggcacctggtgctggcccacaagctcttccttctatcccacccctccgttgatgacctctccaaggtcgccctccgcgccgaagtcctcgacaccgtgaaatccgatgatatggcgacgctgtttgagtcgctggtcgccgcgggtgtgctggagggggacgccgcgctgctggccgagatgcgtgggaggattgacgaggagatccgcaagctagatgagaaaattgctgatgcggaggagaacttgggtgagagcgaagtccgtgaagcacatcttgccaaatctttgtactttataagggtcggtgagaaggaaaaggccctggaacagcttaaagtcactgaaggaaaaactgtagctgttggccaaaagatggatcttgtgttccacactttgcagattggttttttctacatggattttgatctgatatcaaaatccatcgataaggcaaagaacttgtttgaggaaggaggcgattgggagaggaagaacaggttgaaagtatatgaaggcttgtactgcatggcaaccagaaacttcaagaaagctgccagcttatttttagactcgatttcgactttcacaacttatgagatattcccatatgatacgttcatcttctatacagtcctcacaagtgtcatcacattggatcgtgtatctctgaaacaaaaggtggtagatgcaccagaaatcctggctgtaattggcaaagtacctcacctctccgagtttctcaactccctgtacaactgccagtataagtcgttcttcgttgcattttctggtctgacagagcaaatcaagttagaccgttatcttcagcctcatttccgctactacatgagggaagtgcgcaccgtggtatactcacagttcttagagtcatacaagagtgtgacaatggaagcaatggccactgcgttcggtgtaactgttgatttcattgaccaggaactgtcacggttcattgcagctgggaagctgcactgcaagattgataaggttgctggtgttctggagactaaccgacctgatgagaggaatgctttctaccaggcgaccatcaagcaaggggacttcttgctgaaccgcatccagaagctttcacgggtcattgacctgtaaggactgtttgtgttggagctattcctgcaatcggcgcctgcaaatgtttcccaccctacgtcttccacaagacatctctccttgagtggggattggggaacaagccctaagaacatctgtgttttaagtgcagaatatttgtgttttaatcagtaaacgctgtcctgtcaaaaaacccggactggaaatggcaaccgaacaaagcgaactggatctatcgtatgggatgcggtacaatggcgtcaaaatcccagaagcatacgagcgtctcatcttggatacgataagaggagaccagcagcacttcgttcgccgagatgagctgagggccgcatgggaaatcttcactcctttgcttcacgacatcgatggtggcaagctcaggtccgttccgtacaagccgggaacccgaggaccgcaggaagccgacgagttgagcaggaggatggggtatgtgcagacccatgggtatgtatgggttccgccgaccctttctaaggtttagctgtttgattatcagctgccgtgtaaccacagaatgacagaaagcggggaagatccctttgtaatacgtgggtcgtgtaataagagaaacttctgcttgttgtttgagtgaccctttacggtattggaataaaaaaagaatgtgatgttattatctcactgttgtttttagtttc

SEQ ID NO: 12017 - DNA, 4950 bp, Zea Mays
gtcccctagtccgccgcctcccgcctcacgcaccccaaattcaaatttcgaatcccagaaggacagcaccgttgcccttcggcttcgataaacacccctcaacccccattgctttctagccccagatccccaatccccaagaccccaacgcctcacgcacccctcaaccctaccgcagctgcgcaggcacacgacctccgtgtgcagcgcatcgccgccatgacgggtcccttacactccagctccggccacaacgccgccgccggcggcgggggcaagaccatcgaggaaatgtaccagaagaagacgcagctggagcacatcctgctgcgccctgacacctacattggctcggtggagaagcatacccagacgctctgggtctacgaggacggcgccatggtgaaccgctccgtcacctacgtccctggactctacaagatcttcgacgagatcctcgtcaacgccgccgacaacaagcagcgggatcccaagatggacgcgctccgcgtcgagatcgacgtcgacggctgctccatctccgtatacaacaacggcgacgggatacccgtcgaggtccaccaggaggagggcgtctacgtgccagagatgattttcggccacctcctcaccagtagcaactacaacgacaacgagaagaagacaaccggcgggaggaacggatacggcgccaaactcactaacatcttctccacggagttcgtcatcgagaccgctgatggacgtcgccaaaagaagtacaagcaggttttctctgaaaacatggggaagaagtcagagccccagattaccaagtgcaagcagggcgagaactggaccagggtcaccttcaagcctgatcttgccaagttcaacatgatccatctcgaagatgatgttgtagccctcatgaggaagagagtggttgatatggcaggcactcttggcaaaacagtgaaggttgagttggatgggcacagggtgcccataaagagcttctgtgattatgtcgacctgtatatgaagagtgctaactgtgacagacctgataatttcaaaaagatttatgagcaagtaaatgatcggtgggaagtgtgtgttagtcaaagcgaagggcagtttcagcaggtcagctttgtcaacagaattgccaccataaggggtggaactcatgttgattatgtcaccaatcaaattgccacccatgtgatggcttttgtgaataagaaaaacaagaatgcaaacatgaagctacacaatgtgaagagccatttgtgggtctttgtcaatgcgctgattgacaatccggcctttgattcacagaccaaggagaccttgaccactcgtcagggaagctttgggtcaaagtgtgagctttctagtgatttcctcaagaaagttgagaaatctagtgtaatcgataatgtcctctcttgggctgatttcaaacttagcaaagaattaaagaagactgatggaagcaagaagtcaagaatttctggcatccctaagcttgaggatgcaaatgaagctggtgggaaggactctcacaagtgcaccttgattctgactgagggtgactctgcaaaagctcttgctatgtcgggcatagctgttgtagggagagattactatggtgtatttcctctcaggggaaaactattgaatgtcagagaggcaaaccacaagcagataatggacaacgctgaaattcagaacataaagcaaatccttggtttgcagcatggaaagcagtatgatagcaccaaaggtttgagatacggccatctcatgataatgacagatcaggatcacgatggttcccacatcaaagggttgctgatcaatttcattcactcattctggccatcacttcttaaagttccatctttcttggttgagttcattactccaattatcaaggcaaccagaggccaaactactaagtcattctacacgttgccagagtatgaagaatggagaaataatttaggagcaagtgcaagttcatggactataaaatactacaaggggttaggaacaagcacagccaaagaaggccgaaagtacttcgaagatattactgaacataaaaaagattttctctgggtagatgaccaagatggcaatcatattgaattagcattcagcaagaaacggattgctgataggaaacagtggcttacaaattttcagcctgggacatacattgaccaacgtgacaaacatgtcaagtatagcgatttcatcaacaaagagctgatactcttctcaatggcagacctgcagcgatcaataccttcaatggttgacggccttaaaccaggccagaggaaaattctgttttgctcattcaagaggaattttgttaaggaagctaaggtggctcagttctctggttatgtgtcagaacactcagcataccatcatggtgagcagagtttagcaggtacaattattggaatggctcagaactttgttggcagcaataacatcaaccttatgtaccctagtggtcagtttggcaccagagctcaggggggcaaggatgctgcgagtcctaggtacatcttcaccaagctgtctcatatcacacgttcaatttttccgaaggatgatgatattcttcttaattatctgaatgaggatgggcagtcaattgaacccacctggtatatgccaatccttcctatggtcttggtcaatggtagtgaaggaattggaactggatggagcacatatattccaaactacaatccaagagacattcttgctaacctcaggcgattgctgaatggagagtctactgtaccaatgcacccatggtacaggggatttaagggctctatagagaagacagtcaatacaaaggtagctggttccacatatactgtcactggaatcattgaggttcttgacaacactacactgaggatcactgaattgccaatccgccgttggactcaggattacaaagattatcttgagagtttggctccagatactaagaacaaggacaaagtaccattcatagaggatgtcacatgtcaaggtgataatgaagatgtttacattcagttcacattaagtgagaaaaatatgaatatagctatggaagaaggactagtgaagaagtttaagctgacaacaacaattgggacatcaaatatgcacttgtttgattcagatggtaaaattcggaagtatgacactcccgagcaaatacttgaggagttctgtcatttaaggcttgaattctattgtaagagaaaggaagcattgttgaaaagcatcaagttggacttaaagaagcttgaaaacaaagttaggtttatccgctgtgttgttgataatgaaattatagttaacaaccggaaaagggcagatctatttttggagcttcggcagaagaattttgatcctttcccaaagaaaaaaaagagggctgaaccagctgctgtaggtgctttagaagaggaggaaaatgaagagagtcctgaagctgctggagcggaacctagtgactatgagtatctcctctcaatgtcaattggtacgttgactttggaaaagatacaggagcttaatgctgagaaacaaaaattagtggatgatgttgaggaattggagaatatgtcaccaaaatcactatggttgaaagatcttgatgcttttgagaaagaactggatgtgcttgatcaaatggatctagcagaggaactgcaaagggaaaagaggataaatgctggcaaaaaaggaggatcaaaagctgcacccaagaaaccacgtaaaaaggctgcatctaaaaagctggatagcgatacagaagatgatgattttgaaccagcggttgcaaagcgtggagctcaaccgaagaaaacatccagcaaggcaaatgattctgcgtctgaagatggagattatgtggctgctgaaaatcaaaagaaacaatccaagaaagcaagtgcccatgtggacgaagaagttgacatgccttcgttaaaagaccgtctggctgcttttaatatcagcgactcctctccggatcattctgccatggaaactgaagtaacagaattgacagaacagcagaatgaaaacaaagcgacagagggagcaagcaaaagaggcggacgaaagaaggcgtcatcatccttggcgacgataccatctgatgttgatgaggaagtcctagaggtccaagctcagaagaaaggtagaggaaggaagcctgctgccgttgtgaagcccaaggctcctgccgccgccaggaaaagggcgccggctcagggcaaggtaacacagaagaaaatagatgagatgctcaaggccactgaggataacaacaccagtgcatcttcccctgagaagaaggtccggaagatgaggtcctctcccttcaacaagaagagcggctcaatcttacagagaggctcgaccgcttctgcaagctctggaacaactgttgaagcttcaccaccctctggcagctctgcagagccagttggtgctgcacaacctagaaggacagccagggctaccaagaagcctatctatattagcgatagcgaccctgaggatgaagtggagttgattgatgattcggactttgatgcggacggtgactctgacgagtgaagattgtagtcatccgtactttggctgcaacaatatccagtttgtgtcgttgcatgtgacaatttgataatgcatttcttgtgcgttgtatgtgttcgttgcgttgttcagaactgttgccaagagctcaagacaacctggttaactggttaactgaattgtatgtctaattttggcatacaagtgtgcctgtggtatgttttatgctctgatgctggcatgctgctctcagagcgcccattgtgtgcattatcaaagtttgtgcggggagtttccagggttatatataccaaatctaagtagttgaagaat

SEQ ID NO: 12018 - DNA, 2227 bp, Zea Mays
catgatctacatctatatgcgatgactatgctcaggaggacgaggaatacgaggagaagctgaagaaggaaactgtggtgctgtttttcctagcaacatatggggatggggagccaactgataatgcagcacgattctacaaatggtttactgagggaaaagagaaggaagtttggttgaaggatcttaaatatggtatttttggccttggaaacaggcaatacgaacattttaataaggttgcaaaggtggtagatgagctagtagaggagcagggtgggaaacgtcttgttcctgttggccttggagacgatgatcagtgcattgaggatgatttcactgcatggaaagaactagtgtggccagaattagatcaattgctccgcgacgaggatgacacaactggtgcatcgactccatatactgctgctattcctgaatacagagttgttttcattgacaaatctgacctgtcattccaagatagatcatggacactagccaacggtactggtgtgattgatattcaacacccttgcaggtctaatgttgctgttcggaaggagctgcacaaaccagcttcagatcgctcttgtatccatctcgagtttgacatttctggcactggtcttgtgtatgaaaccggagaccatgttggtgtatatgcagaaaattctgttcagactgtggaggaggttgaaaggctacttgacctttctccagacacattcttctccatccatgcagatgcagaagatggatctcctcgtaaaggaggaggttccttggccccacctttcccatctccatgtaccttgcggactgcgcttctacgatatgctgatctactcaatccaccgaagaaggctgctttgcttgctttagcttctcacgcatctgatccagctgaagctgagcgacttagattcttggcttctccttctggaaaggatgagtattctcaatggataactgctagtcagaggagccttcttgaagttatggccgcattcccttcagctaagccaccactgggagtgttttttgcagcaatagctcctcgtctgcaaccacgatactactcaatttcatcatctccaaagatggctccctccagaattcatgtaacatgtgcgttagtttatgggccttcaccaacaggaaggatccaccaaggagtttgttcaacatggatgaagaatacaattcctctggaatatagcgaagaatgcagctgggctcccatctttgtgaggcagtcaaatttcaagttacctgctgatccgtccactcctattatcatgattggtcctgggacagggctggctccttttagaggcttcttgcaggttagcattgaaacaatctggggcagaattgggcacttcaatccttttctttggatgcaggaaccgtaatatggactacatatatgaagatgagttgcaaactttccttgaggagggggcgctttctgagctaattgttgcattctctcgggaagggccaacgaaagaatatgtgcagcataagatggtggaaaaggccacagatatttggaacatcatctcaaatggtggttacttatatgtttgcggtgatgccaagggaatggctagagatgtacacaaaatgcttcatacaatagtccaagagcagggatctttggataactccaaaaccgagagctatgtaaagagcctgcagatggaaggaaggtacctccgtgatgtatggtgacacatcacctcaaataagccatagctctagcgtgtggaagtaaagctggctttgcgtgtatgacatgtctaatgccaacccaatcgtcagctttggaatgaagcgtgccattgatgatatactgaaatgagttgatcagtgcaattctttgacatctaactatttattattatatgagatgggaggaactgatggagaataaatgctgctgtagatttgtagaagttcaaaaaaattgggtacccctgacaagtttgtagccaagggggtacatcatacagtttgagatgaggacactatgtatactgtttgagacgaggacattatgtatactactctagaaggctaccgaaaccaaattttgcatctgtttattaaaagcttgtacttttatcatggtatccgtcgttggcaatctacaactttgtacagccgcaatgttgcatcgaaggtgcagcttgcttcggcacccgtagggatgcaagtt

SEQ ID NO: 12019 - DNA, 110 bp, Zea Mays
gtccaattgacgatcatccttgtcctggcacttgatcaggcaggttcgtccatcagcatcgccatgcggagtagcccgcgcttggggtcgacttggcttgtcttccgctt

SEQ ID NO: 12020 - DNA, 143 bp, Zea Mays
agcaacgcgcaggtgctaaaactcgtgtactgttgatggatgatgactgttcccatggatagtgctagcgcagccccatcctccgcgcgggaccttgccatggatagtgctagcactagcatgaagcactttcagttttataa

SEQ ID NO: 12021 - DNA, 76 bp, Zea Mays
aagagagaggttgcgagttcgaatctcaccattcacaaaagatgtaaatttgattcaaaaaataatggtgaaaaat

SEQ ID NO: 12022 - DNA, 953 bp, Zea Mays
gttataatagaccaagactcagatccggatgcaaccattgtagaaataaccttgggtgatcgtcttggcgatctccttgatacgatgagtgcgctaaagaacttggggctaaatgttgttaaagctagtgtctgtctcgattctactggcaagcatatcaagtttgctataactagagcgttcactggccgtaaaattgatgatccagagttgttagaagcagttcgactgacgatcattaacaacatgatacagtatcatccagagtccagcagtcaattggctatgggggcaacttttgggccagaagcccctacggaagaggttgatgtggatatagcaacccacatagatatctatgatgatggccctgaaagaagcttacttgtggtggaaacagcggatcgtccagggttactggttgaccttgttaagatcatctcggacatcagcattaatgtccaatctggagagtttgacactgaggggctcctggctaaagcaaaattccatgtcagctacaggggcagaacactgaccgaggctttacaacaggttctttgtaatagcttgcgctatttcttgaggcggccgacaacagaggacgccagcttctagccagatagatgatcatgaagcctcccaactttcttatgtggtggtattcacatgaattgaataccatcgtcaaagcatttgaaacacgcacaataatttgttaagatggggggaattgtacttgatgttatggcaccacaccaattcgaagtattttttgttccaaggcacgggaatctgttgtatccaagtgcagaagattgctattcttaatcatgtaataacacattattattttgctacttgggatacaccgtttggtggtaaataagatggaatattgtgggggcccatcatcccgtgtatcatgcaaataccgtctattgtcagattaa

SEQ ID NO: 12023 - DNA, 1258 bp, Zea Mays
cacacaaatgcgcccgcacccgccaacgccaccaccagtgacaagtcaagtccaccaggccgggccgcgaatctctgcgtccccttcgccaaccatggcctccttcttcgccgacgacggcaccgatgacctcccacgcaccacttcccaccccttcgactccgatgacttcggcgccgccgcggccgacgtcgccgccgccgacggatacggcgggtacgcctctttcgccgaggggggtgtcgaggaggtggacgaggagatcaccgtcgagtccgatggggtcccgatccgccacgtctccggggggtactcgccctcgccgttctcccccgagctcgagcccaacggcggcgacggcccgatcctaccgccgcccaccgagatggggcgggacgagggaatcctcctccgcgagtggcggagaaaaaatgctatggaacttgagaaaaaagaacagaaggagagggagctacgtgcccaaataattgctgaagccgaagaattcaagaaagccttttttgagaagaggatacagaactgtgcgtcaaacatggtgaacaacagagagagggagaagatttttgtagccagccaggagaaattccacgccggcgcagacaagcagtactggaaatcgatttcagatctcatcccacatgaaatagccaccatcgagaagcgggggaagaaagacaaggacaagaagccatccatcacagttgtccagggccccaagcctggcaagcccaccgacctgtcccggatgcgccatatcttggtgaagctgaagcatgctccgccgccacatatgttgcagcctccaccaccagcacctgctgctaaagagggcacaaaggatggcagcgccaaaggtggtggaaaggacggcgccaaagaaggcggcgcggcagccccagcaaacggcgccaagcagcctgctgagagccaagaaaccaccgccaatggcccctcggaggcggagaaagagcagcctgcagcctcggagtgaccggaaagggtgtctttattaagacatacacaagagccttaactgtcagtagatggaaaagcgtgttttatttcagataatttccagactcgtctttcccgcgctgctgatctttttgtagaggagatctgcatccggatgtctttacatcatagcgcagaacattcatgattgtatcaccacagcagttgtatgtttactgctttcccccttgcccaagtgttgccttcactgagatgctgccaa

SEQ ID NO: 12024 - DNA, 2074 bp, Zea Mays
acccaaactcgccgtccgcctccgccaccacccccgcccgcgcccatagcaagctcgccttccacgcgcgcggccgcgccagcgcaccacgcctcgcttcgttttcccgttgcttgacgctgaatccattccaccaccacccaggcacggccaggccagcgccagcgcgtcgtccccggcccccgctccgcctctccggtcgcgcccgcctcggggcgaccaccaccaaaatagaaacttccgtgtgtaggtgacccccggctttacccccgcccgaccgcccccaccccaccccgcccacgcctccctccctcccgccgggacaaaaccgccgctcctcctcctccgcccctccccgctctttctgtgaggcgggaagcgaggcggatgccgaggcgacggggctcgcgcaccgcacgcgtgtgcccgccgcccgggggccaggcgaggtggtgaggtgaggccgagcgcggttttaaattgttcacccggccgcccttctcgccgtagttttcagtggtacaagcaagggaggaacgaacgtgagggctgcctgcctgcctgcggacatgggctccagcctcaagtaccgatctggcctgtgcctcatcgtcgccgtcgtgctgatctgggtcatctctgccgaggtcacgcaggggatattcacaaagtacagacatccatttgcagttacttacttgggggcctcccttatggtcatatacctccctttgtcatttctaaaagattttatatacaattcgttgagaaggcattctagaaacactagtgcttccaaaattgcaagcaaatcttcctttggtggtagtgcccctttgaagaatggtgaatttcagaagatgttggaaatggaatcacagaaaactatagtggtaaattgccctgatgtgagcatccctgtagtggaagagacaaaaccactcatatgcggaatcactgaaatggatgatggccttttcaaggacaagcaactttccactaaggagattgcaacgtatggattgtatctttgccccttatggtttgtgacagagcgcttgcaagaactagtgttgccagtaccacagtgctgtcttcaacttcaggactcttcactcttttcattggtgttttacttggccaagactccataaatgctgcgaaaattattgctgttttcattagcatggctggcgttgtaatgacaactgtgggccagacttgggcatctgatgaatcagaagcaggcaaatctggttttacacagaggactcttctaggtgatatgtttggtcttatgtcagcaatcgcctatggtctatttactgtgctgcttaaaaaattttgtggagaggaaggagaaaaggttgatgtccaaaaactgtttggttatcttgggctttttacccttgttgctctatggtggattgtctggccattaaccgcactaggcgttgagccaaagttttcaatgccccactcagctaaagtggatgaagtggtggtggcaaatagcctaatcggaagtgtattatcagactacttctgggctctttctgttgtttggactactcccttggtggccactctaggcatgtctctcacaattccaatagcaatggttgctgatatgatcattcacggccgtcactattcagcagtatatattcttggttctgtccaggtattttcaggctttgttatcgcgaaccttgcagatcgcttttctcgttctctagggctatcatagtctcataaaacagaacaggcccttattagagcgtgcatcaggaagctccaaggtcgggttggttaggccaatacttcagaaaacctggatcgggagataccaggaattattttccctttgcttctttaaacatagtggaggtgaattttgccgtggtgaatagtgaaaggcagcagatgaagaagaaaacatatgttatagcaaccctttgcaactgtaaattctcttactacaaattgcgcgacagtgtagactgcggccgttctcggcccatgtcaacaggcttgctcgatttcaaatttgcaatgtccttttatccgtgtt

SEQ ID NO: 12025 - DNA, 152 bp, Zea Mays
gtggctgagcatagcccctgcactcgcccttcctctgctgcaacagcagtagcccgttccacggtgtcgtcgacctttgctagttgtcaacaccacgcctcgcgcggatcgtccggtggtaaggaagatggtagtactatgtttgaataagc

SEQ ID NO: 12026 - DNA, 61 bp, Zea Mays
cagaaacacactttgatagttcatgaatgtttttttgaaacttttttgaactgggaaaaca

SEQ ID NO: 12027 - DNA, 1217 bp, Zea Mays
ggccttgtggccccgtcgccgagaccgtaacctcgcaatcgtagcttcaacgcgacgctgatgctggagatgctgcgggggaagcggatgctgttcgtgggtgactcgctgaaccgggggcagtacgtgtccctcctctgcctcctgcaccgggccatccccgacggcgccaagtcgttcgagacggtggactcgctgagcgtcttccgggcgaagaactacgacgccaccatcgagttctactgggcgccgatgctggccgagtccaactccgacgacgccgtggtgcactccgccgacgaccgcctcatccgcggcgcgcccatggacaggcactccagcttctggaagggcgccgacgtcctcgtcttcaactcctacctctggtgggtcgccggggacaagatccagatcctaaggggcgccgacaacgacccgagcaaggacatcgtggagatgaagtcggaggaggcctaccggctggtgctgcaccaggtggtccggtggctggagcgcaacgtggaccccgtcaagtcgcgggtgttcttcgtcaccgcttcgccgacgcacacggacggcagggcgtggggcgacgacgacgcggagggcagcggcaactgctacaaccagacgtcgccgatcagcgccgcctcgtcctaccgtggcggcacgagccaggagatgctgcgcgcgacggaggaggtgctggccacgtcgcgggtgcccgtcgggctggtcaacatcacgcggctgtccgagtaccgccgggacgcgcacacgcagacctacaagaagcagtgggtggagccgacggccgagcagcgcgccgaccccaggagctacgccgactgcacgcactggtgcctccccggcgtgccggacacgtggaacgagctgctctactggaagctcttcttccccagcaacgatcaggtcctctgatggtgcattggtgcctgcatacatacgcctggaaaccaactgctaggggctagcccaaagaaaatgtgtctagatgaacaaagacatggggttcaaatgttttgttttgatttcggatatggacgctgtcgatgctcttgttctctgtggaattcttcttaccaactgtgcctcccatatatacatcactactgatactagaatctatgctgatattttctttcgttaaaaaaagcgacagtgaagcgtagaagcacctacaagagttttcaaaa

SEQ ID NO: 12028 - DNA, 1701 bp, Zea Mays
cttcttccagctacgagtctacgaccagttcggcagcacggcgagcatcccgtccgaccatccgctcgctcctcagagctagcctccaaactcgcaattatataactaccgtcccttgcaactttccagaccttttgcccccctgcttcctccgcctgcaccctctcacgagcgcccgcccgcccagatctagggttccatccgcgggcaagatgagcagcccccatggcggcctcgacgaccagatcgagcggctcatgcagtgcaagccgctcgctgagcccgaggtaagggctctgtgtgagaaggcaaaggagattctgatggaggaaagcaatgttcagcctgtaaagagtcctgttactatatgcggtgatattcatggacaatttcatgatcttgctgaactcttccgaattggtggaaagtgtccagatacgaactacctgtttatgggagattatgttgaccgtggttactactctgtcgaaactgtcacacttttggtgtctttaaaagttcgatatcctcagaggatcaccattctcagaggaaaccatgaaagccgacagattactcaagtttatgggttctatgacgaatgcttaaggaagtatggaaacgcaaatgtctggaaaacatttacagatctatttgattacttccccttgactgcattggtcgagtcagaaatattttgtttgcatggtggattatcgccatccattgagaccctcgacaacatccgcaacttcgaccgtgtccaagaagttcctcatgaaggtccaatgtgtgatcttctgtggtctgatccagatgatcgatgtggttggggtatttctccacgtggtgctgggtatacctttggacaggatatatcagagcagttcaaccataccaatagcctaaggcttattgctagagctcaccaattggttatggagggtttcaattgggctcatgagcaaaaggtcgtgactatatttagtgcacctaattattgctaccgctgtgggaacatggcatcaatcctagaagtggatgattgcagggaacatactttcatccagttcgagccagccccgagaaggggagagccagatgtaacccgtaggacacctgactattttctgtgatgcaaaagtgacgtggatctgcagcaaaggtttgatagataggcgcagtttcctggttgcagatatatatatatctatatatattggctggagttcctccgcgtgctattcttatattatttctcgcccatggcgctcttggctgtcgccggctgctttgctgcatcgtggttcaagtgtataccctactacagctggaaggactggatcgtgctcttacctgtctctaactggttgattggcttagggtgggctgcggtggtgtgtgtgtgtgtgggggggttcaagcatcaggcagccatctgtattatgggaggaaagtgttcccgttgtattcattttgttcccctttcttcctcatctgattttcttctcttttttttatttcttccttctctgtgattcttgtagagttcagcacttgtatggttctatgttgggccattagttttttttaactctctttctctgactgcctcgatttgccgtatagaattacatttctaagcgcaactagccaacctgtagcattttctgtcatcagcatttgaaaacaaaaaaaaaa

SEQ ID NO: 12029 - DNA, 76 bp, Zea Mays
aacggctgcctatgccaacggtcgtctacaatggctacagtgaatagtgaacagtgccaactgcgcgggcagaatc

SEQ ID NO: 12030 - DNA, 662 bp, Zea Mays
agacccctttcatgtgggagcctttggcactgggtttgggcatcaaaatggaacgaaagagcatattttagcacacgcaaggtgaaacttgatcatgagtacctttcgatggctgttctcgtgcaagaagttgtgaatgcagattatgcttttgtcattcataccacaaacccatcgtctggagattcttctgagatatatgctgaagtggtgaaagggcttggcgagaccctcgtgggagcctatcctggtcgtgctatgagctttgtttgcaaaaaagatgaccttgactctcccaagttacttggttacccaagcaagccaattggtctcttcataaggcaatcaatcatcttccgttccgactccaacggtgaggacctggaaggttatgctggagcaggattatatgatagtgtaccgatggatgaggaggatgaggttgtacttgattatacaactgaccctcttatagtagaccgtggattccgaagctcaatcctctcaagcatagcacgggctggccatgccatcgaggagctatatggttctcctcaggacgtcgagggagtagtgaaggatggaaaaatctatgtagtccagacaagaccacagatgtaaaatagagaaagttcttgcaaatatctactctatgaaaagga

SEQ ID NO: 12031 - DNA, 100 bp, Zea Mays
gattgagtcgttttaaatccataacaagtcaaaatacatctcaatcccgcccaatccacttcaatccacatggaattaaaataaccgaacaaggcctaat

SEQ ID NO: 12032 - DNA, 912 bp, Zea Mays
ctgcgttcctcaactgctgatgtacttttgtggaaagacaagaagacctctgctgcggtagttggtggtgcaactgtcctatgggttctgttcgaaattgtagaataccatctcctgaccctggtttctcatgtgctgatcgctgcactgaccatcttgttcctgtggtccaatgcgactgtctttatcaaaaagagtcctcctgatgttcctgaagtgcagatatctgaagaccttgctgtaaacattgcgctagcattgcgtgctgacatcaacaaggcacttgccctgcttcgggagattgctctgggccataacctgatgaagttcctaggcgtggtcgtcgccctttggattctttcagagatcggggagctatgtgatctcctgagattgatgtacattgtggtcttgatcctccacacagtgccgatactgtaccacaagtatcaggaccaggtggacaatttcgctgcaaaggcgcacagggagctctgcaagcaatacgcggtcctggatgccaaagttctgagcaagattccaagagctccaccaaaagataagaaacagaactagaacgtggaggatgacaagcgccttgttttcggcttgggcgacgagagtttgtagccaatggtctgatgtggttcgtgggctttgtgtaggtgcacagtttcacgtatatgttctggtcgtgtaatctatatgtttatataaacctgtaggggtgttgatgaccatcgaaagtgtcgtaaatattcagtagtatatgtagcttagggcttaagcggttgtgtttataaggtcattgtcgttgtcgatgggaagtattatcatgttattttcaggactcaggagtataaaatgaaataaaatgtgaattcatctgaagctgaaacccaaactaagaga

SEQ ID NO: 12033 - DNA, 1340 bp, Zea Mays
ctaacacaacggaggcaataggatgggatggtcatctataaataagtagcccggcgcagccttctttggagcagggagaagaacacagggcacacgcactacacgcacggcacgcagatacatatagagagaggttagctatagcttgcacatctatttaactaactaactaactggctagctagctcgatccgcagagcaaagcgaaagcagcaagaagcaaagcaatggagaaccctgcgagtgtgctagttctaccagcgcagttcaccaaactcaccttcggaaacctgtacatccgccgggccgggccgggcagcagggagataaccgaggagggcaggtgcgacctggacaagagatacgtgagtgacttccccgtctacgacggccgcggccccgacgccagccttgtggcccgcgtgcaggggatcaccagcgaaatcgggaacgcgcaccaactgttcgtcgttgttttcgacaccgacaggctcaagggctccacgctcgtcaccaatggcgtgataacggccgggtctgacgagtgggcgatctacggcggaaccggggtgtttgccatggcgaggggcgtcataaggagaaggtatctcgccgacagggccggcgggaacactgatgagctcaacatggatgtcttctgccggccgtttggctcacagtcagagctgcaagataaggtgcaggggcagggctctagcgtcaccaagattggactatggggtggaccgggagggtcggcacaggacatcacggcggagcggccgccgcagcgtctgcacagcgtcaccgttcgtgctggcgtcgccgtcgactccatcgagttcacctatactgacagcgctgggcagaggcgcgccgctgggcgatggggtggactcgggggcaatgttcgaacgatcgaccttggcgacgccgaggatgtcagggaagtctcgggaacatacggcgcatttgaaggtgccactacgctgacctcgctcaggctcgtcaccagcagcagaacctggggcccctggggtgtcgagaacgggacgcgtttctccgtcacggcgcccatcggcagcagcatcgtgggattctatgcgcgggcgggaaccaggctcgtcgatgctatcggtgtttacttgcgtcagatttaattcgaataatagcaggggagctactgctagctacgtacctgctccatcctccattatcctttatttcaattcgctcatcatcgtcgtgtgtaaattaaataaataaagctcttgtgcccatattatatatagttgtcatggccgtgccgtgtctatgtgcgtatacaagtttggctcata

SEQ ID NO: 12034 - DNA, 1901 bp, Zea Mays
cgtgctgcggctccttccggtcccccaccacgcgccggacatgaaatatcccactcaaaccaacctaccgcccacagacccaaatcggcaccccggaagcctcaaatccgctctattcctctctccccctctctcccccatcgcaccagcaggcgagcgcgaggcggaggagtagagatggagtcggaccagggcaagcttttcatcggcggcatctcctgggaaacgacggaggagaagctgagcgagcacttctccgcctacggcgaggtaacgcaggccgccgtcatgcgcgacaagatcaccggccgcccccgcggcttcgggttcgtcgtcttcgcggatcccgccgccgtcgacagagcgctgcaggacccccacaccctcgacggccgcacggtcgatgtgaagcgggcactctcgcgggaggagcagcaggcctccaaggccgcgaaccctagcggtggaaggaactccggtggcggaggaggcggcggtggcggcagcgatgcaagtggtgctcggacgaagaagatctttgtgggcgggctgccctctactctgactgaggatgggttccggcagtacttcgagacctttggcatagttactgacgtagttgtcatgtatgaccagaacacacagcgcccacgtggtttcgggttcatcacctttgattcggaggacgcggttgaccgcgtgctgcagaagaccttccatgatcttggtgggaagctggttgaggtgaagcgcgcattgccccgtgaggcgaatcctggcggctctggtggtggtcgttctgggggaggtgggggttatcagagcaacaatggccataacaccagctctggtagctatgatggtagaagtgatggtggcaggtacgggcagacacaacagggtagtggtggtggtggctatcctggctacggtgcaggaggctatggtgctggggcagctggatatggatatggtgctaaccctgcagttggatatggaaattatggggctggagggtatgggggtgttcctgctgcttatggtggacattatggaaacccaggtgcagctggttctggttaccaaggtggacatccaggctcaaatagaggaccttggggcagtcaagctccatctgcatatggaactggagggtatggtggcagtgctgggtatagtgcttggaacaactcttctggtggcggcaatgctctgaatagtcaagcccctggtggacctgcaggctatggaagccagggctatgggtatggtggatatggaggggatccatcatacgctagtcacggaggatatggggcttatggagcacgtattgatagtgctggcaatcctgctactggtggatcatctggatacaatgcaggctatggaagtggtggtgccaactctggctattcaagtgcttggagtgatccttcgcaaggtggtggatttggcggttcggtcaatggaggtgctgaaggacagtcaacttatggcactggctatggcagtgtgcagcccagggttgctcagtaaagagaggcattttgagtgtgcgaaatgaaccagtgcatctgggcagtctatgtattgatttgtcattccagtctctctggttgctctcagcattttgaagattgcccatttgctgcttaaatcagtatttatccgggttgaatgggatggcattctttttttagatatgcccaagcaaggtctatgaaatcaggcatttgaaaaaggcattttgcacagtgatttacatgaactggcgagaagttccaatatcggggttctgacagaatgcaagataccagcttaagtgcttcattttctgaagggtcttgtgctgtgctacaagatagtgggcttataactctagctacacgattttctgg

SEQ ID NO: 12035 - DNA, 836 bp, Zea Mays
acaagctcagcgcactgacaagatttgtcaagtctgtcactctgttgtctgtgacaaggggaactgcagtgaccatgaagcgcatgctggaaacctcatttcctggcattcatgttatcttgcataattatcctcctccattccccaagcgtgtactcagcaaagttatcccaattgttcaagttggagccgttgcaacaataatggctggtgaccagattttccccagaattggaatggttgctcctccatggtactactcgcttcgtgccaatagattcggaaccatggcaacaatctggctatttggcaactttgctcagtcctttctacaaagctctggtgcctttgaagtttactgcaatggagatttggtattctcaaaacttgctgagcagaggttccctagcgagttcgagttgcgggaccttgttggcagcagattgcctgggtctccatttgggaggaatccggggaaaaccctgacttgatgatgaccccggaaatcagagctcagaatgccacaatttattatgttgcttttaaggtattagtagatagtaactatttggtattgatctatcgaggctgcagcttgtctgtaaacacaactttccagcttgtataatggatcaacggatcacctgacatgtgacggtggccgaagtactacgaactctaatgacattggaacggtaaagatattgtgatggcctgttagtttatgggaggtgtactgtttggcattgatctcgatgtaaacaaacaatgttagcattgtcccatggggaagattaagcgagcaggatgttaaagatacaatcattggcatcaag

SEQ ID NO: 12036 - DNA, 719 bp, Zea Mays
ccttaatcttgtgtttcaacaaattgaaaatatccttgccccactgccaattgggttcgcggtgttcctggtccaccttgccaccatccccattactggcactggcatcaacccagctaggagccttggcgctgccatcatctacaacagggatcacgcctggaacgaccattggatcttctgggtcggccccttcattggcgctgctctggctgccatctaccaccaggtgatcatcagagccatcccgttcaagagcaggtcttaagctgccgtggccgtgccgagacatgccagtccgaagaacgggcgtcttcctgtgatgtcttcttgtctgcccacgcctagtttctctgtcgattcctattcgtcgtctcttcagggctggtgctcactgctgcgccgttctgttaaccgaaacaagaactctgtgtattcctgtaccgagctgtgcatgtttttttctttccatcgtggagaatttaagttattatccgtttgctgcaaggtttgccgtctcattttatgcgttgggatgttggcaagaaagggcagatgtcatgtgagaatttaagttaagtgaaatcgattcagggttttcttggtttcagtttcaacagaaatcggcactggctggattcgcattcacatcggatatgcctcctggaaactaatagtaatttgaaacgatcttaaaagcaacatagaacgtagcgtga

SEQ ID NO: 12037 - DNA, 1827 bp, Zea Mays
gcagcagacagaactcattacactagcaaattgatactaggattactgggtgatgcttgtggggtggggaggcaacaacgggtccacgctgacggctggggtcattgccaacagggaggggatctcatgggcgaccaaggacaaggtgcagcaagccaactactacggctccctcacccaggcctccaccatcagagtcggcagctacaacggggaggagatctatgcgccgttcaagagcctccttcccatggtgaacccagacgacattgtgttcggaggctgggacattagcaacatgaacctggccgactccatgaccagggccaaggtgctggatattgacctgcagaagcagctcaggccctacatggagtccatggtgccacttcccggtatctatgatccggacttcatcgcggctaaccagggctctcgcgccaacagtgtcatcaagggcaccaagaaagaacaggtggagcagatcatcaaggatatcagggagtttaaggagaagaacaaagtggacaagatagttgtgttgtggactgcaaacactgaaaggtatagcaatgtgtgcgctggtctcaacgacacgatggagaatctactggcatctgtggacaagaacgaggcggaggtatcaccatcaacactatatgccattgcctgtgtcatggagggggtgccgttcatcaatgggagcccccagaacacctttgtgcctgggctgattgatcttgctataaaaaacaactgcttgattggtggtgacgacttcaagagtggacagaccaagatgaaatctgtcttggtcgatttccttgttggtgctggaataaagcccacctcaatcgtgagctacaaccacttgggaaacaacgatggcatgaacctgtctgcccctcaaacattcaggtccaaggagatctccaagagcaacgtggtggatgacatggtctcgagcaatgccatcctctatgagcccggcgagcatcccgatcatgtcgttgtcatcaagtatgtgccgtacgtgggagacagcaagagggctatggacgagtacacctcagagatcttcatgggcggcaagaacaccatcgtgctgcacaacacctgtgaggactcgctcctcgccgcacctatcatccttgatctggtgctcttggctgagctcagcaccaggatccagctgaaagctgagggagaggacaaattccactccttccacccggtggccaccatcctgagctacctcaccaaggcacccctggttccccctggcacaccggtggtgaacgctctggccaagcagagggcgatgctggagaacatcatgagggcctgcgttgggctggccccagagaacaacatgatcctggagtacaagtgagccaagtggcgtgccctgcagcgcgaggttagctgctggaagggaactagaaaggcgagattagctgtgggattgtgttgggcttgtcgtgttttcttttgcgttctttcctagtcattgctgttgcgcttttgtatttgtcggacccgtaactaccagggctctgctattagcggcacggagcctgtaattgtattgtatgataatgtgatcgagggtgctacttcccctcggcattcctagtgttggttaaaagtcgttcgacagcaacttatcgacccaccactgacttcaccctatccgccggcaacttgtcgaccccattatctgcttagggctagtttggtgagagaattagaacaactccaagaggtcattgaaaaattatttcccaaaccttgttattgggattgttgcaaaaaaattcactaaaa

SEQ ID NO: 12038 - DNA, 1925 bp, Zea Mays
ccacatccagtcgcacaaaaacggcccaagtggagcaggttctgcttctggctgcccgctgtcccgtggtccctctctccctccctgtcctgtccgccgccgccggtccccgacggcggctctgcagccacacgcacaaggactagagcggacataatacggtgcaagcggagggaccaaaccgcaaaagcgcacagttcccgttccccctccgacccgttcattccgcttggttttctcctcctccgtcctcttcgctccccgtcagaccatccctgtgaggctgtgacgcaaccgggcgccggcggtctctcctgcaccacagggcacgccgcctcccgcgcacgtgttctcctcttccggggattcagatctggggattgctattctgtccgtctgactccgtccgtcccgaggcgcggcgaggggagcgagatgggttacattggccaccacggcgtcgccacgctgcggcgctacaagtacagcggcgtcgaccactcgctcgtcgccaagtacatcctccagcccttctggtcccgattcgtcaacatcttcccgctatggttcccaccgaacatgattacactgacaggtttcatgtttctactgacatcagcattccttggctttttatattcaccccatctagatacagcaccccccagatgggttcaccttgctcatggactgcttctctttctttatcagacttttgatgctgtggatggaaaacaagcaaggcgtaccaactcatcaagtcctctaggcgagctttttgaccacggatgtgatgcgcttgcgtgtgcttttgaatccttggcttttggaagcacggcgatgtgtggaaaggctaccttctggttttggttcatttcagctgtcccattttacttcgcaacctgggaacacttttttacaaatacacttattcttcctatagtcaacggaccaactgaaggccttatgctgatctacttgtgccattttttcacctttttcacaggagccgagtggtgggcacaggattttcagaagtcaatgcccctgctgggttgggttcctcttatctctgaaatcccggtgtatgacattgtgctatgtcttatgattgcttttgctgtaatcccaacaattggatctaacatccacaatgtatataaagtcgttgaagcaagaaaaggaagcatgcttctggcactagccatgctctttccttttggtttgctcttggctggagttcttgtctggtcctacctttctccttcagatataatgagaacccaaccacatttgctaattattggaactggttttgcatttggatttcttgtgggaagaatgattctggctcacttgtgtgatgaacccaagggtttgaaaacagggatgtgcatgtcccttgcgtattttccatttgcaattgcaaacgcgttgactgcccggcttgatgatggaaatccactcgttgatgagcagctagtgctcctgatgtactgcctatttacagtggctctgtacatgcattttgctacatcagttattcatgagatcaccaatgcactcgggatccactgcttcaggatcactaggaaaaaggcatagttcctccgtccacgggcatcagcgttgccctggattgtgtaatcaatcacaactcacaaggtggtgcctgacagacaagcaatttttcatatttaatggatgctgcttcctgaatactcacatggatgacgcccccccccccccccccccccccgccccttaaaattcacatcggcatgaacgtgcggatgagaaagcagtgtttttttttgaaacaattagcaacatcatgctgtatcttaccaattttttgtggaattcgttgaatttgctgatagtgatgtattgcaaattaagaattgtttggattttaaaaaaaa

SEQ ID NO: 12039 - DNA, 441 bp, Zea Mays
ggagaaggaacaaccgaggcaatctcctgcggtcgggtgacatcagaggctatcaatcaatggcccgcatgtatacaaggctggctgccatgccaaagaaaggttagatgtagaacatgtgccaagccaagagcctatgtcagtccatatgttgtcaggtttgctgtgtgctgtctgtctgtgaacttggtggttcttgtttcctaataagtcctaaccattcatgtgtgtgtattctgtattctgtatcccggattcccgatgcttggtctgtgatgtaataaatcctggaattcaacagttgttacttctgatctatttatttagttgctcagtatttccgtcagtttctgctgcgcaacactacggaggtgtcttgtttaatgtttcatatgctgtcagctactgcgacagtcttggaggacacattcaagagacagc

SEQ ID NO: 12040 - DNA, 1558 bp, Zea Mays
agacacgcggaggcgcgttcctccccatcctcggcaaccacgagtctctccttcctctcccattccactagattaccaccacctccacctccggctcctagcagaggcgcaccaggtcccactgccaccatgtccaagtcgggagcgctggatcttgcttctggcctcggagggaagatcaacaaggtggaagtcaagtcggccgtcgatgagtatgagaaatatcatggatactatggagggaaggaggaagcaaggaagtccaactatactgatatggttaataaatactatgatcttgccactagcttctatgagtatggttggggtgaatccttccactttgctcacagatggaatggagaatccttacgtgaaagcatcaagcgacatgagcattttcttgccctgcaacttggtttgaaaccaggaatgaaggttttagatgtgggctgtggaataggtggaccactgagagaaattgcaagatttagctcaacttcagttaccggattgaataacaacgaataccagataaccaggggaaaggagctcaaccgtttagcaggaattagtggaacatgtgattttgtcaaggcggacttcatgaagatgccgttcgatgacaacacttttgatgctgtttacgccattgaggcaacatgtcatgcacctgatccagttggttgctacaaggagatatatcgtgtgttgaagcctggccagtgctttgccgtgtacgagtggtgcattacggatcactatgatcctaacaatgcaacccacaaaaggatcaaggatgaaattgagcttggcaatggcctgccagatatcagaagcactcggcaatgtctccaggcagtaaaagacgccgggtttgaggttgtttgggataaggatcttgctgaagattctcccttgccttggtacttgcccttggatccaagccgattctccctgagtagcttccgtttgacctctgtgggacgcatgattacccgcacaatggtcaaggccctggagtacgttggtcttgctccgcagggcagtgagagggtctctaatttcctggagaaggctgcagaagggctggtagagggcggaaagaaggagatcttcacgccaatgtacttctttcttgttcggaagcctcttctggaatgagctcttggatcaccttttcagagagagaaggcaagtggtcatttcgaagaagccgaggagagggaacctggaatcaagaaaaccttcagctctcctgtgtaggaggaaagttaacgaacagtgtagtaactgttcagctttgtgtttattcagttgttttgctgcttgaggttattcgtttctaggtgggggttggaatccttttcgccataaacctctcagtggcataaataagatggtttgcataagagtacttcatggataccgtaagggctactactgaaagagaaatgtttaagcagcatggtatgtgagcaactagtgataattattccatccttttttttaatataaagcaggagttttgtcatgcgtcatgtctagggccggaaaa

SEQ ID NO: 12041 - DNA, 826 bp, Zea Mays
cgaaagctgccctccctacacaaggatctgccccacatagtcgatctcaagcagcattggagggtcagccaaatggatggtgaacaaaattaaagggaagatgcagaaagcacttccagatctcctcaaggaatatgacatgccagcagggctcttcccacgggacacgactaactatgagttcaatgaagagacaaagaagctgacagtgtacatcccgtcagcctgtgatgttggttacaaggactcgtcagtgctgcggttcttcacctgtgtgaccggctaccttgaaaaggggaagttttccgacatcgagggcatgaagaccaaagtgctggtctggaccaaggtgactgccatcaagaccgagggcccaaaggtccatttcactgcaggcgtgaagaagactcggagccgtgatgcctatgaggtcgtcagagatggtatcaccatagacaagttctagagcatatacctggcatgaaaaatgtgacgcggttattcatatatgcttctctcctctcagttggtacaccgaaattcatacaatatcgtgggctaattctgcatttgtatgaaagtttaatatgcttgacgtgttaatcacactgctagagcatgcgataaatcgcagttggttcattattaggaaattgcattgagctgtaatcagatatgcttctctcctctcagttggtacaccgaaattcatacaatattgtgtgctaattctgcatttatgtatgaaagtttaatatgcttgacgtgttgattaaataacactgttagagcatgcgataaatcgcagttggttcattattaggaa

SEQ ID NO: 12042 - DNA, 752 bp, Zea Mays
caattcgcctgttgctcatcttcagtgggagaaacatggaacctgctctgcccctgtggttcaggatgaattacagtatttcacccttgcccttgacctctacttcaagtataacgttacggaaatgctgtcaagtggatggatacaggtttcaaatggtaaggaatatgcactgagcgatgtcatcgataccatcaaacatgcttttgggggatcaccacaaattgtttgcaagaggggttcaatcgaagaacttaggttatgcttcgacaaagaattgaagcctcgtgattgccttaccacttctttggcgaatggaagtgtatcaaaaagcaagcactgcccgcggtacatcaccttgccaacgtatgatccccttgtgcttgccaattcaactgtagagatcatgacacagttcgatgaatttgaggtgcctgcagctctttatacagcctaaaatgcaattgttgcaatagcagaaggtgctcgcgtgagcacctagaaccaggcacatttatcctgggatattcaatcatttgtacatgtacacttgaaagagaactgacatcttttcaacctgaaaatttataagctttatgtaaccgtgaaggtcggatattgcacatgtaattcgctaaatcaaaactgtatcttgaggtagaattttcaagtagtaataatagagatataagaaacttatcgcccatcatgtctgtcattaatcatgattcatggattagccgattaggaag

SEQ ID NO: 12043 - DNA, 1924 bp, Zea Mays
gtaaggaatccccttttaagggagcgcgtttcctggtcaactaaggccggcatgaagggctgctcagagcgcttgctgtttctgctgctgctgctggcatcgtcgtcgttactgtccgctgtgattgccgcgcagcagacttgccccgccgacctcgacagcaaatgcgatggtggcgcgtctgatgatgattgggagggggagttcttccccggcgtcccgaaaatcaagtatgagggtccaacaagcaagaaccctcttgcttataagtggtataacaaggaggaagtgattctcggtaagaagatgaaggattggatgcgcttcagtgttgcattctggcacacgttccgtggtactggcgctgatcctttcggtgctcctacaaagacttggccttgggaggacggcacaaattctttggccatggctaagagaagaatgagagctcactttgagttcatggagaagttgggagttgacaaatggtgcttccatgacagggatattgccccggatgggaagactcttgaagaaacaaattctaacttggatgagatagtccagctggcaaagcagctgcagggtgagaccaatataaagccattgtggggtaccgcacagctctttatgcatccacgttacatgcatggcgctgctacgagcccagaggttaaagtatatgcttatgcggctgcacaagttaagaaagctttggaggtcactcactacctaggtggtgaaaactatgtgttctggggtggaagagagggttaccaaactcttctgaatactgatatgaagagagaacttgaccatctggctaactttcttcaagctgctgttgactacaagaagaagattggattcaacggaacactattgatagagcctaaaccacaggaaccaacaaaacaccagtatgactgggatgttgcgactacgtttgcttttctacagaagtacggtcttacaggagagttcaagattaatgttgagtgcaaccatgctactctatctggacacagctgccatcatgaattggagactgcacggattaatgggctgcttggaaatatcgatgcaaacactggtgatcctcaagttggttgggacacagatcagttcatgacagacattgcagaggctactttggttatgtcaagtgtagttaagaatggtggacttgcacctggtggtttcaactttgatgccaaattgcggagggaaagtactgatgttgaggacatgtttcttgcccatatctccggaatggacaccctggcacgtggcctccgtaacgttgccaagctgattggggatggttccctagatgatcttgtccgcaagcggtaccagagctttgatagtgagattggtgccttgatcgaggctgggaaaggagactttgagacgctagaaaagaaggttctagagtggggtgagcccactgttgcatccggcaaacaggaactggcggagattctgttccagtctgccctatagatgatggtgccatgtccataggtccaggaataagcaagggtgcgccctcctccgaacacgcactcgtcctcctcaccacggggatgttatggttccgtgcgatggactacctacaatacagcatggaactgagataattaggatgtaatctgtcagaaaatttccagaattgttacctccttttgtttagagtggattagtggaatcaaactggagttagttaaagcttatcctacattttggtgtggcgatcgtgtttggtacttccttgaatgctgtttcatagtgtggcaacgatgttgctgcttagtcctacaactggtggtagtaatgtatcatagttcgaacgtttcttcacaataaattatgatctttaataaattttattagttcaaaaataaataaaaatagagttcga

SEQ ID NO: 12044 - DNA, 649 bp, Zea Mays
aaaaaacaataatcatgcatcaaggtacaaggagaacagatgggatcccaagcggcttatcggctcgggtggcatgccgtcatcacattccgccacggttacagcactagcagtagcaattggattccaggatggctttagctgctccctctttgcaacagcaactatatttgcaagcgtggtaatgtatgatgcttctggtatcagactgcatgctggaaagcaagcagaggtattgaatcaaatagtttgtgaacttccttctgaacaccccttgtctgagacaagaccactgcgagaacttttaggccatacaccaactcaggtggttgctggtgcattgcttgggtgtacaatagccacagcaggacaattattcctttgaactacgaaggtgcggcagaaatgttgtagcatttgtatcgcagggacttgagaagaagtttctccagtgttctgctactttaggtattggtaagatttgcatgttggtgctgtagtgttgttgaatgttgtatgttctgatggaatgtggttatatgtcaaaaaggtgacgttcacaggattgctgtacagaacattgttcatggttatgattgatgaaatctaaaatgtgattgaaacagctgcagaactaagggagtgtttg

SEQ ID NO: 12045 - DNA, 76 bp, Zea Mays
cgcttacaggctcacaacgccaaacggcgaggacctggagcactcctggaacatcgacaagctccgcaaatttttt

SEQ ID NO: 12046 - DNA, 76 bp, Zea Mays
gttcgttgatcatcaccagagccacacacccaccatccgaagaccgaacccctgcccttctccactcggtcgaaac

SEQ ID NO: 12047 - DNA, 73 bp, Zea Mays
ctgaggagcaagatgacgaagctgaagagcacaaagtcgaagcttaacagacgatccgaagcttaatagataa

SEQ ID NO: 12048 - DNA, 926 bp, Zea Mays
ccacaccctaggatagtggttgaaataggtatatgttggtgggcttgaccccaatgttagcgaagatgaactgaggaaagcatttgcaaaatatggtgatcttgcctctgtcaaaattccttttgggaaacaatgtgggtttgttcaatttgtaaacagagttgatgctgaagaagcactgcatgggttgaatggatcaactattgggaagcaggcagttcgactttcctggggccgcagccctgcaagtaaacagtctaggggtgattctggccaccggcgcaatggcaactgcaacggcatgtactacgggacaccattctacggtggatatggctacgcctccccgattccgcacccaaacatgtacgccgcggcctacgaagcctacccgtactatgggaaccagcagctagtgagctgatgtagtgatgtggcgagatgctctctgctcagttttcctcccttggaggaaacgagtttttggtcccagtaaaagcatagtagctatgatgagatatatgataggtggccataaaaatgggcgcgagagacgagacaggcatatgatggtaacgctacctgcagatttgtgctgctagtagaacctaaaagagcttgtagtagacaaataaaaccttttcttttgtcttggaaattttgactcgctaataaaaagtgaagctatctgttgttgtggctgtctgtttggttggtgtgctgtgttttgggtcggtggtccttgcatgttcggtttctcacttcgcatcagttgctgttgctagcttggagttgcatgatgtcacaccgcctgtattattttttgcatgctatgttgatacacgtatccatgttgctatcctgcagccaaccgcggctatcctgtcaatacgaacttcggggatttaggttttttggttctggga

SEQ ID NO: 12049 - DNA, 1012 bp, Zea Mays
ctgatggaggcgctagtgtggtgtggtgaaaggggtacgggatgaccgaggcggggcccgtgctggccatgtgcctggccttcgccaaggagccgttcgaggtcaagtccggctcctgtggcaccgtcgtcaggaacgcggagctgaagatcgtcgacccagacaccagcgcgtcgctgggacggaaccagccaggcgagatatgcatccgcggcgaacaaatcatgaaaggttatctgaatgatccagaggcgacaaagaacaccattgataaggacggatggctgcacaccggggacattggttatgtggacgatgacgacgagatcttcatcgttgacaggctgaaggagataatcaaatacaagggcttccaagtacctcctgcggagcttgaagcccttctcatcacacatcctgaaatcaaggatgccgctgttgtctcgatgaaagatgaagtcgccggcgaagtcccggtggcattcattatacgcagtgaaggctctgagatcagtgagaacgagatcaagcagtttgttgcaaaggaggtcgtgttctacaagaggatcaacagagttttcttcacggattctatcccgaagaatccctccggcaagattcttaggaaggacctgagagcgcggcttgccgcgggcatcccaagcagtgacaacacacagtccaaaagttgatacgtactttcgtactattcttttctagctgtgccaaaaatcatgctgtgctctattcatgagatggcaatggtatacacaaaacgccaagcggtcgttatcgattcttctagatgggcaagggtaaggtatacttcgtttgtgtccgacatattatgtatttgtatcatgtatagatacgttttgttgacaacaagtgctaattataatgtataccatgtttgggaacctattgttcttgttaataaagagtcgacccctgtcctgaattgcgtttgctctctgttacataaatccatatccgctttggtaaaataaag

SEQ ID NO: 12050 - DNA, 1574 bp, Zea Mays
ttgcgttcggatgcttggtctcttgtagaatgggaaatgggcctgcttcaggctggagttgtggtttagaatctgccaggtttctttttcaatgggtattctactcttttggctccaccaaatgaagtgttgattccaccagaactcctttctagcaggactgtgtggacaccagatcgggagcttgggcagtatgaagacctggtagctagggtcacaaacttccataatgaggacaagggcttcatggttttggatggcgatgtttttgatgttccaattaggaaggacattgttcaccgagtagtaaggtggcagcttgctaaaagacagcaggggacacactcaactaaaactatcagtgaagttagtggcactggaagaaagccttacccgcaaaaaggaaccggaaaagcacgacatggaacactgcgcggtgcccagtttcgtggtggtgcaaccatgcatgggcctaaacctcgaagccatgcaatcaagctgcagaagaaagtacggcggctggggcttaagattgccttgtctgctcgaactgctgaggggaagctcttgatctttgaggacttggaagttcctagccacaagacgaaaaacattgtgcaatacattagacagatggatgactcaaagaaggttctgttggtggatggaggcgacattgataagaagctaaagctggccactcaaaaccttcactacgttaacgtacttccttccattggcctcaacgtctacagtatcctccagcatgacacccttgtaatgactcgggccgctatcaacagaatcgtcgagcggatgcatacccccatcaaccgctagcaaggagggtttctgagtcgcaccactgcttcttacagccagcaacctgtgctttttcgttccctgttaaagctcgaaggtttcctgttatcttggtgctaacatggagctgcaacgtgagctgtttattttctgtcagactggaggtaccgaccgaggtaggagggaaatgttgtggccttttgtaagcaggtcattggatgtttattttagattattttttggcgttttacccacactacccttgaaacttagtgagttcttatccagcaaataagattatgtaatcctggattatataggtccaaagcttgggacagcaatttgtttagagtcctgtataatctagctgtcacgtcgcaggactcacgtggagaaagatgaagggatttgcatcgtttagggtttagtaagtggcagcggattctgtatttacttggatttggtccattttcatagaagttggctgaaaacgaaaggtttggttggcagaagccaattctaagagacataagctaaaacaaataggcccatcatccatattaaataagctagattgtatatttttagaagcaaacaaataggccctattttaatctaaaattttactgtctacgctgtaaatctcgccgcaccttgatttcggtccgtccgtcgcagccgaagtatgaatttgatgttttttaaggtccaaacaagcacaacaactctattttgtcacgccaacaaaaaaa

SEQ ID NO: 12051 - DNA, 5799 bp, Zea Mays
gacgacgctcagaccaaagagcgagaagggggcaagcggcacgctgccggaaaagagaggctggcgtggtgaagggcagggcggagccttgcaccgcagaagagaagcgaggggagcgccaagcagtagtagaaagagagatagggaggaagagcgacgagagccgaggagctctcctccgcctaatccttggccgcgctgctagattcgccagaattaccgaggcgctgcaccccggatctacagggcggcggcggcgctcgtcggaatccggcgaggcggcggtgatttgccggggatcggcgccgcatgtctcagatctgagatggacaggatccgggacggcaggaggagcggggtgtccggcggagccgggccgccgcctccgagaaggcgcctcaggagcaacggcggagggggccccagagactcgccgcgctccgagcgccgacgtggcgagcgcctcatgctcaacggcggcggcgccggcgccgggagggacgacgccgacgacacctccgacgacagcctcggcgacgacgacgaagacgccgaggaggagctcgcgccgcggtaccagcagcagcggcggtcgccgagcacggcgccgccaccgccctcgccgccgcagcccggcggtggccaccaccacagcagtagtagcagcggcggcggcggttaccacaaccaccaccacggccagcagcatcagatacagcggaagggcggcgtctcacatccgaaaagccccatggtggtcaaggctgttgacgagatgatcggcgtgcctgtcccgaggaaagcccgctctgcttctacgaaacgctcttcgcacgagtggcctgtccccggcggtggaaccagtggaggcagctccggcgtaggagatggctcgcagatccaacgaccttcgtcacggccgatctctccggcgcctgcctctactgccgctcctcggaagaagcttaaaacattgggtggcggtgtgagcagcggtggtctgggaccagcgccgaagcagcgaccgtcgatgtccccagcgccttcaacaaccccgccacaaccgccgccgtcgaagatttcgaagtctccatcttttatccaagaggagattgaggtcgctgaggtgctgttcgggctcaccaggcagttcccatgcccgcaaaagcaggagagcaaccacaaactcgagcctagggacgcgcccgaggccaagtctgggaactcttcgccggccccctcgtcttctggcgtccgaccgtcggattccacctccctttccaccatagctccaaagaggaagagaccacggctggtaaattacgacgaagatagccgtccggcgagaccagagttggcagagccgtcatcaaacccggagtcacctcctgtggcaagatcagaagcgaagacaacagcaacatcggcagcagcagaaagcggcaccagcaccacccctgcggctgcccaacctgagacttcacgagagtcagagaaggcggaggaccgtggtagaaacagagactcagagctccggcccaacgaatcagatcggcgagatcacaggttggagagccaggctgtgccgccgtcgccgttgccgttgccgttgccagagcctccagtcaagccggatgctgaagcaaagccggtgggctccgaggccaggaacggcgaagctactgccacgacaaagattgagctggcatcggatggcgctcggcatgacaagaggttttccattgatctcatggctccccctcctgggaagctatctgatgatatagatggctcctccgaccctgatgcagataagaagggattggattctgagatggacatgttggggagaggaaattcggaaaagaaggctagtgaaaggactcggagaggactggatattgatttggaggaccagaaggtgcgaagaattccagtcgatgagttcgcgccgaagaagctcacactgcagttggatttggagaagcccagtctcggtgatgaaaagtcgccatcagagagacggcagccgcagccgcagccacaacaattgcagcagcagaagccctcaaaggctgagataaagcacgagaaatctgctatgcctgctgctgttacaccacctatgcctatacctgttggaggctggcttgggaatttcccaccgtttggttatctcagtccagtcccaggcctatcagcagctggtcttcatcatcccatggacgtgaaaccagggtcatctagtggattacatcattctgcattgcttccaccgccaacacgctcaaagagatgtgctacacattgctacattgcacaatttatccagcaccagcagcgagttgcaaagatgaactctttctggccgccaactgctgctgctgcagccgccgccgccgccaatagaccaccggggccattctttggtgcaaggccattcagcatgggtgttgtgccacccacggatgccgcctctatgcttgtgaacccaatgcagggaagctaccctgttagggcgcacactccgatgcaagaagcaaaggctcctatggctacatcaccattccaggggagtctctcgaaggacaaaacactaggcaatgctgctggtgctgaatcaagccagaggaaacaaccaccttctcatgaaacactgcagtccactcccttgccaaacatgctgcaagccccggcattcatctttccattcaatcagcagcatgctatggtggcagctgcaaatgctgccaaccgagcaggggatgcaaaatcatctggtgccggcaatacattgccgccatctgccagtgctcacactttggcaacaaactctggtgccgcggccatgaacttgagctttgccaacatgcaaccggctgatgcccagtttttggcaatcttacagaatggatacccgttccaggttgctgcccatcctggagggcctccatatcgaggcatggcatcgccaggcccagctgttccattcttcaatggtcatgtgtattcctcccccatgctgcacccatcacagcagcaaggtgcgcagtcacaaagtcatcagaagacccaaatgccaaacttgcccagttcatcacagaagcatcagccacaacagtcccaaggcctgttgggatacgcaccaaatactaatgcagcagcagctgctagtaattcacagaattattcaagtggcaatcagcgccctgtcctgctacctggccttgtgcaccgacaggagagtgacaaaactggacaagattgtccatctagtgatgacaagccatctcactcccagaagagtgggtatgaacacaattttgccgttccagtccatctaccgaattttgcaatgatgccagccgctcaacctgctgtcagtcagagtgagaagaagttaagtgaccaccagcaccaccagcaacagcagcagccacaagtcagccgaggccagggtgtgaggattgatcttgcctcttctcagccttttgtgatgccctttggctccattggtcctcctggatctaccccaagtggtcttgacttttcggcattggcgcagaaccatgcagttttccagagccatcaagatgcagcaaggcatggttatccccagcttaattttgctgcagctcaacctgtgcaatccacgcagcagaagccccagcaccaaatgactggagaaacaaaaactgttgcgggggattcatcctcgactcccattgctggagacagtgagagaaagaaatcaacttctcacaagtattctagtgattcacaacagcattcgctgtccttcaccaggacggaaagcaagaattatgtgcctcctttccttactggcaacacaaatgaaacttcgtcccgcaccctgagccttatcggaacagaatcttcaaatgcattcatgggaagcaaacccacaaattccaacacccctgcctctaccgccgctgcagcttcggccagcatttctcagcagcagcagcagcaccttcagatgcaagcgcaacaaaagcaccagcagcatcagcagctaattcagcatcaccatctgaatcggcccagatctgctgcaccaagtacacagaacagtgcaggtgggtaccaagaccgtataaacatggctaattttcagaatatgatgtacccatcaagtgctgcccaagggagagttcaatccccccagttgaaggcatcctcagggagagggacaccttcatctactgctacgactacccctgccgccacaccccctaatttgattatgatgaagaacagtagcctccaccagcaacaagcaaaagtccctatgcaggctctctacactcctggtcaccaatcacagacttccttaagttcatcaaaggtaggaccttctctaacaaacctttctaccggaggaggggatctatctcgatcttcaaacgcccctgttgcttctggttcaccatccaattcggtgtccaaaagtaccggtggcagcccacccgccacaggaaatgcaaagggtgttcagcagcctgtccaactgccatcaccacagcagcagtcagccaagaactccgcgtcgacgtctggctccaggactactcccacgaatcatttcagtatggccatgccatccatccttggccagcagcctaatgcatcgcctggttccaatcctgggagcaagcagcactcacatacgcagccagcatcgatgaaacagcagccattcccgcaaggccatttcttcatatccaacacctacgctcctccggctccgggagccggaggtgctgctgccctaggcctctaccagaagcgaccaggcgacaagacgcagcagcagcagcagcagcaggcatcgcaccagcagagcgccatgtcagctgccggcggcaataacgtgaaagcactccatccttcatccggcgggtttatgcatctcgcagcccagtctgcaggtggcatggcgcacacccacgtgtcggcggggcaactgactttcggaacaatgccgacgcctttaaaaccgtcaagcgaccagaagcctgctgccggaaaataaacagtccagacgaccatgcatcggagtggtaaacctgaactggtttttgcctgttcagcggaagcccaaatggcagaatcgcaacaacagtagcagcggcagctcaaaagaacccgcatggaagctcaaatggcccgcttggttgctggtgatgaggaaggaaggaggggtgccgtgcaccagttcgttccgagcaagaagcagatgtctcgttaacttaaaacagagtattcagattccggaatggttgatgggggagtggtacttcttttgtgtagttggggctggttatcctcccatggtgtaaaggccgcggaggaggaggtgcatagaatttgtctcttagcccgttttttattttatgcatggatggatggcccaaaagctggtttctccccctctctctttcttgtagctttgctgtttccgttttcccccctttctttcttttgggtggttctaagctttaactaactggaggaagaaagattcagttagaacgcagatcaggtgacttcgttatgctgtctgttgatacacactctgcttggattgttttggcagctagatctaggaggagcaaaatatctatcccaagtagaataggtaggatcttccggccatgattggtgggtgacatgcttctgggtttgttgttgtaagtagctttgggaggggggtgggggaaaggaaatgaatgaatgaattgaaagtgactgattatggatggatggtgtacc

SEQ ID NO: 12052 - DNA, 79 bp, Zea Mays
agctttggaaactctggtggaggctcgaagcgatactgacgtgcaaatcgttcgtctgacttgggtataggggcgaaag

SEQ ID NO: 12053 - DNA, 73 bp, Zea Mays
agacgagcaagtgaccgagaacccagatgttcagcaggtggagactgctgagcaggagctcgttgaaggcaag

SEQ ID NO: 12054 - DNA, 797 bp, Zea Mays
ctggtggttcggtcacggatttggttaagggcgctcaaagaagagaaaattgctgctcgcagtgctatactgccgatgctccaagcagaagaggatgaaagatttgtcaaagagtggaagaagtgtcttgaggaggaggcgaggatcatgaaagacgttccagggtggaaggtcggcgagagcgtgtacaactctgggaaatggatgcccccggctactggtgagctccgccctgaggtttggtaagggcctgttgcaggcactgaatgccatcatgtcacgggggcacggataaagcttcatttttcattaaggatcagctgtttaaagacctgtatttgttgtacttgaaatctggctggttaataattggacatgtaaagccgacgtttacattgatgtaacgtgttcttgtctgctattgcttcccagcctctggtgtttcttcctgtaagtcattccgaacatgaatccttgttattgaagaaagtatgaaatataagcagcgcgtagcgtggtggcggcgcctcctgtcgcgtgtggattttcccgtgttgatggaacctgatgttgcaccggggattttccccggagggagccgagcggtcagtatagtttccagagcggagtttgtgtgggtagtgtttaatatgtggtcagtataggtgcccagagctgtgagtagtgtgtgcgtgttctcgggtagtttcgagtatgcgatcagtatgtgtctctatgagttacttgatacgccactgctcatatatgagtgttactctgtatgttaagaaaaaaaa

SEQ ID NO: 12055 - DNA, 1374 bp, Zea Mays
gcagcttcctctgcgggtggtatgagaaatatcatggatactatggagggaaggaggaagcaaggaagtccaactatactgatatggttaataaatactatgatcttgccactagcttctatgagtatggttggggtgaatccttccactttgctcacagatggaatggagaatccttacgtgaaagcatcaagcgacatgagcattttcttgccctgcaacttggtttgaaaccaggaatgaaggttttagatgtgggctgtggaataggtggaccactgagagaaattgcaagatttagctcaacttcagttaccggattgaataacaacgaataccagataaccaggggaaaggagctcaaccgtttagcaggaattagtggaacatgtgattttgtcaaggcggacttcatgaagatgccgttcgatgacaacacttttgatgctgtttacgccattgaggcaacatgtcatgcacctgatccagttggttgctacaaggagatatatcgtgtgttgaagcctggccagtgctttgccgtgtacgagtggtgcattacggatcactatgatcctaacaatgcaacccacaaaaggatcaaggatgaaattgagcttggcaatggcctgccagatatcagaagcactcggcaatgtctccaggcagtaaaagacgccgggtttgaggttgtttgggataaggatcttgctgaagattctcccttgccttggtacttgcccttggatccaagccgattctccctgagtagcttccgtttgacctctgtgggacgcatgattacccgcacaatggtcaaggccctggagtacgttggtcttgctccgcagggcagtgagagggtctctaatttcctggagaaggctgcagaagggctggtagagggcggaaagaaggagatcttcacgccaatgtacttctttcttgttcggaagcctcttctggaatgagctcttggatcaccttttcaggtcagcaagagagagaaggcaagtggtcatttcgaagaagccgaggagagggaacctggaatcaagaaaaccttcagctctcctgtgtaggaggaaagttaacgaacagtgtagtaactgttcagctttgtgtttattcagttgttttgctgcttgaggttattcgtttctaggtgggggttggaatccttttcgccataaacctctcagtggcataaataagatggtttgcataagagtacttcatggataccgtaagggctactactgaaagagaaatgtttaagcagcatggtatgtgagcaactagtgataattattccatccttttttttaatataaagcaggagttttgtcatgcgtcatgtctagggccggaaaa

SEQ ID NO: 12056 - DNA, 629 bp, Zea Mays
gttatgacttgtgagcactgtttcctgtaggagggcaatgatgttggaacacagtataggtcagggatatactactataacccagagcaggagaaggcggcaagagagtccctggagaagcagcagaagcttctgaaccggaagatcgtcaccgagatcgttccagcgaagaggttctatagagcagaagagtaccatcagcagtacctggagaagggcggccgcttcggcttcgggcaatctgcagccaagggctgcaatgaccccatccgatgctacggatgagccaaatggacctctacgtgcatggtgtgaatcgtaactgaataagggatgcatcaaagccagattttatactgctttcctaggtttgttttgccactattgaacggctgtaagagtttagctatatactaccatggtactccaatcatcgtgtacaaaaccatattgtattacatgcaagtgcgagtgagatttaagcgtaaacagattgttgtagaattcgtacgaattttacagagcagaaacaatgggatgcagggattgccagtgatgatggtggcatattttttttaaaatagtatattctacaaacccttttttttacagaggaagggaaattctcc

SEQ ID NO: 12057 - DNA, 1033 bp, Zea Mays
gtggaaaccctttttttctgggaaaacaatgaaccatataccaccaacggaacacgggaacggcggaagcaaacaactagaaattccccagcccggttccttttcgtgcggtttgatctcgtcggaggcccggccgcagttccgccatcagccatcgaattcgatggcggccaacttcgggaacaagatccgcaacgccaagctggttcttcttggagatgtaggcgctggcaaatctagcttggttcttcggtttgtcaagggacagtttgttgaattccaggaatcaacaatcggagcagctttcttttcccagaccttagcggtaaatgatgagactgttaagtttgaaatctgggatactgctgggcaggagaggtatcatagcttggcccccatgtattataggggtgcagccgccgccattgttgtctatgacatcacaaatccggcctccttcacccgtgccaagaaatgggttcaagaacttcaagctcaaggaaatccgaatacaatagtggctcttgctggtaacaaggttgatatgctagatgcgaggcacgtggcagtagaggaagcaaagacgtatgcccaggagaacggtctcttcttcatggagacatctgctaaaactgcaatcaatgtgaatgacatattttatgagattgcaaagagattgcttcaagggcaagaggctccaagtccacaggctggaattgttctgaatcagagaccagatgagaggatggtcagcacttcctcgtgctgctcatgaagctgtgtttcaacctcatacatagttccgttatgaaatgtatcagaggagattaagcaaaatatcccatgtggtgtcggtgtcgtccaggctgatgttgtccccttctcctgctgctcgtttcttttcacatgtttgtgatgtaaatgcccatactagaatgtcaccaaagtgttgattatgctcttatcatttgattacgcccctctcaaatttgcgtaaatacaaggtgtaattttttaaatctaaaatgagtgg

SEQ ID NO: 12058 - DNA, 733 bp, Zea Mays
ctgttcctattgtttttagaggaccaaatggagctgctgctggagttggtgctcaacactcacagtgttatgcagtttggtttgcacatgttccaggacttaaggttctcacaccatactcttcagaagatgcccgaggcttgcttaaagctgctattagggatcctgatcctgttattttcttggaaaatgaattgctttatggagaatctttcccagtttctgctgaagtgcttgattctagtttttgcctaccgattggcaaagctaagatagaacgtgggggtaaagatgttaccattactgcgttctccaagatggttggctatgctctccaggctgcagagatactgtccaaggaaggaatcagtgctgaggtgatcaaccttcgatcgatcagaccacttgatagagctgctattaatgcatctgttaggaaaaccaaccgattggtgactgttgaagaagggttccctcaacatgggattggtgccgagatatgcatgtctgttgtagaagaaagctttgagtaccttgatgccccagttgagaggatcgctggagctgatgtacctatgccctatgctgccaaccttgagagaatggctgttccacaggtcgatgacattgtgcgggcagcaaagcgggcctgctacagggcagtaccaatggccgcagctgcctgattggttattccgaggatggagcgaggaagcatatatttgtggcgaca

SEQ ID NO: 12059 - DNA, 3734 bp, Zea Mays
ccaccgcggcggcagcggggcgaggggcttcgaagacccgcacgagccaaggacgaaacgaaaccccatctccgcaaagggcagcaagcaacccctaccgggagctctcgctcgccctgcgcagcgccgcgccttcccaccacgcgtctcccaaaatccgcggccgtgtatataagacccgccaccaccacttttgccatcccccctctcccgtcgtccccacctcctccctttttggctcagtggccatgcctcccctcacaagctccctcctctcccgctccaccaccggcggctcctctacccgcgccgcggcagcggtcgcagcgatctccaggcccgccgcaccttcctcctcgtccccgcccgcccgctcgaccccgaggccgcgctccagcccggcgtcgcccttcgcatccggcctcgcgagccgcctctttcggcggccaccgcgccgtcgcccgctccgcgtcgtctgcagccgccgtcttcgagcgccggtttgcctcagcggcgaccaggaactcgtacgatgaaatcctgacgggcctcgctaagccaggaggcggagaggagttcggcaagtactacagcctgcctgcgctctccgatccgcggattgatcggctcccatattctataaggattcttctcgaatcggcaatcaggaactgcgatgacttccaggtcaccggaaaggatgttgagaagatcctggattgggagaaaagtgcaccgaagcaagttgaaatcccgttcaagcccgctcgtgtcctcctccaggattttactggtgtcccagctgttgttgatcttgcttgcatgagggatgctatgagtaaacttggcagtgacccgaacaaaattaatcctctggtacctgtagaccttgttattgatcattcagtacaagttgatgtggcaagatcagcaaatgctgctcaggcaaatatggagcttgagttccatcgtaacaaggaaaggtttgggttcttgaaatgggggtcctctgcattccgtaacatgcttgttgtccctcctggatctggcattgtccaccaggtgaatcttgaatatctggccagggttgtgtttaacaatggtgggatcctttaccctgacagcgttgtaggcaccgactctcacacaactatggtagatggtcttggagttgctgggtggggagttggtggtatagaggcggaagctgcaatgcttggccagccaatgagcatggtcttaccaggtgttgttggctttaagttatcaggcaagctgaggaacggagttacagccacagacttggttctaacagtaactcaaatgcttcggaaacatggtgttgttgggaaatttgttgagttttatgggcaaggcatgagtgagttgtcacttgctgatcgggcgaccatcgcaaatatgtctccggaatatggtgcaactatgggattcttcccagttgatggaaagacgctggactatttgaagcttactggccgaagtgatgatacagtggccatggttgagtcctacctgcgtgcgaataagatgttcgttgatcacagccaggttgacgctgaaagggtatactcttcctatctagaacttaacttggaagaggtagaaccatgtctatcaggaccaaaacggcctcatgatcgagtgacattgaagaatatgaagtctgattggctttcttgcttggacagcgatgtaggattcaagggttttgctgtccccaaagaatcacagggcaaagttgcagaattttcgttccatgggactcctgcaaagataaagcatggtgatgttgtaattgcagcaattaccagttgcacaaacacatcaaatcctaatgtaatgctgggagctgctttggttgccaagaaggcttgtgagttgggcctggaggtaaagccatggattaagacgagccttgcacctggttccggtgttgtgaagaagtacttggataagagtggtttgcagaaatatctcgaccagcttggctttcatattgttggctatggttgcacaacctgcattggaaattctggagagcttgatgaatctgtgtctgctgcaattactgagaatgatattgttgctgctgctgtgttgtctggaaacagaaattttgaaggacgtgtgcatcctttaaccagagcaaattaccttgcttcccctcctttagttgtggcttatgcattggctggcacagttaatattgattttgagaaagaacctattggcatctcgaaagatggaaaagaggtttacttccgggatgtttggccatccacagaagagatagccgaggttgtcaagtcaagtgtgctccctgacatgttcaagagcacatatgagtcaatcaccaaaggaaatcctatgtggaatgagctgccagtctcaacaagcactctctacccctgggatccatcatctacatacatccatgagccaccttacttcaaggatatgaaaatgagtcctcctggcccgcggcctgtgaaggatgcatattgccttttgaattttggtgacagcatcacaaccgatcacatctcacctgccggaaacattcacccagacagcccagctgcaaaatatctgaaggagcgtggcgttgaaaggaaggacttcaactcatatggtagccgaagaggaaatgatgagatcatggctaggggaacctttgccaacattcgtcttgtgaataagttcttgaagggtgaggttggacccaagacaatccatgttccatctggggagaagcttgcagtttttgatgctgctatgaaatacaagaatgaagggcatgacactattatcctggctggtgccgagtacgggagtggaagctctcgggattgggctgcaaagggcccaatgctgcagggagtgaaggctgtgatagcaaagagcttcgagaggattcaccgcagcaatcttgctggcatgggaatcatccctctatgctacaaagcaggggaggatgcagacaccctgggcctaaccggccatgagcgctacacggtccaccttccaaccaatgtgagtgagatcaagcctggccaagatgttaccgtgacaactgataatggaaagtcgttcacttgcacactcagattcgacactgaggtggagcttgcttactacgatcatggtggcattctaccatatgtcgctagaaagatagcggaacaatagattgtaccgtcgagatggttgcgatgcttgcggtgaatcgtaattggtgtaaacggtttgtttagtagtacaacccatttttgcggactacttataataacctctgagtatctcagagtgagctgtctgaaatttgatgaactgctacaattctggtgcgccatgaggatgggatccttttgccttctatgttaataatatgctaacttctgcaataccagatatacatttggcagaagattttgcacgctgtaaatgacactagtattaacactgatgcggttcaaagctgtccttgttttgttatctgccaacaattgatgagcagattttgtttcagatttgtattacgaaccttttaccacgttgccatgtgcgactggtaatgactctgaagcaaccgatgggtgtaaaactgtcatgtaagccagaatctgaagctgctctttgcaaaaaaaataataaaagggaaatactgggggcaataaagctcgtgctgaagctagagcaacttgaaagagaac

SEQ ID NO: 12060 - DNA, 561 bp, Zea Mays
gctcttctccatgactgccatcgacgtcgtcaaccctgtcgctttcacgcagtcaataaattgttgactgcataacgaaacacatcgtcgtcggatcggagatgatgagttccgtcgtcgtggatgctgctgctaccagcagcagcgagaagaagacgtcgtggccggaggtggtgggcatgtccatcaaggaggcgacggagactattctcaaggacatgcccaacgcgtacatccaggtgctgcctgttgggtcgcccgtgacgctggaccttcgccccgaccgcgtccgtatcttcgttgacaccgtcgccatgactccgacagttgggtgatacataccaaatgcaataaacaaaccctactttttattttatgtttccagttaataataaaccaggccttagcttcttggttgtccttccttggttggtgttagcttctaagctactagtacaccattaaaaaaaggaggacctcatgtatggctaccgtgaaaaatgtgatcttgatggaataatatatcataaataagcaattaatgatgatatgcaaccatct

SEQ ID NO: 12061 - DNA, 939 bp, Zea Mays
caggagagacgaacgaagaaaccagggagagggatcatgttccaggacatcacgacactgctgctcgaccccaaggcgttccgtgacaccatcgacctcttcgttgagcggtacaaggaccaagggatcaccgtagttgctggtgtggaagctagagggttcatttttggtcctcctatcgctctagccatcggtgctaaatttgtacctttgaggaagccgaagaagttgccaggcgaggtgatctccgaagaatattctctggaatacggaactgacaagatagagatgcatgttggagctgtacaggccaacgatcgggctcttgtagtcgatgatcttattgccaccggtggaacactctgtgcagctgtcaaacttattgaacgtgttggagcaaaggttgttgagtgtgcttgcgtcattgaattgccagaactgaagggccgagacaaacttggggacaggccagtttttgttcttgtggaagcagatgcttgagcggaacttgggacttctcttctcagagagttagagttggtgctgttgatgctacctctctgtcaacaacaaagtttcccatgttggctatattcttgctgacacgtaataaagtttcattccaaattgtgatcccctgaatgatttgtcaatgtagacatgattgctggtccttgtatactgtggcttattattcacatcaattaaggataatcctgattggagcttatcggtgcaactattggtgttatgtggggccaccactactagcgcagatcgtgcggccagaagcaacaaacgccggcagcaaaggcttaggcgctagcatgaagataagcatggctagaaagtaggagataagtattagagttgtttagataagatgataagtggcatgagtttgttagggaaccgggctatacaatgctggcaggcgat

SEQ ID NO: 12062 - DNA, 1284 bp, Zea Mays
tctctcctctctttccgcctccatccgaccacccccgcgagcttcgacagttcgacacacgcggccgccccttcccggctccagccacaccccccggaggcggcgatgcagatggcagcggcagttgcccccaccgacgccccggcctcggcgtctgcggcggcggcgccctcccgcccccacgcgcacgccgcggcagcggtggcggccgcgtcgcctcacccgcacgcactgcatccgcatcaccatatgccgcaaccgcggtgggtggtcatcccataccctcctccacaccatcccatggtggccgcgccgccgccaccttctctgcagtttgtgaagcattttacgccgccgtcctcggtaacaccgccgccgccgactggatccggcgggaacgggggcgaggataaccggaccatctgggtgggcgacctgcagtactggatggacgaaaactatcttcacagctgcttcggctctagcggcgaggtggtgaatattaaagtcattcgcaatagacactcgggagtttctgagggttatggttttatagagttttatactcacgtttcagcagagaaggcactgcagaatttttctggtcacgtaatgcctaatactgaccgggcttttaagttaaactgggcatcatatagtatgggagaaaaacgctcggaaatttcgtctgatcactcgatatttgttggcgatttggctgttgatgttactgatgcgatgttgctggaacttttttctaacaaataccgatcggtgaaaggagctaaagttattattgatgcaaacacaggccgttctagaggctacggctttgttaggtttggagatgataatgacaaaattcatgcaatgactgaaatgaatggtgtttactgttccacaagaccaattcgtgtaggaccagcgactcctagaagatctcaaggtgattctggcacttctccaccaaggcaatctcatgttgactctactaacaggacggtatatgttggtgggcttgaccccaatgttagcgaagatgaactgaggaaagcatttgcaaaatatggtgatcttgcctctgtcaaaattccttttgggaaacaatgtgggtttgttcaatttgtaaacagagttgatgctgaagaagcactgcatgggttgaatggatcaactattgggaagcaggcagttcgactttcctggggccgcagccctgcaagtaaacagagactgataacaccattatgttcaagaaagggaatgagaggaactcggatggag

SEQ ID NO: 12063 - DNA, 551 bp, Zea Mays
ccctgcacggcttgcggttggagctggcctcaaaccagccttaacctgacaggctgacagcgcagagcggaatggaggaaatgcccctacctgttcacagtgactggcctcccgactcgactctcctccccctatctctatctgcttcctgctgagctcaaaccccttccgcctccccatccaccattccatccgccgccgccgccgccgcctgtgcaagatgaatgtggagaagctcaagaagatggctggcgctgtacgcaccggagggaagggcagcatgcgcaggaagaagaaggcagttcacaagaccacgaccaccgatgacaagcggcttcagagcaccttgaaaaggatcggggggaacaccattcctggtatcgaggaggtcaacatcttcaaggacgatgttgttatccagtttcagaaccctaaagtgcaagcatccattcctgcaaatacatgggtggttagtggagtaccccagacaaaaagtctgcaagaccttctgccatcaattatcaaccaactggcttcctcctcctcttcag

SEQ ID NO: 12064 - DNA, 1154 bp, Zea Mays
cccaagtatatttcggtacatgttaagcggttcaagcagtgaaactacttgattggggagaggatgggcatagatcagaacaagacattgcagcactaagagcagctttttcacaagaggtctctgtttggcataagcttgaccatccaaatgtaaccaagtttattggagctataatgggtgcaagggatctgaatattcaaacggaaaacggccacattggcatgccaactaatatctgctgtgtcgttgtggagtaccttcctggtggtgcactaaaatcatttctgataaagaacaggagaaagaagctagcttttaaggtcgttgttcaaatcgctcttgaccttgccaggggattaagctatctccattccaagaagattgtgcaccgtgatgtgaagactgaaaatatgcttcttgacaaaacgagaaccgtgaagatcgctgattttggtgttgctcgccttgaagcttcaaatcccagtgacatgacgggcgaaactggaacgcttggttacatggcacctgaggttctcaatggaaatccctacaacaggaaatgcgatgtttacagcttcgggatctgtttgtgggagatatactgctgtgatatgccatatcctgacttgagcttttctgaggtcacgtctgcggttgtccgtcagaacctgaggccggagataccacgctgctgcccgagctctctatcgaacgtgatgaagcgctgctgggacgccaaccccgacaagcgacctgagatggccgaggcggtgtccatgctggaggcgatcgacacgtcgaagggtggaggcatgatccctgtggaccagcggccaggatgccttgcgtgcttccggcagtacagaggtccatgacagataggtggaaacctgttggagctgcggcctctagatctcgtggatgccgatcgatcgcgtgttgttttctggggaagcaaactggttaatggagctagcccgccttaccggctcgtgtaaatcctctgtccatcaattctgtaactctgttttatcgattaatgaaaagaaccgggcttgctcgactgattcctggccgatgcaaatgttgttttttttggaagagaatcgaacttgaaatgaaaacgagatgggtgccgtaccatctggtgc

SEQ ID NO: 12065 - DNA, 2477 bp, Zea Mays
gtatagtgtaaaataatattttaggtgatacatgtaagcgctggtggacacgattcacggacgccacccggaccctattaaacccgcctctcagccgaccgtttcgagtccgtcgtcgtctagctcccatccgacctcctgcattccccactagtcccaactcccaaccaccgccagccgtccgctctccgcaagcgcgaccttccggccagatccgccccgttgcgccgacgagcggtccttctgcctagtttctccgcgcagcgagcggcgggttcctcggagattcccgctggccgcggggatccatttgtgactgctcgcgttgcgcgtggatctggtttgggacggaggagtgaaacgcgacggtgatcgtgcgaggtggggacgccatcagtgctctgtctggggttcggtctgttcttcgactgcagatctggaagggtttcgtgggatccgtcgctacgatctgtcccagtcagagcacctgcatcatctcgggtcgggccatggagactctgctcatctcggaggagcgcaaccaccagctccaccacttctcgggtcgccggaagaaggcgttagcagcgtcgcctcagtccacgcgcagctaccatgctggcaactgccgggcgttccactccggcatcaccgtcggcatcctgccatccccgcccgcgcagagggttgcactgacccgctcctctcctgagcccaagacaccgaaacatcagcttcaccatgggaaaaagcgcagccgagcaatctctataaacctttcgacgtcccctccctctcgccctgagctctgggctggcccggggttctgcaattcgccgcctcccagctccctcccgatccccaagttctcactccaccagaagcgcagtgtctcacttgaatttccacctgctgaccggtcagacgacgaagaggtgcccgtgcatgccaagtcggcaccttcatcgccgactgcaggctcaggtgttaccttcttcagtggtactgatgctaccattgccaccgagaatctgaggaggatccttaacctcaaaattgaggataactgaatggcggttgggtagttctgtgtacatagtttaactacaactgacctttgtagtatgtatagggtaaccggggataaccactgtgtacctggcggtggttccttctgcagcagtactgtaggcggttagcaagcacagcgaggagtttaggaagtttggaaatgcagtgagaaggatgttgtggtaatggagatttggtggatttgcatatcactgcagtttcagagtcacctttgttccttgtaccttgtagttgcctattagtagtccaatactccatttagatgttatagtatttgcatcttccctgcccatcattaaccagtagccacagccttcatatcataatccttgtcatgtagttcatctcaggcagggcattgtaggctagctagtactgttcaagttctgtcatatatgtagtcttctgtaggattgctgcatcccttgaaacttgcattctgtatcacattgcatcctgctgactcacctcccttcataacatctccctgtgttatgcaaagcgcacaaggatctcccctctggcacttctgttttttggaatgaagatgctcagaggagttgttatgaagtcccgatccaatgttctttgtcctccatgtctgtactgactttagctattcatctcctttgtcaccccagtcccattgcatgtgccatccaatccgtttcgaaccattcatctcaaaattgcatttagtggtggttttcccttcgtcttattatcttttgtgcctcatgatcctggagcatgcccaggattctagtctcctccatgtattctcataaaggacttcacgtatcagagatctgcgaatgctcaaccctgaatatggtttgcttgtccgatgccacttcgcctcatccatacctggagttcagaattggcgaagcacctatcacttagctatctgtttcatagtcagtattgtgtcagactgttgtttttgtgcaatatttgattggctactagtctgtttgtgttactgttcaagtttatggtagtgatcatatatggcggccggagtgttccacgccgatgctgtggcattctgttgctttcaagtaaaactagtcaatgttatgtaccttcatgttattttttggtcctgtttctgtgacatgtttgaagttccatgttatcgcactgtatttgctcccaagatcttttttgtttggtccgcttttctagtggtcctaatcatcgtgtgacaaatggttgttactatacttaagggtctcctttttaaggataaatatcaacgttgcgaattgcgatgcttggtgatggatgcatactttgtgcggggaagatggctatggttggtacttgttgagatgattgtggagcctgtttgagaacctgtagttgattagtgttgtgga

SEQ ID NO: 12066 - DNA, 1662 bp, Zea Mays
ccccgaggggcggcgccggccgcggcgtcggcgggaaccgggcctcgctctccccatctctccgatcacttctgtcctgtgaaaatggcggatgaactacgctcaacgtctgtgggtcagaagttccatgggcagtccgtgctgttgagcagaatctcttcctattccgccatgaacaaccctgtattcaacaatgcctattctgcttacaatgtgccccagaggtcatatcatgggatgaatgcaactgctggactctcatctgtcatggcaccatctcctgtctttgcttctgccccaaaagagaaaggcttttctggatttatgatcgactttatgatgggtggagtttctgctgctgtctccaagacagctgcagctccgattgagcgtgtcaagcttttgattcagaaccaggatgaaatgctcaagactggcaggctttctgaaccgtacaagggtattggggactgctttggccggacaatcagagatgagggttttgtctcactgtggagaggaaacacagctaatgtcatccgttacttccccacacaggcattgaactttgcgttcaaggatcacttcaagcgcatgttcaactttaagaaggacaaggatgggtactggaagtggtttgctggaaatctggcttctggtggagctgctggtgcttgctctctattctttgtctattctctggactacgcccgtacgcgtttggccaatgatgccaaggctgcaaagaagggtggtgagaggcagttcaatggactcgttgatgtttaccgcaagacccttgccagtgatggtattcgtggcctctaccgtggattcaatatctcttgtgtggggatcattgtgtaccgaggtctttactttggtatgtatgattccctgaagccagtgcttcttgttggtaccctgcaggataacttcttggccagcttcttgctcgggtggggtataaccattggtgctggccttgcctcctaccccattgacactgttcgccgtcgcatgatgatgacatctggtgaggccgtcaagtacaacagctccttggacgctttcaagcagattgtcgcaaaggagggtaccaagtccctcttcaagggtgctggcgcaaacatcctccgcgctgtagctggtgctggtgtccttgctgggtacgacaagctccaggtggttgtcttcggcaagaagtacgggtctggtggtggctaaggatgtataatgatgatgacgacgaacaacaaacatgatgttttaggtgcctcctttaagtaaacatacgtacggaccctcgacaccattttaagttcgctctcgcagaggctggtgagtttgtagcgtggctgtgaccgcacctctttttatgtcagagattggaaataagtgacgttagaaattgctgtcttgctgcatcagttttttatactccgttttttgttttgcgcgtgcaaagggttgctcgaatgtatctatgtaggtttcggaatcacagcttactatgtttgatgaaggtgtatgttctgtgacctttggcagcatcacttcatctgtctagcgctacatgattttaaggatcatctggtattattacggtaacactcgatgtttgatgggggtagtgaatgctcatatgagtgggttcgagag

SEQ ID NO: 12067 - DNA, 619 bp, Zea Mays
aaaacgaaacggctaagaaatccccaccttcacttcacccacaaactagccggacaagcgaacaaaaggtgtaagagcttacgaccgacgcggccaaatcgagataagagcaagatgacgtcgtcgacggcgttcagccaactgttcccttccgccgctgcggtatcccccgtccctcgctgcgtctccctgcagctcttctgcgccagcggtggagttgtccctggatggaggagaagatgccgccgcatggccatggtgcgcgcggccaccgtggatgctgcggcgcccgcctacacctccgattccctcatcctctacttcaaggcggagggcaccatggaggagagggccattcccaagatcacagaatctcttgagggtatggagggagtcaaggacctggaggtgctcattgaagaaggcatagggagcgttgtgttaacaaaggagacaactgtgcaagctactggagtagcctcgaacctggtggaagctatccagggagctgggttcaagctgcaaactctaagcttgagcttcgatgatttcgacgagccagcagcaggagcgggaggcactgtccaatccagcgagtgagctaatttgtggtgccaac

SEQ ID NO: 12068 - DNA, 558 bp, Zea Mays
cgtgaaccacagtcggttgtgcccgacgcggcgtctggcatggcgcccatggtggcagtggtcagcaggggcctggagcgagaggcgcggctgatgcggtaccgggagaagcgcaagagcaggcggttcgagaagacgatccggtacgcgtcccgcaaggcgtacgcggagacgcggccgcgcatcaagggccggttcgccaagcgcacgcccggggctggggaggacacgctggaggagcacgaggagatgtactcctccgccgctgccgccgtggctgcgctcatggcccccggcggagccgatgcggactacggcgtcgtgcccacatattgatctatgcaattgcaacgccgacatgtacactagttagcctcgtgctctggggctgtaatttttgctgcatgcattgcatgcaaagctcttattgattgcctgtatgattaacggaagccattacaagcaaggacttcctccctccttttcaattcctatgtatattactatcatcactacgagctgctaatctgcatctttttattcttagtaattacttaa

SEQ ID NO: 12069 - DNA, 1007 bp, Zea Mays
aatggggtgtggttaatggtacaaggttgagtctgagttcttgccactttacagcacctatggcattggtttgactacatggagtcctctggcttcaggagtactatctggaaaatatggcaaaggggacatacctgctgatagcaggtttgccctagacaattacaagaacctggcgaacaggtccctggttgacgacacgcttcgaaaagtgaatgggctaaaacctatcgccgctgaacttggcgtttcgttagctcagctctcgattgcttggtgcgcgtcgaaccccaatgtgtcgtctgtgatcactggagccaccaaagaaagccagattgtggagaacatgaaggccctagatgtcatcccactgctgacgccggaggtcgtcgacaggatcgaggcggtggtccaaagcaagcccaaacgcaacgtcgagtcatacaggtgaaaattcggtgttcatccgacggagttcaggcctcctccacgaaacttcatccatgatccgtgtgtattctgggcgtggtgctgtgttcacaaacacaagtctgtcagtcctgtgttgtgtattctgctttccgatacagattttggaccaattcaatcctgcattgtgttgcttgcgagcagaaagatttgttggatgaccatgatcctttctggtcgtgctgcaagatttctggagcgtgagatcctctgctgtatcactgtatcagcagctcatgctgttggctgttgcttgcagaaatattcgagtccgttttagcagaatcctgccccatgattctctagcttggagacccgagttatcatcggtagagtgatttcgagtgtttctctagcagaagtcaatttatctgataaaaaccatttgacaagccgtatgtaaagtggtaaagtgagataggttaaagagtaggttgagagtgaccgaaaacagaattttttggctcaaaatctctactacaaagcaccatggatcagtttagttttttattgtttgg

SEQ ID NO: 12070 - DNA, 842 bp, Zea Mays
gaataatgcaaatcagtgaagagtggaagtttgcatacatttcacttggtcgtccagactattttgaagattcagatactgtagctttaaaatttcagagaaacatgtatggagcttgggagcagtatcttggactggaacatccagacacagctcctaggaaggcacacacaattaatcagaaccggcattcatttgagagacctgtaaaaatttataactaggcatgatagaaatttgagcaatgagctgccaagcaagggctaaaattgctgtcctgaaataaagcgtgccggggcatgttgctcaggtttttcgtggagctggtgagctagttcatgagactccaagtatgatcggggcggcttctcatctttccctgcttttccccggatacatataaagttgtgcagagatgaccccaccgaacaattgtctttagtagataagccagtacttcccgttagatgactttatacagtcgaatagccggcattttagtcgatctttccgttctccagttgctgttggtgctaggaggccttgagctgttgagggtacttgccctgctgtatattatgacgtagagtgtacaagtctttgttgttgacaattacacggtgttttgtaatttcagtgatacacttccaggtccttcagtacgtacttgcctggatggtgtcaatttggcattctatgttagatattgatccatctgttctaaattaaaattataaggcagtttgacttttttaagatatactgcctccgattttctattagttgtcgtttagaatagtgacacggtctccatattataacgtgtctccatattataactt

SEQ ID NO: 12071 - DNA, 154 bp, Zea Mays
aggacttcgacgagttcgaggattaggctagcgatcacccccaatcagctgcctgtgttgggtttatttacgttagctacgtttctattctgtgtactttgattcatattatgtaaatgactctagtatttaatatcattatttattctttatt

SEQ ID NO: 12072 - DNA, 604 bp, Zea Mays
gaagaaggacgtgctccttcgtattaccaggatgtctttcagccgcagattagcaggccgcctgcgctccttgcccctaagcctcgtttccggtgtacgactccaacgacgacgagatggcctccccgctccgtcggagcttcccctccctcggccgcgcgcttctcacgccggcgccggcgcggatgctctccgcggaggcctccgatgccctcgttgagatcaagcctggggagattgggatggtctccggcatccccgaggagcacctccgccgtaaggttgtaatttattcaccagctaggactgcatctcagcaaggttcaggcaaagttgggagatggaaaattaactttttgtcaacccaaaagtgggagaacccattgatgggatggacatctactggggatccatatgctaatgtcggtgaagcaggacttacattcaacagtgcggagtcagcaaaagcatttgctgaaaaacatggatggaattatgtggtacggaaacggcatacacctcttttgaagtacaaaccctcactactacatattctgaattacaaatgccattgtggtggtagaatatactattttcagtatat

SEQ ID NO: 12073 - DNA, 1774 bp, Zea Mays
tatttttccaaactgttgaatggagttcatgtatttattaaatacagtacaaagaaacttaacataggcacgcggattaagacccgcaagcggaatattgcagctcctttggaccctgcatcattctctgatgcaattgttcagatctatttggataatggtggagacctggaacttgtcgccaaaagtatcgagtcttcagacctcaacttctcacgttacggtgacaccttttttgaggtggtttttgttggagggcgcactcagccaggcactgtaaaacctgaagaaggagaccgccacccttattcggtgttagattgtgcgtcacagcgtgaagcaattttgcctttcgtactctatatccagaaaacattgcgcaggaggccttttttaataaagaatcttgaaaatgttatgcgtaaattcctgcaatccttggagttctttgaggaaaatgagaggaagaaactcgccatattcacagcccttgcattttctcagaagctatcagggcttcctcctgagactgtgttccagccattgctcaaggataatcttgttgccaaagggatagtactttcattcattactgagtttttcaaggagtaccttgaggaaaacagcttggatgatttgattgcacttttgaagaaaggcaaaatggaggacaatctgttggacttcttcccatcagctaagagatcttctgaggctttatctgagcatttcaccaaagaaggtctgactagccttgttgagtacaacgaaaagaagatgtttgaggttaaacttaaggagataaagtcaacactgactgctatgataaatgatgaggctgcaatatctgaagtgattgagactgtcaagcagcaagttaaggatgctaaatttcctgatttagaggttattcgcatgttgtgggatgtgctcatggaggctgttcagtggtctgggaagaaccagcagcaaaattccaatgcagcacttaggcaggtgaaagcttggactgagcttttgaatgctttttgcacgagtggcagactcgaactggaacttatacacaaagttcagacacagtgctatgaggatgctaagctgatgaagctgtttccggaaatcataagaacactgtatgaccaagatgtcctagctgaagatactatagtcctttggttccgtaaaggttcaaacccgaagggcaggcaatcttttgtgaaagctctggagccgtttgtcaaatggctcgaggaggctgaggaggaagaataagctcttgatttggagattggccgaatgtgacgaattatggttctcgaaaatattacctttttttttatttcgaaagctatgaaaggttgaggagttatggttgctgctagttattgccgagtttgttactggcgatagatttatgttatgctgtttaggcacttggctctcggctgcagtatgttgctgttaaggtgttgaaacttctgttatcattactgaactggtttataatgtgacgtcaatttactatgggtattgtacatcactactgggtggcgcaaagcactcgggaaagcttgcaaacctaatgtaacactcggcaaagaagaatcaatgaactgtacaacgatctctttctcgagagcattatgtcgggcactcacgaagtttttgttgagtgtcacttagtgcttagtaaaaaaaagtctcgataacaatgataggtgattgagactgtaccgagtgttttcaatagcactcaataaataaagatagcctt

SEQ ID NO: 12074 - DNA, 522 bp, Zea Mays
gtggacgactgctctgccgcgtctaaccacaaactccaccctgctcttcactggctcctagcttcacgctaccttcccaccaggctcagattgaaccatgtttggagtttcagcaacataaagttaatcacatctcatttggtcggaaagcgtctgttaaagcaacattgaaaactgtgagatgcaatgccactcaaacacaaagcgtccaaaagaaatcttcaagtgcaactattcagcgtgataagaaaggaaatgtacaagggccaaaactggatgacggaagcggtgggttccctccattccgctttggcaaaggtgggggtggtggtggaggcgggggaggtggcagcaactactttggcggattccttctcttctcatgtgtgttgctcttggactacctgaaggaattcgagaagtacctgcttgctcagaggcaccgagctggagatgatggcggcaacgggctgttgcaggatggtggtgccgaagattgataatctgaagcatgttccgaag

SEQ ID NO: 12075 - DNA, 718 bp, Zea Mays
gtgatattttctctagatcgctggaggcattggagaatcggggctaccgctgtcctttaacaaaggaggaagctgacttgtatgaaagattggttgctatattaaagcggctaaaaggacataacgctgatcttgctaagagggtcaatacacttgtttcgacgtcgcgtcttctggctagcagtggtggtgctggtggttccgtttatattcccagttctgcaaaagttgatgagcggagtgttacagagcttcttgaggccttacaacaacaaacagaggcagttgccaagctaggtaatgtgttgaagagggatatcagggacatggagatcatccagtcagaaggtacggatatggctgaagacaatgtggggagaagggcacagaaaatataagattgaagcatggtctttgtcgtagctaagtaataagcgggtgatggaagggatccatcgtcgctagaaggatctgagcctccaacttatttggagtaatgggccagggaaatgatatccctgtgtaactgctgcaggcaagcttgattctgcattctttgggaagctaaccatggtcaatcagtagtggtatgtgtagattgtatgtggaactgaggcagtattcttagaactcagctttctcctcgtgccaactacattttcagtgctgttttgttgctcaccgtgattcgttgagctgttgtaactatagatggcca

SEQ ID NO: 12076 - DNA, 3687 bp, Zea Mays
aggatacctagcagacgcattgatcgtgtaaatgaatcagaaattacaactaagacgtatgcctcaatattttccccattttggaatgaaattatcaagagcttgcgtgaagaggactatatcagcaacagggaaatggatctgcttatgatgccaagtaactgtggaaatttaatgcttgtacagtggccactgtttctattgactagcaagatcatgttggcaaatgactatgcttctgactgtaaagactcgcagtatgagctatgggatagaatatcaaaagatgaatacatggcttatgccgtcaaagaatgttactacagcactgaaaaaattcttcactctttagttgatgctgaagggcagcactgggttgtaaggcttttccgagatcttaatgacagtatagcacagggttcacttttagtgactataaatctgaagaagttgcagttagtccagtctagattgacgggcttgaccggtcttctgatacgcgatgagactgctggccgtgcagctggtgttactaaagctcttcttgagctttatgaggttgttacccatgaatttctttcacagaatctgagggaacagtttgacacgtggcaactgttgttaagagccagaaatgatggacgcctattctctaagattttgtggccaaaggatccagaaatgaaagagcaacttaagcgattacacttacttcttactgtcaaggacagtgccaccaacataccaaaaaatcttgaagctcggagaagattacaatttttcactaattctctattcatggacattccacaagcaaagcctgtatctgagatgatcccttttagtgtctttaccccatactacagtgaaacagttctttatagcatgtctgagctttgtgttgagaatgaagatggcatttctatacttttctaccttcagaaaatataccctgatgagtgggctaacttcttagaacgaattggctgtggtgaatcatcagaagatgattttaaagaaagtccaagtgacaccatggaactccggttttgggtatcttatcgtggccaaactttggccaggacagtgcgtggaatgatgtactatagaagagctttgatgttacaaagttacctggagaggagatgccttgggggtattgaagatggaaattctgcagcagaatatattgacactcaaggctatgagttatctcctgatgcacgggcccaagcagatataaaatttacttatgttgtttcttgccaaatatatggactacagaagcaaacaaaaaaacaagaggctgcagatattgctctcctactgcaaagaaatgaggctcttcgggttgctttcatacacgaagaggaaatcatatcaagggatggtaaggctacaacaagagagtattattccaagcttgtgaaggctgatgttcatggcaaagaccaagaaatatactgcattaaattgcctgggaaccccaagcttggtgaaggcaaacctgagaaccaaaaccatgccataatcttcactcgaggagatgcagttcagacgatcgatatgaatcaggataactacttggaggaagcaatgaaaatgagaaatttacttgaagaatttcataatgctcatggaaaacatggcatacggaagcccacaatcctaggtgtgagggagcatgtattcacggggagtgtctcttcgctggcgtcatttatgtcgaaacaggagactagttttgttactttggggcaacgtgttcttgcttacctcaaagttcgaatgcactatggacatcctgatgtttttgatcggatatttcacataacccgaggtggcattagcaaggcgtctcgagtgattaatataagcgaagatatatatgccgggttcaattcgactttgcgccaagggaacatcacacaccatgaatatatccaggtggggaaagggcgtgatgttggcttgaaccaaattgcactatttgaggggaaagttgctggaggcaatggtgagcaagttctcagccgagatgtgtaccgtctgggccagttatttgatttcttcaggatgctaaccttctttttcaccactgttggttattatgtctgcacgatgatgactgttctaactgtgtatatcttcttgtatggaagggtttatctggcactctctggccttgactactcaatatctcgccaagctaggtttttggggaacactgcactagatgcagctttgaatgctcaatttttggtccagattggtatttttacagcagtgccgatgataatgggtttcattctggagctggggctgatgaaggctgtttttagttttattacaatgcagctccagttctgttcggtgtttttcaccttttcgcttggaacaaggacacattactttggtagaacaatccttcatggcggtgcaaagtatcgtgctactggaagaggttttgttgttcggcacataaagtttgctgaaaattataggctctattctcgaagtcactttgtcaaagcgcttgaggttgctctcctcctgatcgtttacattgcatatggatacacaaaaggcggttcatcttcatttattctgattactatcagtagttggttcctcgttatgtcctggcttttcgcgccttacattttcaacccttctggtttcgagtggcaaaagactgttgaggactttgatgactggacaaactggttactttataaaggtggagttggtgtaaagggcgacaacagttgggaatcttggtgggatgaggagcaggcgcatatccagacattcagaggacgtattcttgagacaatcctcagccttagatttctcatgtttcagtatggcattgtgtacaagcttaaaattacagatcataatacttctcttgcagtttacggcttctcatggattgtactctttgttatggttcttcttttcaagctttttactgcaactcctaggaagtcgacagccttgccgacttttgttaggtttctgcagggcgtccttgctattgggataattgcaggaattgcccttcttatcgtgctcacatcattcactgttgctgatttatttgcaagtgcacttgcttttatagcaaccggctggtgtgtcttgtgtctggccgtaacatggaagagggtagtgaaagtccttgggctatgggattcagtccgtgagattgcaaggatgtacgatgcaggaatgggagccatcatctttgtgcccatcgtcgtcttctcatggttccccttcgtgtcaacattccagtcacgtttcctcttcaatcaagcgtttagtcgaggtctggagatctccctcatccttgcagggaacaaggcgaatcagcagatttgaaaggccctgccgcatccatcgtatttttctgttgtatattctgggaattactgagagctgcttagttagtttgaacaatttaatgagctcgatttgaatgacaaccttctacataattgcccctgtaatttgtacactaattatgcggagaggcagctacggcagtagagatgagctgatgtatgtcgatttgatcttaaccaaacctctctttaaggctacgacggttcagtaggcctgcactagtatgttgcacccatccacagatataaaaagaaaaatattcttaatataaaataa

SEQ ID NO: 12077 - DNA, 2438 bp, Zea Mays
ctccctttctgctgcccagccgccgtccgtccgcgcttcactatccttcattccctcccctgtcagcgacgactgggtaggctaccgccgccgccctacgctaggtgcccatctcttcgccggcgaagagcgcccaccaagctccggccaagggcgtgatggcggctgtaggcagcttgaagccggggatggagactcttcatgtgcaggactacaaggacgcgcctccggccaagggcgtggccgccgccgccgtagggagcttgcagccgggggcggagaacctgcaggtgcaggactacaaggacggtaacatgtattatggtgcttacccggcttatgcctatggagcctatggtggctggggggagtacccatacctgagccatgatggagcacagacaccaactgctggtacctatgctgacatgtactatggctatgctccatatggtgttgcaaccatggggcatgatggtcagatttatgggtctcagaattaccagtacccgtcgacatacaccaagcaacagaactctactgccaagctgtcatccaatggtataagtgagaaattgactccagcgccgcaaacggatgtatctactattggtgtggatgaggtgaaaggtttgaaaaattcaaattcggtgctgaagacagaccggaacatgccaggttccaatggttcatatggccggtctagtgtgcgttctggcagctatcagaaccagactagttggtcacactatccatattatagtagtgagatgttctctgacaagcagcaaaagttcaccggcaaccacaattcgacttccaaccctaaaaccaaggggcagtcgaggaatcaaaacacgaggcagtatcctcatctcatgggtttgcaaacaccaacttcatcagtgtactcagctaatggaatttatgggtatgatgggagctatggacccggcctttggtatggatcgcacatgtataattctggattatatggtggatggaattcactgtatgatggaaagtacagaaccagaggaagaggtaacaatgggtattatgtttatggtaatggaagcatagatggctttaatgagctgaaaagagggccaagaagtggtatgtacaaaaaccagctggggcttgaagctactacccaagcaccagcaaaagagcaggatcttttgtttgctaatggttcacatcctgccatgaaggatcagtataatcaggctgactttgcggaaacatactcagacgctaaattcttcattattaaatcttacagtgaagatgatgttcacaagagcgttaagtacaatgtgtgggctagcactcccaatggtaataagaaacttgatgctgcctatcaagaggctaaagaaaaatcaagcgaaactcctgtttttcttcttttctctgtgaatgcaagtggccagtttgtcggccttgctgaaatggtgggtcgtgttgattttgaaaaaacagtagagcattggcaacaggacaaatggactggttgtttccctgtcaagtggcacattgtgaaggatgttccaaacagcttgctgaagcacatcattcttgagaacaatgaaaacaagccagtgacgaacagcagagatacacatgaggtgaagcttgagcaaggccttcaagtgcttaagattttcaaggatcatgtctgcaagacatccatactggatgacttcggcttttatgataatcgtgagaagatgatgcaagagaggaaagccaaacagcagcagtcgctgaaaaaggtcattgatgtgaagctgcccagcgtcaccgacatggagagaagtcctaaaggggagactggatcaacagaactcactggggttgggactgacgtcttgaacaaagagcgtttattaggcaaagcaggagagaaaaatggcgagaaaggaaatgatgtcgccccacaggacctgaaaacacaaactgagaagttggcgggtctaaatggctgttaatatttttcgttagctcaagccgttgacagtggtgtcggggtggaacctaaggctgtggtgggttgtttgaggaaattctgatgtcccattgagcttgtttcctatagttcataggagctagaggcttagctagttgcttgtgtttggtggtagtcatggtctgtgttctggcgtgtcaggtattttaggaatagaaggatgattaactgggttttgcaatgatggatcatgggttttgaggctgtatttttcgtttatttgcctttcctctctggattctagttcctctctctctctctctctagattctggacaagtgtagtgcttattttaagttggttggtttaagaacctgaaatgaacatgggaattctatcaagcatttacaaacttactttcctctgtacaatatgtgaaaaccgtctacttccatactttctg

SEQ ID NO: 12078 - DNA, 82 bp, Zea Mays
ctcccttagggaaccaccgccgtgcgcgcatcggcagtgggggcatcgtccctcgtgcatcgtggtgggggcgtcaccgccg

SEQ ID NO: 12079 - DNA, 850 bp, Zea Mays
caatgagcggatagaagtcactcttttgagtactctatgcagttgaatgcttctcgcatcaaagttcttcaagctcaggatgatctagtaaacaaaatgaaagacgatgcgatgaaggaactcctccttgtcagccacaaccaccatgaatacaagaaccttttgaaagatctaattgttcagggcttgctccgtttgaaagagccagctgtattgctccgttgccgcaaggaagatcaccatcatgtggaatcagtactgcattcagcaaagcacgagtatgcatcaaaagcagatgtccatgaaccagagatatttgttgaccatgatgtgtacctaccacctgccccaagccatcatgatgctcacggccagttttgctctggaggtattgtcttggcttctcgagatggaaagattgtgtttgagagtacacttgacgccagactggaagttgttttccgcaagaaattgccagagatccggaagcttctttttggccagactgcagcttaattgactcaatccgcagatgatggtatggctcgcttctacctagtggtttttgccaaattgatcgtttacggtattcatccccaatgtacaaactaccttatttgttcattactgtcgccgagcaccgactgtttgtacttcgttcgctccgaggaataagaataaagcactgctagacttcccattgcgaagctgaataaatattgtaaagccatttgtcgtgctgaacttcccgttccgttcctgtcctgtcctgttgatgtgtatatctagttaatgtcggatacggttcttgtgggaaaaataaaaaataaaagttcttgtaaagttcgcc

SEQ ID NO: 12080 - DNA, 2116 bp, Zea Mays
ccgtacttcaccttcacgaagacatccccggcccactagcgatccgtgcaggcgctgccatccaccacctctccctcggcgtcgcactagcgtccccaacttcccctacgccgtcggtcgcacgtgctgagcgcctgacatggtgacacccacggaaactggtagttgctcccccgtggtgataccgagcctgcctctggcaagtggggtgccccgtaccccaggcggctgacgggtggggcacccaggtgacccgactgacatggaccatctcttcctcctcctccgtcttcctcccctaaccccagataaagccaagcccagcgaggccaccaactccacctcgtggactccttccccacaaaactaaaccctcgcttcggaggcgcgtgaacccaagaccgacaggcgaacgaagcgagggtcctcacaaccaccatcccctgctgcaacgacgccgccggcgatggcgtccatctccggcgcggcggcgccgccatcttccgccgtgtgccggcttcggctgcgccggcaccttctgctccggccctcccacctccgcctccgcgcgccccactccatcgccgacctctcccgctcctccaattccgccccgagcccggcccgcccagcgctgggctccggcccggagaacggcagcggcggcgtccgcgcggtggagaaggacccgatcaagctgtgggagcgctacgtcgagtggctctaccagcacaaggagctcggcatcttcgtcgacgtcagccggatggggttcacggaggagttcctgcggcagatggagccgcggatgcagcaggccttcgtcgacatgcgggagctcgagaagggcgccatcgccaaccccgacgagggtcgcatggtgggccactactggctccgcgacccggccctcgctcccaactccttcctccggaacaagatcgagaccgcactcgacagaatcctcgccttctctcaagatgtcgtctctggaaagattctttccccatctggtcgtttcacttcaattctctctataggaatcggagggtcagctttgggccctcaatttgttgctgaggcacttgcgcctgataaccctccactgaagataagatttattgacaacaccgatcctgctgggattgatcatcaaattgctcaactaggacctgaactggcaactactcttgtaattgtcatttctaagagcggaggcacacctgaaacccgcaatgggctactggaagtacagaaagccttcagagatgcaggtctgcaattctcgaaacagggtgttgcaatcactcaagaaaattctctgttggataacactgccagaatagagggatggttagctcggtttcctatgtttgactgggttggtggtaggacttcagaaatgtcagctgttggtttacttccagctgcattgcagggtattgatatcaaggaaatgctagttggtgcagctttaatggatgaggaaacccggaacactgtggttaaagcaaatccagcagcattgcttgcattatgttggtattgggcatcggaagggataggcaaaaaggatatggttgtgcttccttacaaggatagtttattacttttgagtagatatttgcaacaacttgtcatggaatctcttggaaaagaattcgacctggatggcaaccgtgttaatcaagggctaactgtatatggtaacaaaggaagcactgaccagcatgcttacattcagcagctgagagaaggtgtacaaaacttctttgttacgtttattgaggtcttgcgtgacaggcctgctggacatgattgggagcttgaacctggagtcacgtgtggtgactatttgtttgggatgttgcagggaacccgttctgctctttatgcaaatgaccgggagtctatctctgttactgtgcaagaggtaactcctagagctgttggagcactgattgcactttatgaacgtgctgtggggatttatgcttctttggtaaatatcaatgcctatcatcagcctggtgttgaggctgggaaaaaggcagcaggagaagtattggcccttcagaaaagggttctgactgtattaaaggaggccatccgcgag

SEQ ID NO: 12081 - DNA, 844 bp, Zea Mays
gcggcgcacactgcccttgcgcccgcaccgcccactccatccaacggccaggatgcgctaagtgctcctcccgcggatcgtgatccgtggcttcgcatctccagccaatcagaatgcagaacgtccctcccgccggatcgctcccttcccgaactatataaaacaaggtgacccggcccagtagaatctatccagtcgcatctccctctccgaaatcaaggtagcgtacaccgctgcagtttctagagccctctctgccactcgtgatcccactagtcacaatgcctgccctcgccaagcccgcctcccgcaccgccaagcccgccgcggctccgaagccgaagcctgccgccgccaagccgaaggcggccaccgctggtgcctcccacccgccttacttcgagatgatcaaggaggctatcacggcgctcaaggagaggaccggctccagctcgcaagcgatcgccaagtatgtgggggacaagcacggcgcgtctctgccggccaacttcaagaagatgctttccatccagctccgtgggtccgcagccaagggcaagctcgtgaagtcccctgcctccaagaaggcacggaaggcctccgcatgagatgggttgctttaggtctaagctctgattgtggttggtgtcagttaggtactgtacaaactaagtgtgtgcccaaagtgtctcaggcggtgtgttatgtgcttagcaagttctatctatcagagtgttttagtttaacaatggttttacctctggcttttgtagtcaggtttctgaaatccctgttctcgcgcaaataaaaaaaataaaagcgtcttccgcgaagtacctgcctc

SEQ ID NO: 12082 - DNA, 777 bp, Zea Mays
gtgaatagcagtcctcccaccgcacgcaacgcagcctcgacctcgacctcgccgtcgccatggtgagcaagcagacccgccgcctcctcgtccttgccgccgtcgccgtatgcctccacctccccgccgcctctgtcgccaccgacgtcgattactgcagtaaaaaggagtacccggtgaaggtgagcggggtgcagatcgtgcccgatccggtcgagcccggcaagcccgccactttcaagatctccgcttctactgataaaaccatcgagaaggggaagctggtgatcgacgtcaagtacttcttcttctacgtgcactcggagacgcgcgaaatctgcggagagatctcctgtccggcgaccggcgacttcgtgctgtcccacgagcagacgttgccagggttcactccaccggggtcgtacacgatctacatgaagatggtcggggacgacgacgaggagctcagctgcatctcgttcggcttcagcattgggttcgtcgcctccagctgaaacccgcctgagctgcgcgccagaagtcgcccaacatggatgtaattatgtaaaccaatgcattacggagacgctcagatttcttcaacctagagcacagatatttgtcgactctgaaatgaaatggcttgcgtgccgtcgttgttcgtcaaccgtctttctgcatgtttgctaaagtttagtctcagttacatctccagtgtttgaatgacaattacgataattataaaactaaaatttatcgcatagatgaagactaaga

SEQ ID NO: 12083 - DNA, 263 bp, Zea Mays
cggcgttccgtcttttatatttctcgtcaaacaattaacagaaaaaggcaattattgcctctctttcttgctcgccacagcttcgtcaaagacacgcggaaaagaagaggaagggggaggcgactcgaccgaggcccggtttcgatctctggtcctccgattgcgtccagatctaccagatactgacccgtgaccaacaagctgggagcaagggacagcatgctatagtcatcctcagttggggttagctgcagtagaggcaa

SEQ ID NO: 12084 - DNA, 1745 bp, Zea Mays
aagcgaggcaggcagcggctgtcccgagctgtcgaaagcgaggcgcggcggcagtcctcgcagcagggccgaccggtcaaaagcactgctgctccacaccacccccaccatccctttccccaacccccgaagccgagccagcgaaccaccccgcccgcagccgcaagcaagcagccaagcagtgtgaactgaccgtccgttccgtccagcccaccatggaggcgccgccggtaccggagctcatggatctggacgcgccccctcccgccgcagccgacgccgcagccgcggcgccggttccccccgccgtcagcgacaagaagaaggaaggggaagggggagacactgttacgggtcacatcatctccaccaccatcggtgggaagaacggcgagccgaagcggaccatcagttacatggcagaacgtgtcgtgggtacgggctcatttgggatcgtcttccaggctaagtgtttggagactggagagaccttcgccattaagaaggtgctgcaggatcggcgttacaagaaccgggagctgcaacttatgcgtgccatggagcaccccaacgtcatctgcctgaagcactgcttcttctcaacaacgagcagggacgagttgtttctaaaccttgtcatggaatttgtccccgagaccctgtaccgtgtcctgaagcactacagcaacgcgaaccagaggatgcctcttatctacgtcaagctctacatgtatcagcttttcagaggcctagcctatattcataatgtaccaggagtctgccatagggatgtaaagccacaaaacgttttggttgatcctctcacccaccaggtcaagctctgtgactttggtagcgcaaaagtcctgattcctggtgaaccgaacatatcttacatatgctctcgttattatcgtgctccagagctcatatttggagcgacggagtatacaacttcaatagacatatggtcagctggctgtgttctagctgagttgcttcttggtcagccactgtttccgggagagagtgctgttgatcagttggtagagattatcaaggttcttggtactccaacccgtgaggagatacgatgcatgaatcccaactatactgagttcaggtttcctcagataaaggctcatccgtggcacaagattttccacaagagaatgcctccggaagccattgaccttgcttcccgtctccttcagtattcgccaagtcttcgctgctctgctcttgatgcatgcgctcatcccttctttgatgagctccgggcgccgaatgcacgtctaccaaacggccgtccattccctccgctctttaacttcaaacatgagctagcaaatgcctccccggacctcatcaacaggcttgtaccggagcagattagacggcagaacggtgtcaactttgggcataccgggagctaggagggcaggcggctgccatggtcaagtttttggtcttggtaccccatgtgcagggccgattgcaggtgacggtgatattgctgcaccatctggagaggaggggctcagcagtacctgagagagctgaaactatgtaaattatctgaccgcgaaggagtacggccagtgttaagccagtaaactggcgcatgttggtccagagtagttaagaatgtagcaggtggagactggtaaatgcctagggtcgtttttagttgttaccaggaggtggctgaggcaggggctctactagctgaagttggattgttg

SEQ ID NO: 12085 - DNA, 653 bp, Zea Mays
cccgatgtggggtacccgaccctgtgttcacccatactcatagacaaaggaaaaaaccaacacactctcgcttgcggcaagaattttccggcccgaaaccgaaagcacccgcaccaatctctgcgtctcttcgtcttcggctgcgcggcggcggcagcagcggaggaggttgaggagatgctgtccggcgacatccccccgagccagaccatctacctcaacaacctcaacgagaaggtcaagaaagaagagttgaagagatcactttatgccttgtgttcacagtatggaaggatactggatgtggtggccctgaaaacacaaaaactgagagggcaagcatgggtggcgtttagcgaaattacagctgctaccaatgctttccgtggtttgcaagatttcgatttctacagcaaaaaaatgcgagtacaatatgcaaaaacaaaatcagactgtattgcaaaagaagatggtacttatgcacctaaggagaaaaggaagaagcaagaggagaaagctgctgagaaaaaacgacgaacagaagaggcacaacaagctggcctcaatgctgctgctgcccaaagcaatggaactatgggggtactaggaaaaaatggagtacaaagcactgggcccatccacaggtcactcag

SEQ ID NO: 12086 - DNA, 1416 bp, Zea Mays
gtttcctttcctttttgcattcccacccacccatcccctcaaaattcgcagcgtgtctcttcctccatcgcagcgtgtctcgtgctccccccaggctcctcttcctcgctttccctccaccccgggcgcaaaccctaaccctaccgtcgctcgccccgcggcgtctgccaatggcgcgccccgtgtgagtgtgcgcgagagaggggtagaccttgaggccgctacccggggaggagagcgagagatgtataaacaggggggagcggggggaggggctgggctggaccggaagcggatcaacgacgcgctggataagcatctcgagaaggcggtcgcgtcgccgtccacgtcgagggggtcggcgggcggcgggcgcgaccaccaccgcctcgtcgtgccgtcctccgtgtcgtccatccccaagggccgctgctccgaaggggagtctgattctgatagtgaagcatcggatgttagcggctctgatggagaagacacctcatggatttcatggtattgcaacttaagagggaatgagttcttctgtgaagtcgacgatgattatattcaagacgacttcaacctttgtggtctcagcagccaagttccttattatgattatgctctcgatctcattttagatatcgagtcatctcatggtgatatgttcactgaggaacaaaatgagctcgtagaatcagctgcagagatgctttatggtctgatacatgcacgatacattctgaccagtaaaggactggctgcaatgctggagaagtataagaactatgactttgggcggtgcccgcgtgtttactgctgtggtcaaccatgcctgccagttggacaatcagacatccatcgatctagtaccgtgaagatatactgccccaagtgtgaagacatctactacccacggtccaagtaccaaggcaacatcgacggcgcatactttgggacaacgttccctcatctgttcctgatgacatacgagcacctcaagccacagaagctctcgcagcgctatgttcctcgtgtctttggcttcaagctccacaagccatgaacctcatgtatttgtcttttaaactcctcaagacgtggcactgggggcatgcgggagttttgcaatccttgaagacttgcatataagagcgccattggcaggtcagtggattggtaaaattctatcatgctgcagcgtgcttgtaccttagctggctggcacctatccaacatttgaatgtagctctaaggatatcaatgttgtaacctaactgctattgttctttgattagtaaaccaggagccccccctacaatgtagaatatggcaattatttatggctttgcagaaaataacaacccttcatctgcttggttctcaaaaagctatttatctaaaaaaatatcaaaa

SEQ ID NO: 12087 - DNA, 108 bp, Zea Mays
tgccgggggcgcctagggccctcgggctttggccgccggcgcgggcgacaacggtccacgccccgagccgatcggcggaccagcaggagccgttccgcttacggccgg

SEQ ID NO: 12088 - DNA, 138 bp, Zea Mays
ctccacctctctttgtgatagtttgcattacatggcattcattcttatatatgtatatatatggttatgttagaacgcgaagaagaagtggaagtcactgaagagaagacaccaccaccttcggattctcaggcagga

SEQ ID NO: 12089 - DNA, 872 bp, Zea Mays
ccgtccaatccaggtagtccgagccagcgaaccaactattcgtttgcttttcgtcttcgtcctctctttgcccagttgtcggtcgcccgcgccgtcgtctccgctccgccggccttcctgcgaaaccctagcgaggcgagcgagagagaaactagcggccatgttcggctacaggaaggctgacccggacctcgaggccggcgggtcctcgctgctgtacccgggaatgacggagagccccgagctgcggtgggcgttcgtccgcaagatctacgtcatcctagccgtccagctcgccatgacggccgcggtctccgccttcgtcgtcaaggtgcccgccgtctccaacttcttcgtctcctccaacgccggggtcgcactctacatcttcctcatcatcctgcctttcctcgtgctgtgccctctgcgctactaccaccagaagcatccggtcaatctgctgctgctcggcctcttcaccgtcgccatcagctttgccgtcggcatgacatgcgctttcactagcggaaaaatcattttggaggctgccattcttacagcagtggtggtgatcagcttaactgcgtacactttctgggctgcaaagaggggtcatgatttcaacttcctcggtcccttcctatttgctgctatcatggtgctcatggtgttttcactaatccagatctttttcccgctgggtaagatatctgtgatgatatacggtgggttggcatcgcttatcttctgtggatacatcatctatgacacggacaatgtcatcaagcgctacacctacgatgaatacatatgggctgctgtttcactctaccttgacgtcatcaacctttttttttttttttttttttttt

SEQ ID NO: 12090 - DNA, 3102 bp, Zea Mays
cttcgatatttgttataattgttgagttaaattttaacagcatccataaacaagtaaacaacgactatgtgtgcaccagtgtctcctgtatcaacggggtggtccgtctggaggaggtaccgaggtcccgccgttcgagagacgagctacgcatttaagccggggaggtcggagcagtgagtgggagtagttcagggactgggagaggagaggaagcaggacctgggagacctcgcctcgtccgtcctcctgcctacttccttgcttttggtaggtgctgcttgttttatcttgaaatgggctctcatgatggcgaggatgaagagttgccacccccccctccggtgccaccagatgtgattcccattaaagctgaagatgctgtgggtgaatcaccagcaaaccatatattaaagccaaagagattactgatggacaggcctggtataggaagaaaagggcagccgacccagctctattcaaatcactttaaagtcgctgtgaagagtacagaagacgtcttctttcactactatgtaaacctgaagtatgaggatgatcgacccgttgatggtaaagggatcggcagaaaggtgattgataaactgcagcagacatatcgtgcagagctttctaacaaggactttgcatatgatggagaaaagagcctgtttacagttggtggtcttccacaaaaaaagaatgagttcaccgttgtcttggaggacgtatctactggaaagactgctgccaatgggagccctggaggtaatgacagtcctggaggtggtgataggaagagagtgaggaggccataccagacgaaaactttcaaagtggagataaattttgcagcagaggttcctatgagtgctattggtcaagtcattagaggcgaagaatctgagaactccctggaggcgcttcgtgttcttgatatcatactgaggcagcattccgcagaacaaggctgccttttggttaagcaatcatttttctacaacaacccttcatgctttgttgacttgggtggtggtgtgatgggttgtcgtggatttcattcaagcttccgtggcacacagagtggactttccctcaatgttgatgtctcaacaacaatgatcgtgaaacctggccctgttattgattttcttctttctaaccagaatgttaatgatcctagcagaattgattggcaaaaggccaagcgtgctctcaagggcttgaggattagaaccactcctgcaaattcagaattcaagatttttggtctcagcgagaggatctgcaaagaacaaacgtttccgctgaggcagagaaatggtagcaacggagattgtgataccattgaaataactgtctatgactactatgcaaagaaaggaatcgatctaaagtattctggtgatttcccctgtataaatacagggaaggcaaagcgcccaacatattttccaatcgagctatgctcgcttgttccgcttcaaagatacaccaaagctttgtctacgctacaaaggtcatcccttgtggagaagtctagacagaagcctgaagaaaggatgaccgttctaaatgatgcactgcaacgcagtaactacgattctgaccccatgttgagggcatgtggtgtttcagttgctccaaaatttacccaagttgaaggaaggatccttcaagccccaaagctgaaagccggcaatggtgatgatatcttttcacgaaatggacggtggaatttcactaataggaagttttatgaaacctgctctgtgaataagtgggcggtcgttaatttctctgcacgttgtgatgttcggaatcttatccgtgacctgatgaggaatgcatctgcaaagggaattcaaatggaggaaccttttgatgtgtttgaagagagtccctctatgaggcgtgcacctgtgtcaagaagggtggatgatatgtttgggcagataaaatcaaaacttcctggagctcctaggttcctcttgtgccttctccctgagaggaaaaattgtgaaatctatggtccttggaagagaaagtgcctggccgagtttggtattgtcacacagtgtctagctccattaagagtcaatgatccgtacctgcttaatttgctgatgaagatcaatgcaaagcttggtggtctgaactcgttgctgcaagttgaagcatcttcgtcaataccacatgtgtcgcaagtacccaccatcatcttaggtatggatgtttcacatggtcatccaggacaagatagaccttcggttgcagcggtggttagttctcgtcaatggcctcttatctctagatatagagcatcagtgcacacccaatctgccagactagaaatgatgtcctcgttgtttaagccgcggggtactgatgatgatggcctcatccgggaatcactgatcgacttctacactagctctggaaagcgaaaaccagaacacataattattttcagggatggagtcagtgaaagtcagtttacccaggtcatcaacattgagctggatcagatcatcgaggcatgtaagtttctggatgagaagtggtcacccaagttcactgtgattgttgctcaaaagaaccaccacaccaagttctttcagacggcatcaccagacaatgttcttcctggaactgtggtggatagtaaagtttgccatcctaagaacttcgacttctacatgtgtgcacatgctgggatgattggaacaacaaggccgacccactatcatgttctgcacgacgagataggtttcagtgccgacgagatgcaggagtttgttcattcgctctcttacgtgtaccagaggagcacgacagccatctcagtggttgctccagtgtgctacgcccacctcgctgcagcccaggtgagcacgttcctgagattggaggagatgtcagacgcgtcctccagccagggaggagggcatacctcggctggcagtgctcctgtgccggagctgcctcgcctgcatgacaaagtcaggagctccatgttcttctgctagctgatgtgaaaataagaccctcaaaaaggaggcgaatgagctcattcacgtcttaattaaagcctacagtgac

SEQ ID NO: 12091 - DNA, 70 bp, Zea Mays
gcctcatcctgtggtacctgttcttgacctatggggggtgtgagacaacaagagtgagctcacatacgtt

SEQ ID NO: 12092 - DNA, 766 bp, Zea Mays
cttacagctcgtgggatgatgttgttatttacatagtggtgaggatggctataatgcattcatccttcacctggaagcattggattggccttatggtaacatcggccggatattttcttccatataagcaactcgccagtatggcaaagccagtttactctgataacggagaactactggatggtggcttcgatttgagcactggtggggtttgcgagtatttatatgatgtgatctacatcactgtctttgtgcaattgatgtctatcatttctgaaaaattttggtggacatatttagtgattccagcttttgctggatacaagatttccggcttgttgagaggagcatttttcagtggtggctcagagggtgaagttgaagatgagaagacccgaaagaaaagggagaagatggagaagaaggcatctagggggaagatgatcaaaactaggactcgctgatgtgacatctgtggcctgttgcttgaaagttaggttaggttggtttatcatagctgtccgaccgagttccaaactgtttgtcaatatttatatcgtgaatttgttatagcgttcagcgacaacttgtttgaacttttaaacagctagtattatgtaggaaaaatgccagctaatctccaacatgtccgatcaataagaatttcatgtgtaatttctgacttttttacccataattcaaacatcaacattgtggcatagcaaatgggaaatcgtgacacacaatagtgtacttttcacagaaa

SEQ ID NO: 12093 - DNA, 881 bp, Zea Mays
gcatgggtcgaccagtcaggcggcagcgacgtgcctccccactcccctccctcgcttatccgcgacccacttttgtgaggtcgcaattcatcctggtcgccaccagtaccacctctccatccttaatccttcactagcttagctagccagccacctccgttcactccatctcttgccggccagtgctccgtcgatcgacccgtagccaaccaccgacaactagctagcaacaatggctgccgtcgtcaacgcgcgagccgcaactgctcgttgctcggccgccggcgggccaccacgcggtgctgcgtcttcgtttccgccgtcgacgataaggacgaggaagaggacgacggcggcggcgggcggccgcggccggcttgtcgcggtctcggcggtgggcgacgtcgcggcggagggcaacacgtacctcatcgccggcgcggtggccgtcgccctcgtcggcacggccttccccatactcttctcgcgcaaggacacgtgcccggagtgcgacggcgccgggttcatccgaaaggcgggcgcgacgctgcgggcgaacgccgcgaggaaggacgaggcccagatcgtctgccccaactgcaacggcctcggcaagctcggacagatcgacaagtagctaaataatcccatccaccatgcatgctacgtactaagctcatatacatgtgctgatgtgcatgcatggaccaaccaaactgctcctttgtataagctcttaattaaatctcctctccgacaatgtctgaatgtatatgctgagtgagtgttaatttggtctgtaatataacctgttgctttgtcagaaacgatgttgtgcaataacattgttgtcggtggtgttgttgtatgtgctaaaaaag

SEQ ID NO: 12094 - DNA, 1038 bp, Zea Mays
aaaatagtaattttcccgctcgcggcttgccactctgcttccgtgcttggcttgctcgctttcctttcccgtctcgactctcgagtctcgactcctcgcattcgccgctgcgtcaacgtgtcttccttcccgcggtctctccgccgcctcccagatccggcggccatggcaaggaacccgggctgcaccgtcttcataggtaacttggatgacaaggttcctgagagggttctgtatgaaattcttattcagatctctgggcaagacaaaccctcattaaatggcaatatccctgtaactcctaggttaaactctgtaccacagccaaagcctcatcaacctatgaggtctagtgatactcctttgccacagcatgcagcagtgaatggcaggaatgccgggtatggtatcccaccaaatcattcatacgacacgcacactcaagcactgtcgagtgggttaccgaatagaggactaagcaacggtacatatgaatatagtaggcgtgtatttggttctgttctgaatgatgttagccgtcgagctaccagggaaccaatcccgtacccgtcctactagcatgttgagccccggtgactgtgactctgtgctgacagaaaatatttctgaagatgttgtctgttgtgtcagccacctgtaatatctctgtactcaccatttcatgcctgtaaatatgggttatggtggtaggacatatgcttgtttttttggttctgcttcgcattgtagtgagacttgtccctgcttgttaggtccttctcatcccctagtgtgaaggccatgcctccactagtatggctgcactaggaaataccattcctagttacatgaatgggtggcaatatgctggcaattgtgttttaacattagtgccattagctatttcaatgttacagcagggcgtgtttgtgtttgcgatattagtatttggtggattttgtgcttctcatcatgtatctgggacatctgaaggagaaacattgttttaaaagaaaattgtgaaataaaaaaaaaaaa

SEQ ID NO: 12095 - DNA, 956 bp, Zea Mays
atgtagccaatctgccgaaacccagtccctccaccgccccctgttcgtccccgccgcttacaaattcgcccaaaatttcccccccaatttccctccaccgaagcatcacccaatcagatccgatttcgtagagatgaagccggcagtagaggcggaggctgacgagcgagcggcggaggagatggcacctaagaaggcagcggctgccaagaaagcggccgaggaagttgaggagaaggaggcggcaggggttgtggagatctccgacgaagacgacgacgacggtgacggggaggcggacgacgacgacgacgatgacggggatgacgacgacgacgacgacgaggactcagacgacgaggaagaggtcgacggtgaagacgatcaggaggaggagctgggaaccgagtatctggttcagcctcttgggcgggctgaagacgaagagcactcgagcgactttgaaccggaagaaaacggtgagggtgccgacgatgaggagatcgatgaagaggacgatgacggtgaggactctgtgaaggcgcagacctctacgaagaggaagaggtcaggcgacgaagaagaagaagacgacgacgatggggatgatgatggtgacgatgatgacgatgggaggccaccatcaaagcgatagtatggttagctctagttttgtagctgtgtccttgggtgtttggtaggtaggtagtgctgctgatgttggtttagaagaactcatcatcacctgggatatgtgtgtgatttggcttggccgatggatgaatgatgaaggtcttgtacttgttgctgcttctttcatgttgatgaactcgcactgattcactgtacatgctagcttctaattgtctgtctagacagctttatgggtttaactagaatcggatttttttccctagacatgagccggcggatctgatccatcaaatctacgtgac

SEQ ID NO: 12096 - DNA, 2571 bp, Zea Mays
ttccgcctccgttttcctccccctccgacaccagcccaccacgcgagaactcgtcagatatttatgagcgcagccgcgggttaaccttcccttctcgctgccgtgctcctgctcgtgcgcgcgttcgcaatcgtagcgctggggttgagccgcgagtggataaaccctagccggtggtgtagctgggttggtggctttgatgccggcgacggcccgcttgtccccggaatggagtgaggtgacgaaggctgccatgggctctaactatgccacgattggattataggatagtagctggcagctaccagtttcctagaaccaatttgtggatagcgagaggagtgactgttgttcagtactttcacctcgatcatgggtggtgtctgctcaaggaagagaagccaattggtggatgaaggtgacgctctccagacatccccaaggttctcaaagaccagcagcttaaaatggctgttgcttacactgcctcgcagcagttctgatgtttccgggaagggacagggaaatgaacctgggcggtgcccgtccctcatggagctttgtgtggctagagtttgccaggatatcgacaggtattctacttttgcaatgctgccaagggatctcagccagcagattttcaatgaattagtaaattcaaaccgtcttacagaggcatcacttcaagtttttagggattgtgctctgcaggacattggcttaggggagtaccctggagtaaaggatgcttggatggaagtagtggcatctcaaaagcagtcattgttgtcggttgatatttcttgctctgaagtagctgatagtgggatagatcttcttagagattgctcaagcatgcaaagtttggcatgtaattactgtgatcaaatatccgaaagtggtctgggagtactgtcaggattgtcaaacctatcttctttaagcttcaagcgaagtaatgctgttactgctgaaggaatgagagcctttgcaaatttagttaacttactaaatctcgaccttgaaggttgcctaaagattcatggtggccttattcatttaaaagatctgacaaagctcgagtcattgaatatgagatattgcaattatattgcggattcagatatcaaatatttaacagatctgacaaatttgaaggaccttcaattgtcatgttgtaagatcacagatctgggggtgtcgtatatcagaggcttgcagaagctcactcacttgaacctagagggctgcccagtgactgctgcttgtttggaagctatttcaggattgtcttcattggtattgttgaacttgaaccgttgtggtatatacgatgatggctgtgaaaactttgaaggtcttaaaaggttgaaggttttaaacttggggtttaactatattacagatgcttgtttggtgcatctgaaagaattaatcagtttggagtctttgaacttggattcgtgcaagattggagatgatggtctatcacatctgaaaggtcttgtgctactgcaaagcttggagctttctgatactgaagttggaaacaatggactccagcatctatctggtcttcgtaatctgcaaagtattaatctctcatttactttggtcacggacattggtgtgaagaagatctctgtgttgaattcgctgaagtcagttaaccttgacaatcgccaaattactgatgttggcctggcagcacttataagtctcactaggctgactcatcttgacctttttggagcttgcataactgacaatggcacaaattgcttcagatattttaagaatcttgtttctcttgaagtctgtggtgggttcgttactgatgctggagtgaagaacatcaaggatctgaaggccctgacgttgctgaatctttctcaaaatgctaatctgacagacaaaaccttggagctgatctctggcctgactgctttgatcaacttgaacgtgtcaaactcacgggtgtccaatgctggtctcaaacacctgaatgacctgcacaacctgcgttcactgtctctagattccacccgggtgacggcaaacgagatgaggaagcttcgagcaacagtgctgcataatctgatcagcatgcggccagagtagtacccatttggcacctgctgtaaataatcattaggttcgagcaggttgttctgttggtaagtactgccttcgttctcgaatatttgtcgtccgctagttcatttttgaactagaccgcgataaataaaaaagaacggagggaatatcttgtaagaacctgaattgaaggcaggcatataattatataagttaacaatgtggtcttgtgctgtgtcagcgagctcgttcgtttcagggtgatgctgaagaaatggcactatggcagctgctttgcactgaattgtaaatagcctttctcgccatctgggaactgggatgcatacgtgggtcgcccttttttatgtttgggtagattagagttgaatgtgcgttatgtacttgtgttctgatgagcaccgaatgcttattttgtcacatgctgttatttaccggccttccccaaaaaaaaca

SEQ ID NO: 12097 - DNA, 798 bp, Zea Mays
aaccgcctgacccgacggctccgtccatcgtccatccgtattcccgtcacaactcacaacccgagccccccaaacccgaagcagcaggagctcccctgaccctgctccgcctccgatcaaggaaaaggaagatgagctactacggccagcagccccccgtcggcgtcccgccgcagcaagcttggctgccctctgctgctgctgcctcctggacgcctgcttctgacggaaccatccgtgccgggtccaacacggctgcaagtgaagcaaccagcttacggaagagctggaactgggccgtgctattctagctttgtcctgcgttatcgccctcttttcttttttttttctctctctctctctctgttatgagactactggtactctgtcgatgtcgattggattagactagggctggtgtgtattctgtggatgctccgtgtttctggtgggattcaagttcaaccctgggattattgtatttcttctacctgtcgcatggatgcgtttctttgctgttactctgttgccgagcacgtttcgcttgcgtacatgattcgtagcgctccgtaggatgttcgactgtagcgcaatttattcggatcgacttatttgacctggcattttggacgaagtcttgtttagaaaaaaaaaaatcccagcttctctctagaagctcgaggcaacctggttagctttttgcgtgtttgacttgctggtcagcgtccgttcttgcgtgagggcgtgaggcatccagctttgtgatggacacgttcagtataacagcgagtcattatt

SEQ ID NO: 12098 - DNA, 107 bp, Zea Mays
cgctcgctagcgaggttgagatggcgcccaagcggaaggcttcgagttcgtctgtcgcaatcattcctcccatcgatcccaacagtcagttgcctttcgcaggtaac

SEQ ID NO: 12099 - DNA, 595 bp, Zea Mays
gaggtcaatgtcatagccactcctacaactggcattactgctccaaaaatacctccaagtgctctgaagtcaggagagtcagattatgttgtgtcagcttacttgatgcgattcatcatagcagggaaccttcttggtctcccagcaataactgtgcctgttggtcatgacaagcaggggcttcctataggtttgcaactgataggtcgtccatggggcgaggcaagcttactgagggtggcttctgcagtggaggagctgtgtctgaagaaacggaagcgaccctctgcattttatgacattttgaaggcctgaatcgtcgttgtatacataatcacggtgttttgcgatgacatgagtatgtatgatgaaaagtgtgggtgagagtgactgaggagagtttcatgtcctcaagttgtaaaatactgtcatcgtcaccatgatgctgatgtcattagagctgaacgtgcaaatagcatataggcgtgaatgttgtcgtgacctttctttctacctgctctcaaggttttttctaaaaaaaaaagtaaatttaaaaaatgctgatcctgatcatatcaatacggaagggcatttc

SEQ ID NO: 12100 - DNA, 2051 bp, Zea Mays
tatttatataaaatcgctatatatatacatttatattttgatatttttgtatcttacttatatactttaaagtattatttttagtttatagatttagccaacgagaaattcaaaataagtaactacatttaaataaatatttaaaaagctatgggagtttttttaccaaaaatatataataattaaaaagaatataaaggcttctagttgctctcacgccaggtcacacgaaaaagaaaataaaagaaaagcagacaaaaatgttttaaatcgacaaaaatcagagaatgcgaggccggcaagtcggcaaccctaggtctgtggttgatccccaacacctcctgccctcctataaaagccgcccgcctccgtttctcgcctgcaccgcatcgcctcgccgctgttccccgcaacctatcgacccaatctcgtccgacccggcgcgtcgtcccctccagatctccgtcgccctctccaggtacaagatgcccagaatgattaccaagatagaaggccgtggtaatggtatcaagacaaatgttgtgaacatggttgacatagcaaaagcacttgccaggccagcttcctacacaaccaagtactttggatgtgagcttggtgcacagtccaaatttgatgagaagacagggatttccttggttaacggggctcatgatactgcaaagctggctggtctccttgaggtattcatcaagaagtatgtccaatgttatgggtgtggaaatcctgagacagagattctcatctcaaagacccagatgatatcactgaaatgtgcagcctgtgggttcgtctcagatgttgatatgagggacaagctcacaaccttcattctgaaaaacccaccagaacagaagaagggcggaaaagacaagaaggccatgaggagagctgagaaggaacggctgaaggaaggtgaggctgctgatgaggagcagaagaaactgaagaaggatgcaaagaagaagggttccaaggattccactgctaagggtttgaagaagaaggctactactgctactggctctgatgaggatcactcatcctctccaactcgcagccatgatggtgacaaagcagctgcagatgatgatgacgatgatgtccagtggcagactgacacttcaattgaggctgcgaagcagcgcatgcaagagcagctgagtgcagcaactgctgaaatggtgatgctgtcgactgaggagactgagaagaagatgaaacaggcaacccacaaagatggaagcactaatggttcagcaaaagaaatccctaatgacaagcctgccgtcactaagcctagtccctatgaagaactgattggagacatcaaggctagcctaggaagtgctccgacccctacccagctcaaggctgtgctggcctcatcaacccttcctccccaggacgtgatgaatgctctcctggaggctctctttggtggtgtgggtaagggattcaccaaagaggttgtgaagaacaagaagtaccttgcagttgctgtgccagatgagggtgcccagacccttctggttcaggccattgaggcttttggtgggaagtgcaaccctgaggcgctgaaggaggttcccgttgtcctcaaagccctctacgatggagatatcctggacgaggaaaccattgtggactggtacaatgatgctgtcgcagctgggaaggactcccaggttgtcaagaatgccaagccgttcgtcgagtggctccagagtgccgagtctgatgaagagggtgacgacgagtgaagaggccacgctgctctactgctaatggccgaacttgataatattatttcaataagtttgttttgcttgcctggtgtcggtgtttaaaactgttaattgtcgtgtggcgcagcatactcttctgttgctgcatgtgtcgtcgtcagtttggttgtctgttggatgtcacagtttattatggattgctactatacaagtatttgtttcggatgtgttgtataacctttcgggatgtaacattttatgattgcactgttgcttctctac

SEQ ID NO: 12101 - DNA, 774 bp, Zea Mays
gtgcaagcacggtagcggtggattcggatccggctgcaagcacgtcgaggaggaagaccagggagcccaaggaggagaacgtcacccttggacccactgtccgtgaaggagagtatgtctttggtgttgctcacatctttgcatccttcaatgacaccttcattcatatcactgatttgtctgggagggaaactctggttcggatcaccggtggcatgaaggtgaaggctgaccgtgacgagtcgtcaccttacgctgctatgcttgctgctcaagatgtcgcacagcgctgcaaggagcttggcattactgcactgcacattaagcttcgtgccaccggaggcaacaagaccaagacccctggacctggtgcccagtctgccctcagggcgcttgctcgttccgggatgaaaatcggacgcattgaggacgttaccccggtccccacggacagcactcgcagaaagggcggtaggaggggaaggaggctgtaggcgtctcttctgcgtgccatttgctggctcttgtcgggtggccatcatgaagctagtcctctctgggtggtgttgctgttttctgtgtttgtcaagacgagctttaattttgctctatgtggatgactgtttaccgttagtcgaacctgtatgatgttgcatggataatgttttttggctgaggaattggctcgtcatatttctatatgcattttcactcttttttttgacgaaaaggaaaatccccctatttcattaagaaacaggaaacatgatgttc

SEQ ID NO: 12102 - DNA, 769 bp, Zea Mays
cgccgcccgagttcttacagccaaaaacgcccctctctctgtctacgaacaacccatatatagtggagtcacgatacatagtcataggcctaattcacccacttagggcctgtgcagctcctcttgttgggccttgtggtccgcaggccgcgcctgagctgctggaacagcgtcgccctcgcctcctgctggttggtgtggggaagttcgtgatgttatttacactgacagtggaaaggtgacggtcatataccgcgtgactgtgcgcggaacagatggagaggttcacagggaggctgctggaacagcatcgctgagcgatgaacggttcgacgaccccgtgtctgcggcagaagaggcagcgttctgcaaagcctgcgcgaggttcggtttcggcctttacctgtaccatgaagacgagacaccatagaagaccaacaatttctccacatcgtctatgccggccctgttctgtttagatttgcgcttgaggggctgtgctctactgttgttgatcagtaagtctatcagatacccatcccattgctgctaggtccttgagctgttgtaacgctggtactatgttgtttgctcgttttggtagctttgtcttgcaaaaaaatgttgtcagctacaattggtatggattatggaactattagtatatatgcaatacttttttgttgcttacctctaatatacacatctcacactgttcaagtttatagaaaaaatcacgtagcatcgaatttgtttcaatgaatccgcc

SEQ ID NO: 12103 - DNA, 1535 bp, Zea Mays
atcttgcgcttaatccagtccgttcaattcttgacatccgaacaccccgccgacgcagccctagattccgcattcctctgtcacctccgcggcgccgccagcccgccatcacataacttcggcttctatcccttcgtaaacccttctctcttcttcccgcggcctgctcgttctatctgtccagcagacttgaggttccgagcggccggaaaccagcggcaaccgtcggcatggcgctcgtattgcattctggggctggaaacaaaaatgccttcaaggcacttattgctgcagaatacagtggggtcaaggttgagttgaccaaggattttgagatgggtgtctccaacaagacccctgagtttctaaagatgaacccccttgggaaggttcctgttctggagactcctgatggccctgtttttgagagtaatgctattgcgcgctatgttgctcgcttgaaggatgacaaccctcttttcgggtcttcccgtattgaacaagcccacgttgagcagtggatggactttgctgcaacagaagttgatcctggtgttggatggtacttgtatccaaggcttgggtacatcccttatgctcacacgactgaggaaacagctattgcttcattgaagagatcccttggtgctctgaacacacatcttgccttgaacacataccttgttggacattctgttactctagctgacattgtattgacatgcaacctctaccatggaattgcacggatcttgaccaaaagcttcacttctgatttccctcatgttgagaggtatttctggaccatggttaaccaacctaatttcaagaaggtcattggtgaggtcaagcaggcagagtctgtacctcctgttcttaaaaagggtgttcctcctaaggagtcaaaggcaaaggatgtgaagaaagaaactccaaaggaggcccccaagccaaaggtggttgaggtaccagcagaagaggaagcaccaaagccaaagccaaagaatcctcttgacttgctgccaccaagcaagatggtccttgatgactggaagaggctatactcaaacacaaagaccaacttccgggaggttgccatcaaaggtttctgggacatgtatgacccagagggctactctctgtggttctgtgactacaagtacaatgacgagaacaccgtctcctttgtgaccctgaacaaggttggtggattcctgcagcggatggacctgtgccgcaagtacgcctttggcaagatgctcgtggtaggttctgagccacccttcaagctgaagggcctttggctcttccgtggccaggaggttcccaagtttgtaatggatgaggtctatgacatggagctctacgagtggaccaaggtggacatctctgatgaggcccagaaggagcgtgtcaatgccatgatcgaggaccaggaacccttcgagggcgaggccttgcttgacgcgaaatgcttcaaggtccggaatgaagctagtgaagacacaattgaaaaataaattagataatatgga

SEQ ID NO: 12104 - DNA, 1813 bp, Zea Mays
caaaaccccacttcatccggcactccacgccctaaaaccctaatcgacaattcccgttgtcattcgtcagcgcgccccctcaaccccgtctcagcctagcgcgccgccacaatgcaggccgccgccgccgtcgtcgtccgccacccgcgcctattcccgccgtccccgggccgctccgcgcagcaccggcgcgcacccagcaccgtgcgcatggcgctgcgcgaggacgggccctcggtggccatcgtgggcgccacgggcgcggtgggccaggagttcctccgcgtcatcacggaccgggacttcccctaccgcggcctccgcctcctcgccagcgagcggtccgcggggaagcgcctcgcctttgaggaccgcgagtacaccgtccaggacctcgcggcccctggggcgttcgacggcgtcgacatcgcgctattcagcgccggcgggagcgtcagccggaagtatgggcccgcggccgtcgccagcggcgccgtagttgtcgacaacagctccgcgttccggatggagcccgaggtgccgctcgtcatccccgaggtcaaccccgaggccatggcgaacgtccgcctcgggcagggggcgattgtggcaaatccgaattgctcgaccatcatctgcctcatggctgccacgccgctccatcgccacgctaaggtgttaaggatggttgtcagcacataccaagcagcaagtggtgcgggtgctgcggcaatggaagaactcaagctgcagactcaggaggtcttggaagggaaggcgccaacatgcaacattttcaaacagcagtatgcttttaatatattctcacacaatgcaccagttcttgagaatgggtataacgaggaggaaatgaaaatggtgaaggagaccaggaaaatttggaatgacaaggaggtgaaagtaactgcgacttgcatacgggttcctgtgatgcgcgcacatgctgaaagtgtcaatctacagtttgaaaagccacttgatgaggatactgcaagagaaattttgagagcagctcctggtgttaccattattgatgaccgagcttccaatcgctttcctacacctctggaggtatcagacaaagatgacgtagcagtgggtaggattcgtcaggacttgtccctggatggtaaccgagggttggacatatttgtgtgtggtgatcagatacgtaaaggcgccgcactcaatgccgttcagattgctgaaatgctgctgaagtgaatgtgacctaaccctcttgtccctccctccctgtccctaattgctctgatcaaatgctggactgtactctgattagtttgtcctcaattttggtcgcctgttctgtattctgccgtgctagtgcaataattgtgttatgggcttgagttatctgctgtacgcataagtgggctcctaaactgggaaataatgggccgtccttattcagcattccggtttatatcttgttcagattcgtctaacagcccagcagtgccgggttctgtggatcacagggcccaaagtgtcctacgggatttacactttcatgtgcaagaatagggtctgattgtaacctgacccagaaggtactgggaagttctcttgagcaggaagcatctgttgcaggtctgaaagaaactgtgcaacgataagacattagagttgagaggaaagagggcgggttagcccgtaaatttctgtgatcgcatgatgtgttgtttgtcagtatatgtaatcctttgtttcaatggatttagttgttttgagtttcaacgattccaggtagtggtaatcttggcactgcata

SEQ ID NO: 12105 - DNA, 73 bp, Zea Mays
gacgccacctagatcaaatcgaactcctcgttgtgtggctcctctttaaccacctgttcttctcctgtggggg

SEQ ID NO: 12106 - DNA, 2385 bp, Zea Mays
cgccgcacccacccaccacccacccacctctttattcaccccgacacccccctcgcctcgctttccccctcctctcattccattccacccacgccgcctgcctgccccctcgcctcgggggcgaaccacgagaaggggattccggctagggtttcgcggatcgagaagagtcagggaagaagcggggggagagaagagggcggcacctagggtttccgcgggcggcccccccgcatggcctcgccagctgcagcggcggcggcggcgccaccgccggccgccaaggagaaggagaaggacgcggaggaggcaccggtcacgggggacatggtcagcgccggcttcgcagagctcgagcgccagcagcagctgctggccacctgcacgcgcctctaccagcagctgtccgaccacttcggctcgctcgagcgggggctcgcggcgcgctccgacgcgctccgcgtccgccgcagggccttcgacgcgcgcacccaccgcgcgctcgactcgctccaccgccgggaggcctccatcgacgcctccgtctcgcgcgcgctcgaccacctccactccatctccgcctccgcctccgccgccgccgccgcttcctccaaggcccccgccacctccgactccgactccgagggcctcgccgagagcctgcgcgcgctgtgcgcgcggatggactccgccgcgttcctgggcttcgtggtggcccgccgcaaggaggcggacgcgctgcgggccgagatgccgccggcgctcaagctctgcgtggatccggccaagttcgtcatggacgccgtcgccgacgtcttccccgtcgaccgccgcgaggtccggaaccccgccgacctggcctgggcctgcgtgctcatcctcgaggccgccgagaagaaggggggcgtcgagggcgccaagccgcccgacgcgcacgccttcctgcagctcgtcgccacgtttgccgtcgccgagagggaggacaggccgctgtaccgcaggattgtcgtcagcttctcctggcgccgccagatgccacgcctcgcgctcaccctcggactcgaggaacaaatggccgatatcattgaggaactaattgctaagaggcagcagcttgatgctgtaaatttcgcttatgaggctgggcttcaggagaagttcccaccagttcctcttttgaagtcctacctggaagactctaagaagacatcaaccgctgcttcagataattcaagcactagcagcggccaatcagggagcaatgtgaacaagaaagaacagtctgcactgcgagctgtcatcaagtgtgttgaggatcgtaaactagaagctgagtttccactggagggtcttcggaagcaacttgaagaactagagaaagccaagaccgagaagaagaaggcagcatcaagcgctaccagtggcggcagcggcggccctgcaaccaagcgcatccgtgcgagcactggaggcccaatgcctcctgccaaggcaggtcgtctcactaacaatgcttgcgtgtcttctctcccagctcccaccacattgacccagtctccctcccacgcgtcatacgccaacacctccccgtcccgcacctcatacgccaatacctccccatcccacgcctcatacgccacagtctccccaacccatgcatcatacgccacaccctcccctccccatgcatcatacgccacagcctccccttacccttacgacaggccggttggacacggcgtgtactgcacccggagcccgccggtgatcagggagccatatgtttacccagctgaggaggtagccaccgtcaacgtcggcattcccatggcctactccaccccgcccatgagctaccctgctgccccctacggcggctatggcaacgggatgccagcttacaccaatggaatggctcctgccttccaccaggcttactaccggtaggttcagtcaggaaacgaagaagtcgctgatgaatgacatgacaacaactgatgatgccaacgactcgaaaccccgctcaatggccctgttttgtagcgactgactacaacggtaggttgggtaccccatcttccatgtccttaccaccgctactactagatgtgttgtctttagctcctcgtctcatcttagtccgctaccgtaattttttttactactactaaggaacctggatgtaaattatgtatggtatcagcgagactgtcgtcgcagccttatgtaattctgttcagaacttttgaaaaacgaaaaaaaaagaagaaaccagcatgtaatcctgaagtaccggtctaccggatgtaccgtggacttaattagaagtgtttttttttatagtttacttgtttggtgttgatgtgtgtgggatggatggtctcg

SEQ ID NO: 12107 - DNA, 1848 bp, Zea Mays
gtttgctatcttgttatatagcttcctgttttaccttagctgcaatcagaagttattcctttgcatctgcctgctggtgatacttcaactgaaagaactgtgcatattgatggtacccaagaacaaattgaagctgcaaagcaactgatcagtgaggttaccagtgagaatcgtgctaggaatccaatgtctggtggctattctcagcagggatatcgccctcctcgtcctcagtcaaactggggcccgccttctgtgccaccccagcagcctggctatggttatatgcagcctggggcttatcctggggcaccgccacagtatggtgcacctcagcaaccttatggtagctaccccccaacatctggtggttatcagactggatgggatcagtctcaaaaccagcaatctcatacaactccccctggtactgggtatgattattatagtcagcagcagcaacctcagcaacaatctgcccctgggacagctgcttctactgatgccactagctacaattatggtcagccttcgacgtatgcttcacagggatatgattctacctacactcagcagagtggtgggcagcaagcatatggacatgatggctacactggttaccagacccaagggcagcagcagggctactctcagcagactggttatgatcagcagggttatggcacatctgcttatggatcagctgcaagctcgacccaggatgggtccaactatggtggtcctggaggggccagtcaggcatctccagggcagcaaacatcaaacccagctgctggaagccaacctggctataccagccaaccgcccactagtgctgcagcaacttacccacctcaaggttcagctccatctggatatggcgctccaccatcccagtctggctatggcacccaaccaccacagcaagccggatatggtcagggcgcttatgggcagccttctccacagggccagaaacctcctgcattgtcaccttatggacaggctccgcctcctggttctgctcaggctggttacgggcagtatggttacagccaacctgcttacggtgcaccaccagcttaccctggtgcacccattgcaagccaccagggctatggccagcagcagtcttatggccagcagcagtcttatggcgatgcttatggtagtgcaagctatgggcagcctccagcctactctactgaagcaacacctcctgctgcatcccaggatcactctgctgcccctgctgcggcccttggaacaacagcttcgacagctcctgaaaacagtgggggcgcccaaacatccgctgaaacttgagcttcagcagctaattgggaacaaacattttccaagaccctgccgtgtggtttcctccgcgctgttgcttaatataattacgcatctaatttagggtctacaactacaagttatttatttttctgcctgttgtttttgacaccatgactttctgtttccttgctatattgagtagtactttgcagttattttattgctggcgtatatgtctggactagtgatatatgtgtttgtgtggttacccttgttggaccgtaatgggtaccttccggcttggtctggacagataaatgcccatctatatgtattctgagccctgttatgattgctctaccgtcggaggtttctatgcccacttcagctggtgatgatggttatgtatgaaatttggtttcaatatttcgtaagacttatgtatcggtccataaaaggtttaagcagcatgaaagtctgcctttttgtttttgctgctggtagttctgagtctctaaagctaatgttctttgtttttttttgaacgga

SEQ ID NO: 12108 - DNA, 2533 bp, Zea Mays
atggctgtcctcgtcgcggaattcatcctcagattcacagtaatgctaatggacttggaggtaatcactggaattctaaaaaataagcttcttagacatgccattatcctaataccaaattggatttacgatgaaagcaacaatgacaaaagatttgacaaatattcagggaaggttgcctctgaaaagcaagggagctccaatgatagagccctaagggaagaactcgccatcttttcaaaagaagtaatacgatttggcaacctctgcaaagatcctatatggcataacttggggcgatattttgacaagttagcgacagataatacacctcaggatcattcaaaggggagtatggaagctattgtccagcaattgattaatttggcacaaaacacttctacgaatgcaccaagtttgatctcgtggataatgtcaaggtgaactatgcaggtgcttttgtgatgatgataaattgcaacctttgcttatccatcggtgtgatttgcttaatggatgcatttttcataaacaccatggggatatcctacacatccaatgaggccttggggacgcccccatggccaacacagccactaccatcaccagcgatggagagggtgctcaaggatgacgccgtcgaggagaagggcgagcgcgccaggatgtgcttcactacttttccagcttgcgcgcttaatttcagcgggtgttttaaaatgggcatggttccgtgcttgggtgttccatcccatgtgctggcatcgtttgttggggccatggcaatctcggatttggtgaagaccacattgggcccaaaaggaatggacaagatcctgcaatcaactggcagaggacgtaatgttactgttacaaatgatggggctaccattttgaagtcacttcacattgacaatcctgctgcaaaggtccttgttgctggagaacttttgaaggaggctgagaagttaattaacatgaaaattcatccgatgactattattgcaggttacagaatggctctcgagtgtgccagagattctttgctaaaaaagaccatggacaacaaagaaaatacagataaattcagatctgatctcatgaatattgctatgactactcttagttcaaaaatactttcccaagacaaggagtacttcgctgaacttgcggttgatgctgtcttgaggcttaagggtagcaccaacttggaatctattcaaattctgaagaaacctggaggatctcttaaggattcctttttggacgaagggttcattcttgacaagaaaattggcattgggcagcccaagcgcattgagaatgccaaaattttggttgcaaacactgctatggacacagataaagttaagatatatggagcacgggtccgggtggattcaatgtctaaggttgcagatattgaagctgctgagaagcagaaaatgagagagaaagtccaaaagatcatagcacacgggatcaactgttttgtcaacaggcagttaatctataacttccctgaggaactctttgctgacgctggcatacttgcaattgagcatgctgactttgagggcattgaacggttagctcttgttactggtggtgagatcgcatcaacttttgataatccagagtctgttaagcttgggcaatgcaaggtcattgaagagattatgattggggaggacaggctaatccatttctctggggttgcgatggggcaggcttgcaccattgtcctaaggggggctagtgagcatgtgctcgatgaggctgagaggtccttgcatgatgccttgtgcgtgttgtcccagacggtaaatgatacccgtgtcttgtttggaggcggatggcctgagatggtgatggccaaagaagtggatgaacttgcaaggaagacccctgggaagaaatcccatgctatcgatgctttctcacatgctctgcaagccatcccaacaatcatagctgacaatgctggtttggatagcgctgatttgatctctcagctacgagctgagcaccacaaagagaactccactgctggaattgatgtcatcacaggcactgttggggacatgcaaaagctagggattcaagagtcgttcaaggtgaagcaggccattcttctgtctgcaacagaggctgccgagatgatcctcagggtcgatgagatcataacctgtgccccgcgcagaagagaggataggatgtgatattacacgctgtttctcgatgtagcgggatgctcatcaccctagttttgaggggtattatggtttaggggcgctcaagttggtcagatttcgagtgtttttggcccctaagcgaccggtacttattatttggttgaaacaatcagccttaggtttgtgttctatattctcatgctgtaccgtttggtagcgagttacgtcgtacgatatgcttgttccatcatgtttttctattccttttaacgtaagaatgggcttgtctttgtttccggacgtggttgctacatgtgttgttggttttgagcgtcagg

SEQ ID NO: 12109 - DNA, 768 bp, Zea Mays
agcaaatctcgtgggcgtgtagcgtacgccacctgcgtccgcgccttttccatttccaccccgatcgcattttaccctactccccgccgcctgtccctgcgctagtcgacactcgacaggctcggtttccgccctcctctcccaccgccgcgcaccgagaagatggggaagcggtggatcccgctggaggccaacccggacgtcctgaaccagttcatatgggggctgggagtccacgaggaggatgtgcagttctgcgacgtctacggccttgacgatgagctgctcgctatggtgccccagcccgttctcgccgtcctcttcctctacccgctcacctccctggacgaggagaaagaagaatcaagtgtttctgctgccacatcgacctcagcgggcaaggaattgagcaagaaagtatactttacgaagcagactgttggtaatgcttgtggaacagttggtgttattcatgcaataggaaatgcaacatctcaaatcaagctagttgaggggtcctattttgagaagttctataagcaaacggctgatatggatccagctcagcgtgctgcctttctcgaggaagatgatgagatggaagatgcacattctgttgctgcatctgctggtgacactgatgctaatgttgatgttaatgaacattttgtatgtttctcctgtgttgatggtgaactttatgagcttgatggacgaaaatcacaacccacatcccatggcccttcatcacctgaaaccttgttgcag

SEQ ID NO: 12110 - DNA, 583 bp, Zea Mays
tttctctctttccgaaccattaacaaagtttctcgtgttgaagctcgcagtgagcagttagatatgtatatgcagctagatgttgccacagatgtttatcctatgcatgctggcgagaaatttaacatggttatagcgcctactctgaatttggatggcaccccagatactggctactatactcaggctggcagaaaaactctggcagacaattatgagtacgtcatgcaagggaagctttacaaaatctcagaagacacatcatccagccaaaacgctaaagtggagatgtatgcatcgttcggcgggcttcttatgctgctcaggggtgacccttccactgccgctagctttgagcttgatcagaggctctttctgctcatccgcaaggtgtaaaactgtggttgctgaccacttaggtgtttgccttgctcgccacttatttaatttccatccgtgggtgaagctgttatatactgttgtaagtactgttttctgtatcgccatggatttatggtaacgagttcatgtttcttgctaaaaagattgctccagcagattcccctatcttatttgtagaaac

SEQ ID NO: 12111 - DNA, 1174 bp, Zea Mays
ctgcactattcatggacagaactgccttgctgtttctttgttttccggtgattttgttgtttcttcgacaatggttatggaatggatgttttccagtattgccagttcagctataccaggcttggttattattcctgtataccagtttagctttgcgtgagaacatactgcgagttaatggaagtgatattcgtccttggtggatacttcatcactactgtgccatgctgatgtctcttgtaagtctcacatgggagataaaggggcaacctaattgtgcacgcaagcagagaggcgtggaacttttcctttgctgggccataatgcaaggatttgtcatgatgctgcagaatagatatcagcgtcaaagattatatactaggattgctttggggaaggctaaaagaatggatgttgtatggggagagactgctggtgttgaaggtcaattgttgctgttgtgccctctccttttcctcctgcagggattcgagggttatgttgggtttttacttctgcgcacagctcatactggcgttgtccctgagtggcaggttgtggtatgcgggatcctgctgatcgcgatggcaatcggtaactttgcaaacacagtggacaccctggtaaccaagtcccggttcaaggcgaagatgaagaaatccaagggcagacgggacctcgacacatgcccctcgccaacaggttcatcatcgccgatagattcagcgaccaccaaagcatgaacaaggccaagaggaaaaggtgcccgtgtttaacccgggtgtgttaccactgtaaagcattttagtgtttttttttcttggccgtcagctcgtaatcctgtccgtcgtctgtgtcgaagctcatactcgtgtaatcaatcatcaggcaagtaggctgctgatggttctaggctggaggtggccgagaataaacttgtggtgtttgtttatatacctgtaccctgaatgaacatcgagtgggctagggtggtgggcttaggactatgtaaggcttagcaaaattttccaagtatagttgtgagacaggcaggcatttgtcacaatgaatgaaacatgcgaagttgtatacacgttgtggcaatgtgttgctttgtatgttggttggtgcatgcttacgttgctctgaaatgtttgttgtgtcacgaattaaa

SEQ ID NO: 12112 - DNA, 782 bp, Zea Mays
tgtttatcgtctggtcgccttctcttccccatcatctccgcgcattttatatgcaggcttgcgcctgtcacttctcccctgtccttgctccccctcgatcccgcatcagtgcgtcacattcaccgggaatggcaacgctcaaggtcccagccactgttcctcccgtcgccgatgactgcgaccagctgcgcaaagcattccaagggtggggcacgaacgaggcgctcatcatctccatcctcggccaccgcgacgccgcgcagcgccgcgccatccgccgcgcttacgccgaggcctacggcgaggagctcctccgctccatcacggacgagatctccggcgacttcgagagggccgtgatcctgtggacgctggacccagcggagcgcgacgcggtgctggccaacgaggcggcgcggaagtggaagcccgggaaccgtgtgctcgtcgagatcgcctgcacgcgcacctccgcgcagatcttcgcgaccaggcaggcttatcacgagcggttcaagcgctcgcttgaggaagacatcgctgcgcacgtcactggggacttccgcaagctattggtgccacttgtaagtacttaccgctatgatggaccagaggtcaacacaaggttggcacactcagaagccaaactacttcatgagaagatccatcacaaggcttacagtgatgatgagatcatcagaatcctcaccactaggagcaaacctcagctgattgctacattcaatcattacaatgatgcatttggccaccgaatcaacaag

SEQ ID NO: 12113 - DNA, 1613 bp, Zea Mays
cactttgtcagtttgccgtcgctgtcggcgccgccgcctgtcctaatctcctctgagtccagcggccacctcctccaccgggagctccccgtaccataaccgcagtccgcagccattggaatttccgcttcatgcgtggatcctcgtagaccccgacccgcgtgcactcaatccctaggcggcggcctccggcgcgaggctagcgggcggcacccatggcgtccgtggcggagctcaaggagaagcacgccgcagctacggcgtcggtgaactccctgcgcgagcgcctccgccagcgccgggagacgctcctcgacaccgacgtggcgaggtactccaagtcgcaggggagggtgccggtgagcttcaaccctacggatctggtctgctgccgcacgctgcagggccatagcggaaaggtatattctctggattggacccctgaaaagaattggatagtcagtgcctctcaagatggaaggttaattgtgtggaatgcattgacaagccagaaaacacatgccataaagctgcattgcccatgggttatggcgtgtgcttttgcacccaatggccaatctgtcgcctgtggtggtcttgatagtgcgtgctctattttcaatctcaattctcaagcagacagagatgggaacatgccagtatcaagaattcttactggacacaagggctatgtctcatcatgtcaatatgtcccagatcaggaaacacgtcttattactagttcaggtgatcaaacatgtgttctttgggatgttactactggacagaggatatcaatatttggtggtgaattcccatcagggcatacagctgatgttcaaagtgtgtccatcaactcatcaaatacaaatatgtttgtctctggctcatgtgatacaactgtgaggctgtgggatatcagaattgcaagtcgagctgttcgaacctaccatggacatgaggatgatgttaacagtgtgaagtttttccctgatggccataggtttggtactggctcagatgatggcacatgtagattatttgatatgagaacagggcatcaacttcaggtgtacagtagggagcctgatagaaatagtaatgaactacctactgttacatctattgcattttcaatatcaggaaggctactttttgctggttactccaatggtgactgttatgtgtgggacacacttctcgccgaggtggtacttaatttgggaaacctgcaaaactcccatgatggccgtataagttgcctcgggatgtcatctgatgggagtgcattgtgtacaggaagctgggacaaaaatttgaagatttgggccttcagtggacaccggaagatagtttgaaggccaacttttctcccccatgttgtatgttccttgttgccccttaacaacggacagtggtgattggtgaccaactcgacttgttcctgggaatccctttgttgttttgtaagctctgttcgcgctatgtttaatggaaaaatgtgcaatttgtcagtgtcacggcgctacatcttgttgagttggtaactgtttatactgttattacgagaatatcagtaacgtgtgatctgcccttttctttgcaaaaaaaaa

SEQ ID NO: 12114 - DNA, 1160 bp, Zea Mays
cgcaaacggggcccggcatccgttccatccccaacgcccccatcttatcatcttcccccggggaacgtgtggcgcccgtgccccacttcatccgcgcgcgcgtcagagactcagagcccaagcatagacgtgcgccttcagcagcgcgcagcgacgtcacctgagcgcgcgacacgccccagcgtccacagttcactgcgcgcgcgtcgtgcaggacaccacaccatggcacctgccgcccctgctgccacgggcgcggcgagccccgccgtcaccaagggcggcggcaaggttgcagcacgctccgtcaggctggggctgcccgcgctgccgccgctgcccggcctcagcctcgccgcgcagggccagacccgggccgcgtcgtccttgtacaagcggctggcgagggacgtggtggccatggccgcgggggagccggcggcgcctcaggctgccaacgaggagctgaccgagttcgtcgacgcgttgaaaaaggaggatcgaggacaagtacgcggtgaccacgctcgccgtcgccgccacgcttggcatgtggagcgccggtggagtagtgtcggcaatcgataggctccccgtggttcctggtctgatgcaggccgttggaattggatacagcgggtggttcgcgtaccgaaacctgctattcaagcctgacagggatgctttctttgcgaaggtcagggagatctacgaggatattatcagcgcttaacagatgggagcaccaatgcaaagctcatccaaattaatgaagttcactttaagacatccttctagtttgctgctgttcagttgtttttgctgtgatgtatttcagtgtagcttctaatttggtccttactcagtgcacgtatggataagtaatttggacgttaaatttagttttctggcccaacagattcggttcacgcaaaaaaaaatagtagccactacaacttgtccagtaatcatgttttttttttgcaactactacaatttgagtacaactaaagtattatcccgataggaagaagtccatagtccacgtgtagctatcgaaacgccgctcgagtccgattctggccattaaattgcagatatagatcaatttagtttcaaatactgtttgctcctttatacgtaataaaaataaataaaaa

SEQ ID NO: 12115 - DNA, 84 bp, Zea Mays
ccttgttcggttaatcccgttacctatggattggatgggattggaaaaaatcgtgaagaaatttgacttgcttgggatttaaat

SEQ ID NO: 12116 - DNA, 411 bp, Zea Mays
gacaatgagaccaagtggatgatacatcaacaccaatgtgttctgttgctgaaaaggttggattttgaagagatgaaattcagtttgtattttctaggttacgaggatgtgaccttagcccctgatgatcatatcaagcggactgaatggacttttaggcaaaaagctactcttgagctcacccacaactggggcacggaaaatgaccctgaattcaaaggttaccataatgggaactcagaccctcgtggttttggtcatataggagtaactgtggatgatgtccacaaggcatgtgaacgctttgaacgtcttggggttgagtttgtgaagaaacctgatgatgggtaactgagcatattacgactgatgtacactagggattgcccaaaatattgatctgtggtgttt

SEQ ID NO: 12117 - DNA, 656 bp, Zea Mays
actgatttgagcaatggcgaatctgcggctcgccagccaacgcagcccactccccattacgtgcacagaggttggatcggctgtgaaagcagggttctggacgatggtggacatggcaagcgggcgttacctctggcgcacccttgttgcacagcctgcgaattcagaatccgagaaggtccggtgacgaatgctcggttgttcgtaaattgtctcgtcctgcggatggagtgccacatagatagacataggtgaaggctggtgcaatcctgttgtatcttcttgttacatactccctccgtttctttttatttgtcgctggatagtgcaaaattacactatccagcgacaaataaaaagaaacggagggagtattggtatgatggtgttggtgtgtaatatagatgttacacgggggtcaatatattgaagtaaatttgcaacattgttcatgtgttgagttgaaccttgtgtcgtgtaaaactggaagtgggtgtattctggccatgtgatctgggtccaagtttgcaggttttgtcgttcggctaaatcccttaaatgtgagacttgaaatatagaataaaagcgaagctgagtacatggaaatttgtgattgctggattgcaatatgctcagttgttaaagaagcttgttgg

SEQ ID NO: 12118 - DNA, 67 bp, Zea Mays
gaacatgataaggaggaagatgtgttacaagttcctccaactcaagtccggtcaacgattcaaagaa

SEQ ID NO: 12119 - DNA, 1386 bp, Zea Mays
tgcgtgggagtaacagaaatcaccttttctcttttaaggcatgcgacctaatgcatcagctgcatttcgtaactttgaacaagaagcaagacaatctgctgtttgggactctgaccagaatgctacatctagttctggtgataatcttgcttctttataccgtccacctttttctttgatgttcaacggaccctttgacaaggcaaagttagaggcttcttccctggacaaatggctattaatcaatttgcagtcgacagcggaatttagctctcacatgcttaatcgagacacttggggaaatgatgcggtggctcagttgattcggtcaaattttattttctggcaggtttattatgacaccagtgaggggaggaaggtatgcacctactaccatttggtgtccatgcctgctattctcctaattgaccccgtcactgggcaaaaaatgcatgcttggaatggaatggttcacccagatcgtttacttgaggatttactaccttacctggataaaggtccgaaggagcaccatgcagctcaacctcaaaagcgcccaaggaaagttgatccggaagcttctacgggcaagcaaggcaaaatagctgtagaggatgaagatgaagagctagcacgggcagtagcagcttctctagaggagagtaaagaagtcattgaagcatcagacgccagtgatgacatggttgaagctgaacccgaggaggaaaatgagcccaccctaaacaccaagcctgattaccctcctctccctgaagaacctacaggaagcagggaccttctctgcagggttgcgattcggctaccgaacaaccggaggatccaaagaaacttccttcacacagatcctatcaagctcttgtggtcattctgcgctcctcaggtcgaggacggggagaggagggctttccacttcgtccaggcaattcctggggcatcccagaaactggagttgggaagcgacctaacattcaaggaagccgggctggccaactcgatgatcaacctcttgttggactgagccgcccgctctctcaacctgcactttgagatgagacgccgtcggccggtcgaggggtttgtatttcaggatgggcttgaagatgatggtgcgcttgggtatcttctttccttgaggattaactcttatcttttgctccactggagctaggagtccgaggacaaaccaaaaaaaaaagtctggtgtgccctgagctgtttgtgtgtggaaatggtccttttgtcgttcgttcttgtgtccgtatacatcctgtccccggtagggcttaactctatttaatgcacatatctatgaaagattcagtctggagcttgctttgatgctcccctctgggctctggtcgtgtc

SEQ ID NO: 12120 - DNA, 65 bp, Zea Mays
gcaaggactatgcttggagaatacaagacgcctgagcggttttggttggaagctgtgaatacagc

SEQ ID NO: 12121 - DNA, 100 bp, Zea Mays
aaaaaaagaaagtttttttttttttttttttttttttttttttttatattttttttttttttgaaaaaaagaaaaaaaaaaacccccaaaaaaacccccc

SEQ ID NO: 12122 - DNA, 76 bp, Zea Mays
tagcccaaatcgggcggtaaactccgtccaaggctaaatacaggcgagagaccgatagcgaacaagtaccgcgagg

SEQ ID NO: 12123 - DNA, 669 bp, Zea Mays
gcgcgatcattgtcgcttgaagagaccatctgctggaaaaacataatgacgttaggtgaaacttagcaatgttttcagccaaacggagtggtgatggtatgcatgagttgaacagcgttaagtgaatcgggcaatccagcggcagttgacgacgtcccaattgtggatatgtgattgttgatgaaaagttgccaagatttgtggtccctgacttgactgatttcaagctgaaggcatacgtgtcacaatgcgccagggacctcacagcgtcgacagcatcctctacttcagcagaaagtactgaaagcaagagctgatctgatctttgcttgcggggaggcagcccaactctgaagttatgtttccctagactgcccatgttccgaggattagcatcagcattctagctacaaacatttcagatatctttcttgtaagggcaaacattatggcatacctagattcacttttcctgcttgtaattttgatcttcattttgaagtaataagtacttgagttaaggggacatttcttgtggaaaaaatgacgggaaatagctggacgttcctcttgtgagctacggtgtgcttctgacttcgatttagttgggtctcgtctcgtccacttcgacttctttaagatcattaagaaattttctttcagttaatt

SEQ ID NO: 12124 - DNA, 87 bp, Zea Mays
ggtgtggtagaaaggaagaacaggacactaattgacatggcgaggactatgcttggagaatacaagacgcctgagcggttttggtcg

SEQ ID NO: 12125 - DNA, 1596 bp, Zea Mays
gacagggtgactccgtgaccgtgagtgcctacccgccgaccgcacgaaccccactcggtcactcccagtctccatctcccactacggcactaccccatccccggtgcggcgccaccttcccggcttccccttccgacctcccccctctcgtcacttatggtgcccagccgctcgctgcgcaactactagcgcaccgtcccctcctcagccatggccgcggcgtcgttcgcccgcgccttatgtctccacatgctcctcctcttcctcgtggttggctcggcgcgctgcaagacggtgaagagagacgtgaaagcattgaatgagatcaaatcttcactaggctggagagttgtatactcatgggtcggtgatgatccttgtgggcatggtgatctacccccctggtctggtgtgacatgttctcagcaaggggattacagagttgtgacggaactggaagtctatgctgtatcaatagttggccctttcccaacagcagtaactaacctgttggatctaagaagattggatctccacaataacaagttgacaggaccaattcccccacagattggacggttgaaacatctcaggatattgaacctgaggtggaataagcttcaagatgtgcttccacctgaaattggtgaactgaagaaactgacacacttgtatttgagcttcaacaacttcaaaggcgagattccagtggagcttgcaaacctgccagaactccgttacctttatcttcacgagaaccgcttcaccgggcgaatcccccctgaacttggaacgctaaagaacctacgtcacctcgacgtgggcaacaaccacctgacaggcactctcagggattttatcggcaacgggaacggcttcccgtccctgagaaatctataccttaacaacaatgagctgactggtgtgctgccagaccagattgcaaacctgacaaaccttgagattctgcacttgtccaataacaagatgatcgggtcgatatcgcctaagctagttcacattccaaggctgatctacttgtacttggacaataacaacttcattgggaggataccggaagggttgtacaggcatccatttctgaaggagctgtacatcgaaggaaaccacttcagaccaggaaccagatcgaagggaacgcacaaggtgctggaactgcctgacgccgacattctagtctagcaagctcgtttaggggacctgaggtcttggcgtcctgcagtagtagactgctgccggtaccaggatcacttctgtctgtcgctgtactattccgtggcaaaactacagttgagaaaaaaaaattctcttggaaaaaaaagaggcaaaaaaaagtgaatagtagaggccacggtcacactgccgtcatcgttagatgagccatgagtgtacaggttgtattgttctgccctgcatcttcgctgtatgatggagatgccggtcagatgtaaagccagcacatcgcatggcaccgacagtcctggtacaactagtggccaatgatatggcctttttcggaagcaaatttggtgccaccaatgcttgagagcaccatgcaaagtcactgcgtttccg

SEQ ID NO: 12126 - DNA, 3734 bp, Zea Mays
aatcgcgtgcctcagtgccctgtacggagtgaccgatctcggatggggactggcaggccagttttgctgtcattagtgatccgcgcgggggacgtgggatcgatcggcggctgatgggaggctagattccgcaatcccacagactagacacatccccttcgcggttgactttggcgaatcgaccttgatctgaaaatggggctgttccgggcggcgtccggcctggcccgtttggctctgcgaaggaacctcttgcgcgccgcggcaagcccctttgccgccggcggtggcgccgtcccaggtgccgcgccggcgcgctacttccactccacctgcccgcgccggttcgctgcgcccacgccccgtgctgtgccgctctcgcgcctcaccgacagcttccttgatgggaccagcagcgtctacctcgaggagctgcagcgggcctgggaggccgaccccagctctgtcgatgagtcctgggacaactttttccgcaacttcgtcggccaggctgccaccacctcacccggcctctctgggcagaccatccaggagagcatgaggctgctgctgctcgtcagggcataccaggtgagcggccacctgaaagccaagctcgacccgctcgggcttgaggagcgtccggtcccggatgtgttggacccggcgttctatgggttctctgaggcggacttagaccgcgagttctttcttggggtgtggatgatggctgggttcttgtctgaaaaccggccagtgcagacgctgcgctcggtgctggagcggctcgagcaggcctattgcggtaccattgggtatgagtacatgcacatacctgacagggagaagtgcaactggctcagggataggattgagacagttaacccaatggattacacttatgaccgtcgtcaggtcatgcttgataggcttatctggagcacacagtttgagagtttcttggcgaccaagtggacaactgcaaaacggttcggtcttgaaggtgctgagactctgatccctggcatgaaggagatgtttgacagggcagctcatcttggtgtagagagtattgtcattgggatgccacacagaggcaggttaaatgtcttgggaaatgttgtgaggaagcccttgcgacagatatttagcgagttcagtggtggcaccaagcctgtcaatgaaggcgaggggttgtatacagggactggtgatgtcaagtaccatcttggaacttcatatgataggcctaccaggggtgggaaacatatccatctgtcactggttgcaaacccgagtcatttggaagcagttgatcctgttgttgctgggaaaacaagagcgaagcagtactattctaatgaccgtgacaggaccaagaatttgggagtgttgctgcatggtgatggtagtttctcagggcagggcgttgtgtatgagacgctgcatctcagtgcccttgaaaactacaccactggtgggacaatacatatcgtggtcaataatcaggttgctttcactactgatccaaggtcagggagatcctcacaatattgcacagatgtagcaaaagcattggatgctcctattttccatgttaacggtgatgatttggaggctgttgttcatgtctgtgagctcgccgcagaatggcgtcagacatttcattcagatgtagtggtggacattgtatgctaccggcgatttggccataatgaaattgatgagccgtccttcacccaacctaagatgtacaaggtgattaggaaccatccaagtgcgctagagatttatcaaaggaagttgttagagtctgggaagatctcaaaggaagatattgataggttaaacaaaaaggtcagcactatacttaatgaggaatttcagaacagcaaagactatgttcccaacaagagggactggctttcagcttactggactgggttcaagtcaccagagcagatttcgcgtatccgaaacaccggtgtcaagccagagattctaaaacgtgttggagaagccatgactactctgccagaaaatttcaagcctcacagggctgtgaagaagatttttgatctacggcgtcagatgatcgagactggagaaggcattgattgggcagttggtgaagcacttgcttttgctactcttataattgaggggaaccatgtcaggttaagtggtcaggatgttgagaggggtacatttagccatcgacactctgtcatccatgaccaagaaactggagagcagtactgcccgctggatcatcttgttatgaaccaagatgcggagctttttactgtgagcaacagttccctgtcagaatttgctgttttgggctttgaattgggttactccatggagaacccaaactcattggtcttatgggaagctcagtttggtgatttttcaaatggagctcaagtgatatttgatcagttcctgagtagtggggagtcaaaatggctccgccagactggccttgtcgtttgccttcctcatggatatgatggtcaggggcctgaacattctagtgcaagattggaacgctttcttcagatgagtgatgacaacccttatgttatacccgagatggatccaacactgcggaagcaaatccagcagtgcaattggcaggtcgttaatgtaacaactcctgcaaattatttccatgttctgcgtcgccagatacaccgggacttcaggaagcctttgattgtgatgtccccaaagaacctccttcgccacaaggactgcaagtcgaacctatctgaatttgatgatcttgcgggccaccctggattcgacaaacaggggacacgcttcaagcgtctcattaaggaccagaataatcacaaggacctcgaggagggaatcaaccgcctagttctttgctctggaaaggtgtactatgaactggatgaagaaagaaggaagtcggagcgcactgatgttgctatatgtagagttgagcagctctgcccgttcccctatgacctcatccagcgcgagttgaagagatatccaaatgccgagatcgtgtggtgccaagaggagccgatgaacatgggagcatacagctacatcaacccgcggttgctgacggcgatgaaggttctgggccggggtggcatcgaggacatcaagtacgtcggcagggccccgtcggctgctaccgcgacgggcttctactcggtgcacgtgcaggagcagacggagctggtgcagaaggcgctgcagcgcgaccccctcaactaccctttctgaaagaaacgaggcccctgtagattcttggaattggggaccttttgaatttgatataataccaatatagagagaacatgccttaaattttatctgtgcagccatttggtgaaataattgtttcgactctgcagtaccgcatgaaacaaaccgttgtaagtttggaaaaactccatctcgcagcgttgattttgtgttcctaaatgctggaaagtttgtatggctgaaagcctgaaacaccgcctgccgcaattttcttgcgttgaattgcaaagtctataaaagcaatgaactgatatgtcattcatcttgcatgttgaaggttgtgctttggtatcgatctcttgaaagatattcgcttggtcctaaaatatatgtactaatcaaagaaattaagtagggaacctatcatgtgcaattgatgcatctgtacgattcaagctataagaataaaggtgaaagac

SEQ ID NO: 12127 - DNA, 1349 bp, Zea Mays
taacgatacgatgcttgcagagcccacctaattgctgcgagatggatagagggcagaacgggagggatgacgtcttcggacgcagggatccattttctgggtttggcttcggcccccacaggagcttgttttctggtctccttggggggagggatccatttgacgatccgttctttacccatccgttcgggggtcggatgatgggtgaccatgacatgtttgtacctagtccttttgggccgatgggagggccttttggggacatgaggaacggtgggtttatcgagcaagctcctcctaggggtaacagaagaaggcctgtgatcacagaggtcgaggaggatggtggagagaacgcagagcatggtaaccagcagcctaaccaagatccttatgttcaggagccagacgatgggattgatgaaggtggccaagtcgagctgcacagggatctcagtagggctaatagtggagggcagccgcaggctcgtactttcacatatcagagctcttccgtgacgtttggtggtattaatggagcttactacaccacttcaaagtctcggcggactggtagtgacgggatcactgtggaagaaagcaaggaagctgatacaacaactaaagaggctactcatagaatctcccgtggaatccatgacaagggacattccctgacaaggaaactgaattcggatgggaaggttgacaccacacagacactgcacaacctgaatgaagatgaactagctggatttgagcaatcatggaaggggaatgctggacattacttgcctgactggaaccacaatgctggtgcacctaatagcgataattctggtgaccgtagctccaatggacgtgaccggcgatcggcctcaggctgggcgcttcctgggaccgagcaaggccgtgatccgaggcgcaacgggaagccaaaatcacgggtcatccctatctcctgaagagcatggacggagtagatatatagagtagataaataaacagctggtttgtactactatgcaaggtttaggttcaagatcgtttcaaggaaacgacctgaggtccaggtaaccggagtccgcccagcacctcgcgtgctattgtctgattctgtagctgtacagtgctctgctaccttattatccgtgatgtgaaacaatttgtgtcgtccagtcttgctgtaaaatcatcatcgcgtatattgtaaacctgagtcggtatgtctgagttggctttgctgtgttgttgctagttgtttgggtcgctgaaggatgtgaagcgatctgcttctgtgtttgcgtaaaaaaaatagatgctctgctgctggctgtccaaaccgaacc

SEQ ID NO: 12128 - DNA, 95 bp, Zea Mays
aggcgcatgaaggagaaaaccaagcattctttgatcatctcttagcaccaaggcatctctctagcgcatttgattcgttgtgatagcaatttgag

SEQ ID NO: 12129 - DNA, 1974 bp, Zea Mays
cgcctgccggagaacgccaagacggaggaggatatgattgccagatttaaagaaaggaaatctgatagagtttcagggaagtggagtgagttccctactaaagttgctgttcaactgaatgacactcaccctactcttgccatccctgagctaatgaggttacttatggatgaggagggacttggttgggatgaagcttgggacattacatataggacaatttcctacaccaatcatacagttctccccgaagctcttgaaaaatggtcacaaattgtgatgaggaaattacttccccgacacatggaaattattgaggaaattgacaagcggttcaaagaattggtaatctccaaacataaggaaatggagggaaaaatcgattcaatgaaagttttagataattcgaacccccagaagccggtagtgcgcatggcaaatttgtgtgtggtgtcttctcatacggtgaatggagtggctgagttgcatagcaacattttgaagcaagaactatttgcagattatgtctctatatggcctaccaaattccaaaacaaaactaatggaatcacgcctcgaagatggctccggttttgtaaccctgagttgagtgaaatagtcacaaaatggctaaagtcagatcagtggacaagtaatcttgatctgctcactggacttcgcaaatttgcagatgatgaaaagcttcatgctgagtgggcagcagccaagttatcttgcaagaagcgcctggccaaacatgtgttggatgtgacaggtgttacgattgatccaactagcctttttgatatacagattaagcgcatacatgagtacaagagacagctcctaaacatattgggagctgtttacagatacaaaaaattaaagggaatgagtgcagaagagaagcagaaggtcacaccgcgcactgtcatgataggagggaaagcgtttgcaacatacactaatgccaaaagaatagtgaaattggtgaatgatgttggtgctgttgtgaacaatgatcccgaagttaacaaatatctgaaggttgtctttatcccaaattacaatgtatcagtggctgaagtgcttattcctggtagcgaattgtcacagcatattagtactgctggtatggaagcaagtggaacaagcaacatgaaattctctctgaatggttgtgttatcattggcacccttgatggagctaatgttgaaataagagaggaggttggagaagataatttcttccttttcggtgccaaagccgatgaagttgctgggctgaggaaggatagagaaaatggtctgttcaaaccagacccacgttttgaagaagccaagcagtttataaggagtggcgcttttggcagctatgactatgaacctctcttggattcccttgaagggaattctggatttgggcgtggtgattatttccttgttggctatgacttcccaagctacatcgatgcacaggatcgggtggatgcagcctacaaggataagaagaagtggaccaagatgtccatcttgaacacagctgggagtggcaaattcagtagcgatcgcaccatcgcccagtatgccaaggagatatgggacatcaaggctagccctgtcgtgtgaacgagggggttgcgattcaacaccaaacgtagtttcttggggtgctataatagtaaggaagaataatgacccacggtgcttgacgcccacttgcgttgtaggcatggaacgggggcacctagcttgttctacagcgctgtctattttgaattggtgcgactttgttgctcttttttcctcccccttatatcttatgaaacaagatccttttgatctgtgctctgaaataaaataattcagttatgatattcgtcgccataatgtgcttgagaaatggatgtcccttcctccaaggtcagcagtgcccaaactccacaagactgtttgatctaagcatattgatat

SEQ ID NO: 12130 - DNA, 503 bp, Zea Mays
tcaaatctggaagtgtttcaggtacttgaaaagcggccctggaaatcttgacaaggatatggagagaaggtttagctacgccctaagcagagaagacatcgagaacgccatactcggaggaccttaagctgaacacatggccaaggggctcagagctaggaattgcttagtcgaggttggcactgaagaaataatcgctccagtgatctgcgtgctaccattacgccattgtaagagcaaatggatcatgtgtcgagaaataatattcatgagcaataatctcgaactaggctggaaatgttggatgcctcctggtgacatgcgcctggtttgttggcctcgttgtgtcaaatctgcctttgagccgaaacttgctcatttgtgtacggcagaatagtgagcttttctactctccggtgatgtgatcggtggcactagaacccatgtaccaaacttggatcagtctaacaagaacacgtgcagaagtagcacgtttttaccta

SEQ ID NO: 12131 - DNA, 67 bp, Zea Mays
gctcgtccttcttatatatgtatatcccatctttagcttctttattgaggattgtcacttaagctag

SEQ ID NO: 12132 - DNA, 1456 bp, Zea Mays
caccaagggaaaaaaggaacacaagatacaaaagatgctcacggagaaggctctaggaatgccattgtccctgcaccacttatgctgccaaaagcacctgaatctaccatacctggcaaaaatacaactctgtcaattcctggatcatctgacagattttctacatccgcactgatggaaaggatacctagtagatggccacggcctacatggcatgctccttggaagaactatcgggtcatcagtggtcacttgggatgggttcgatctattgcatttgatccagcgaatgaatggttctgcactggttctgccgataggacaataaagatatgggatcttgcatcaggaaccctgaagcttacactgactggtcatattgagcaaattcgtggacttgctgtcagccaacgtcacacttatttattttctgctggtgatgacaaacaagtaaaatgttgggatcttgaacaaaacaaggttattaggtcctaccatgggcatctgagtggtgtttactgcctagctctccatccaacaattgatatcttactgactggtggccgggattcagtttgcagggtgtgggacatcagaacaaaagcacatgtttctgctttaacagggcatgacaacactgtctgttcagtgtttgctcgtcctacggatcctcaagttgttactggttcacatgatacaactattaaattctgggatcttgtagctgggaggactatgtgtacccttactcaccataaaaagtctgtccgagctatggcgcttcatccaaaggagaaagcatttgcatcagcatcagcagacaacgtaaagaagtttaaccttcccaaaggcgaatttctgcacaacatgctgtcgcagcagaaaacaataatcaattcaatggctgtaaatgaggatggtgtcttggcaactggaggggataatggaagcctgtggttttgggactggaagagtggtcataactttcaacaagatcagactatagtccagcctggatcactggagagtgaggcatgcatatatgccctctcatatgacgtgagcggatcaaggcttgtgagctgtgaggcggataagactataaagatgtggaaagaggacttgacagcgacgccagagactcatcccatcaatttcaagcccccaaaggacatccgaagatattgatgctcaaatcccacaagtagcaagctagtggatggttggagcctccacaattgtgtgacccaaactcgcttcttccctgagcccaattgaaattttgctagggtttgctctattgtgtaatctgatgcatgtactccaccagtctgatgccttggtccaacgctttgaaacccttagactgtttctttgtgatctttgcgttcgatttgattatatcctaccttagtaccttggactcttgcactaataggtctttaacatgtcttct

SEQ ID NO: 12133 - DNA, 208 bp, Zea Mays
cacacagcacgcgcgcgcgcgcgcgcaccatgagattgagagccgaggaagacgaatttagaatgttttttccccatgatcttttcttcacagaaaagaagaaaacaagcatgacagcacaacagaactttatcataagaacaaggaagaatcccagaccaacaagagctcagtctaatttataggcagccggtagaaacacttgagg

SEQ ID NO: 12134 - DNA, 1037 bp, Zea Mays
aaaaaattcagaaacctgggtcctctgggtatcacaaattataatggcatctttagaatactggattttcataatgtgagaaggttgcccttcaggcactgaaagctagtgattggcacttggaaggagcttttgacttcttctatagccaacctcaggtttctgtggtcaatactcggcatcttgaagatattttcaacagatataaagaacctgatgctgatatgataatggtggaaggaatatctcaattttgcaatgatctgcaggttgatcctcaggatattgtcatgcttgtcatatcatggcacatgaaagccgccacaatgtgtgaatttactcgtcaggaattcattggtggactgcaatcaattggggtagattcaatcgagaagtttcgtggaaaattaccatcattacgagctgagctaaaagatgacaataaattccgtgatatatacaactttgcattcacttgggcaagggaaaagggtcaaaagtctctctcactggagactgctattggaatgtggcagttgctatttgctgaaaggaactggcctcttctggatcattggtgtcagtttttacaggtcagacacaataaagccatatctagagacacatggtcccagctgctggaatttgtgaagacgaccgatccacagttatccaactacgacgacgaaggtgcctggccctacctcatagacgaatttgtggaatatctgactgagaacggactcgtccagcgtaaaagatgaacaacggggagatgcatctccaaacaatggttgggctgtacaaacatgatttatctcggtcagctcgacgcccagggcctgatattggcactcctgctcaattcattcaccaaactgttggcatatcattgaatttgcttataaacgtggggaaacataacttgcctgggaagtggtggctgtcagcctgcgatcgtgaactgtaacttatcgaaaatgcaacggagtttgggactctactatatgatttgtttcagtttttcttagggcttg

SEQ ID NO: 12135 - DNA, 1823 bp, Zea Mays
ctccccttctcgccaaaggggaagccctgcccgtacttccgttgcggcgctacgagcttcgacgggcctcgatctccacctctgaagtgactacttgtgatctagatctgaagctgtagtggtcagcagcttagtgtgaatcgaagatgagcgtggtggggttcgacctcggcaatgagagctgtatcgtggcggttgcgcggcagcgtggcatcgacgtggttctcaacgaggagtccaagcgcgagacacccgccatcgtttgcttcggggacaagcagcggttcatcggcaccgccggcgccgcgtcctccaccatgaaccccaaaaactccatctctcagattaagcgcctgctcggccgcaagttctcagatcccgagctgcagcgcgatctcgcctccttcccattccgagtcacggagggccccgatggttttcccctggtccatgtacggtacctgggcgaggagcggacgttcacctccacccagctgcttgccatggtgctgtccaatttgaagggcattgctgagggtaacctgaatgccgcagttgttgattgttgcattggtatcccggtctacttcacagatctgcagcgcagggctgttcttgatgctgctactattgcgggtctccggccattgcgattgttccatgagacgacagccactgctctggcatatggtatttataagactgatctcccagagaatgaccagttgaatgttgcatttgtcgatatcggtcatgcaagcatgcaggttagtgttgtcggttacaggaagggacagctcaagatgttgtcccatacatacgaccggtctcttggtgggagggacttcgatgaggccctgtttaagcactttgcagctaaatttaaagaggaatataagattgatgtgtaccagaatgcgcgggcatgtattaggttgcgtgtggcatgtgagaaacttaagaaggtgctgagtgccaacccagaggccccactgaacattgagtgcttgatggatgaaaaggatgtgcggggttttatcaagagggaggagtttgaacagatcagtgcctctgtgctggaacgcgtgaaagggccactggagaaggccttggctgaagctgggttgactactgaaaatgtgcactttgttgaggttgtcggatctggttctcgtgttccggctataatcaagataattactgatttttttgggaaggaaccaagacgtaccatgaatgcaagcgagtgtgttgcgcgaggatgcgctcttcaatgtgctattctcagccccactttcaaagtgcgagaattccaggtcaatgatgggtttcctttctcaattgcattgtcatggaatggagactcccagaatgcaccccaacaaacccttgtattccaaaaggggaatgcaattcctagcactaaagctcttaccatctttaaatccagcacatttgaagttgatgttttgtatgtcgacccagataactcacaaattccacaaaaaataagcacttacacaattggccctttccaaacctccaacggagagaaggccaaactgaaagtgaaagtgcgtctcaacatccatgggaccgttacagttgattcggtgataatgctggaggaggatgtggaagttccagtctcatctgcaaatgaagctccaaacgatactatgaagatggacacagatgatgtgccaagtgatcctgctgctggatctgatgtgactatgcaggagcagcctcctgcagctggaaatggagcacaagataatgaggaaaagtctgtttcgatggaaactgatgcaaaggctgag

SEQ ID NO: 12136 - DNA, 628 bp, Zea Mays
tggcgctacctgggcttccgaaagcccatcacctgcgaacgtgtgagccggactgcatgtcgtggaaggggcgagtgcaaaaacacacgagcgagatgtgtatctgtgattctggataggggcgctggcaccgattggctccggatatcgcagcgtggcggtcgctcagttcagtccgccatggaaggtgcagccggccaaatgctcgtcccgatcctcggcatcgttgccgtggccgccgtgaccttctacaccgtcagcttcatggagatgcgagacaaatccttcgaggagctcgacgagaagtactcggacttcgacgagtcaggcgggcggcagcggcggtctcgccgcagggccgagcgcgacaggaagaagtccaaatgattggccacgccgccatttgtgtccctgctggtttgagaggggactgacgggggatgaagacgcagctgctacttacaaatttttgggtttcaagtcatgggtgagtgtgagtgtgtgtggttatgaacatctgcctatttcctagctattagccactgaagcagctaaaacgatggatttatttaaaagatcgactccgtaatacattatgtaccctctgttgtgctttcaaaaaaaaaaa

SEQ ID NO: 12137 - DNA, 1046 bp, Zea Mays
tgccgtgttctggtgcgcctcgcggccgggatcggatttgttgatcaaagaaccatggaaggatcgttccagttgaatcccaacgccagtcctttcatacctggattgctgggttcatctgcacaaaaagccccagaaaaacaaggagggtcatcatcaaagggagagccttctggtagcacctttgatccttctgagtatgaggaaaatgacatggatgaacttgctctagtcaaaatggtcttttcaatgttcccaaatgtctccacggacttcattgatgagttaatcaaggcaaatgattttgacatgaatctgactgttgatatgctttatgagctgaactcacaagatatggttcatgatgattctgaggttatcaatcattttcatgatgattctgaggctaccaatgaccttcatgatggcaagggcgtacctggtgctgattaccacaagactgtggtgcccgagagtagcagcaacatgaatcaagacctgcagaacgaggagtcagcaacaacttctgatgtgaaatctgtgctgccaaagttctcacagatcaatttgcttcacaatgacctgggcctgcctgatgatgataagtcagcggggacttctattgcaaattgatctttcatatcaaggcgctccgtttgacccgagttagtgggttatggtgtacatactagttgcacccagaagtagaagtgtggcttggaaggtcaaagcagcggaagcaactgtcccatttccgtttgccggaccagttaactgtttctggtggttatcctgactttgaaatcccctgttcagctccttttgggccgagtagttaggtatttctggtggtggttgtcatgagtttttacatctagttcgctcttcaagactgagtagtacttggtggtcatcctgattttgcatgtcagggttagctgtgttgggtttggtacccagttagtacaaacaatccaagttatggcgtggctgtccgttatgtgtgatgttgtgggagggttgcatccatactgcttgtgcctccc

SEQ ID NO: 12138 - DNA, 2064 bp, Zea Mays
catcatcatccttgtccatcaactgggagccagctgcagagtttgcacaatgctgtaggttgtgagaaatttttcctttttcggcatttctccagtggttccggatcctttatcgccaaggaaaatggtgttggaaaaagaaccagaggtcccagattttcccagcattaccagctacaaaagagcttgacccattctcactaggagtaaatggaaactgcagttggagaagagcatccaacagccttaccccaagtgctgctagttggctcaatggttcattctcatgtggacaggtagtttcagcacggacattctcaaatagtgcagacctgcctccacatcaagaaattggaatgccttcactttcacctaccatgactgagggaaacattgccaagtggcttaagaaggaaggagataaggtctcccctggcgaggttctctgtgaggtggaaactgataaagcaactgtggagatggagtgcatggaagagggctatcttgctaagattattcatggagatggtgcaaaggagattaaagttggtgaggtcattgctataactgtggaagaagagggtgacattgagaagtttaaggattataagccgtcatcttcagctgaacctgtagctcctgctgaatcaaaggctcaaccagaaccttcacaaccaaaggtggaggaaaagaagcttacccaggctcctgaggttaaggccccaaagattgaagaagcttctcaatctggagatcgcatatttgccagccctcttgcccgtaaactggctgaagataacaatgtcccactatcaagtgtgaaaggtactggtcctgatgggcgtattttgaaggcagacattgaagattacttggccaagggtgggctgagggaggcttttgcagctccagggttaggttacgttgatattccaaatgcacagataagaaaggttaccgcaaaccgcttgctagcatctaaacagaccattcctcattactacttgacagtagatgcacgtgttgacaaacttgtcaagttgcgaggtgaactgaatccactgcaggatgcttctggtggaaagaaaatatctatcaatgatcttgtcatcaaggctgcagctttggctcttagaaaggtccctcagtgtaacagctcatggatgaatgattttattcgccaatatcacaatgtgaacatcaacgtggctgtgcagactgaacacggattgtttgttccagtaattagggatgcagacaagaagggacttggtacaattgctgaggaggtgaagcagttggctcaaaaagcaagagacaatagcttaaaaccagcagattatgagggtggcaccttcacgatatcaaacttgggaggtcccttcggaatcaaacaattctgtgccatcataaatcctcctcagtcagcaattttggctattggttctgccgagaagaggtgatacctggttccgccgatggtctgtatgagtttggttcgttcatgtcagccacactgagctgtgaccacagggttatagatggtgcaatcggtgcggaatttctgaaagcattcaagggctacatcgagaacccgacttcgatgctgctgtgaagttaggatcgatgacctaacacaattcttgtcaagttgtttaaataaccaggccacccaaaggtggcgtctccaaagttccaaaccaatagcacagagccgttatgatattcccagtgttaattaggatcaacgtatagaggcctgaagtcatttttgggattgttctcacgggcaattgatgggaataaatatgaaagcagccaacatgggaaataacttttgattttttttctttggaacatcgctatgcgatttaaaaaaattgtgtaaatctgttgagcttctccacagtaagcgtgatttgatgcgttgatgatatcttgataagagtggtaatcatggattgggttaatatgttatgatgcatggtctaataccatcaaagggcctgcctaatgacagcgcctgggctgacagattcataggaaaaatttattaagtttgct

SEQ ID NO: 12139 - DNA, 740 bp, Zea Mays
ccggaaggggtaccgccaatgaaattaatgatctaagtgttcacgtataacaagcagttccacaacgtgctggcggtgagcaaggcggactacaagaactgcatcgccaccaagccgacggccacctggtccacggggaacgattccgtcgtcctcaacaccacgggccaccactacttcctctgcggctacccgggccactgcgctgccggccagaaggtggacatccgcgtcgcctcctctgctgccccttccgccgcaccgtcgccgaccccctccggctccaagccctccggcggcgccacggccgcgccgtcgccgcaccctaacgccgcgccgaaggccctctccgccagctccgtagccgcggctgtcgccacgtccctgctctccctggccgcggccgtgctggcatgatcacttgatcaggatcgtgtagtgctggccaggggacggcgcctttgtgaattgtgagagctcgtactgtgtctgtgtgactgtctctgtggccgtatgagcatttagccctggatctgtgtttgttactctgtcttgctgactttgcttcgggaacatcgattatctcatctgccttctccatgcggtggtgactggcgactgcaagcagcgccatcggtaaagccttgcaggcgcactacgtgaagcctcgctgctgcatagtgatgaaaacagaaacggtaattttcggatgccggaaattgattttcgaagttttactg

SEQ ID NO: 12140 - DNA, 2191 bp, Zea Mays
gctgggtgctgctctggtactctcttctctctccctgctgacccaagtcccacgcctgcgtctcgtgatgccgccgaaatcgaaggcgtccgccgccgcggagccggtggccgtcgaggacctcttcgcctcgctccaccgccacatcgaggcaggtgctttcaaacaggccgccaaggtcgccgaccaagttctcaaggcagcgccgggagatgaggacgcggcctactgctgctacaggcaaaacaaactgcatgaggctcttgagcttttaagaggccaagaagaaacttcagctgttctccagctggaatcccagatcttttaccgactaggaagaatgaatgattgcatgagtagctatgagaagcttaaaaaatttaaaattgactcaatggatctgaagataaatatcattgctgctctagttgctgctggaagggcttctgaggtacaggcagctatgaaggcgcttaaggttgatcttaccacgagagcactcagggatactcgtagttttgagctcgcatacaattctgcttgctccttgatagaaaacaagaagtactctgaagccaaggagcaattggacttggctaaaagaattgggaaagaagagcttatggtggaagactacggcgaggcggatattgaatatgaattagctcctgtttctgctcagcttgcttatgtgcagcagctacaaggacaatctcaagaagctatgcaaacatatgttaatatgataaatgggcagtcagctgatttatcatcacttgctgtggcaacaacaaatcttatttcaataaaaggtacaaaagataccgcagatagcttgaagaagctcgatcggcttattggaacaactacagctccaaaccagttgcatcttgttgaaaaccttgactacaagttatccccatggcagaaagaagctctgtattctgcacgtgttcttttactgctccatgcaaataaaactgaacaggcacatgagttggtcagggggctgcttggtatgtttccagatagtgtattccctgttttacttcaagccgctgttcatgttaaagaaaagaagattcacaaagctgaagatgttcttagccagtacgctgagaagcgtcctgagaattctaaagggctcctccttgcacttgcccagattgctgctaatgccaaccattttcagcttgctgctgactcactatccagaatacctgacattcagcacatgcctgcaacagttgctacattagtggcccttaaagagcgcctaggtgactccaatgctgcagcttctgtacttgattctgctatcaactggtggaagaattccatgaccgaggataacaaattagatatattaacacgggaggctgctgcatttaagctcagccatggacgtgatgaagaggcttgtttgttgtatgaggaacttgtgaagagccatggaagcatagaagctttggctgggttagtaatgacttcagcgcgcactaacttggagaaggcagaacaatacgagaagaaactgaagccattgccaggcctcaaaggagttaatgttgagagcttggagaagacatctggtgcaaggcatgtggaagggccccaagacatgaaggtagatgttcccgaggaagtgaagaagcaaaaggcaaagaagaggaagcggaagcctagatacccgaaaggcttcgatccagcaaacccggggccgccaccagatcccgagagatggctgccaaggagagagcggtccagttaccgtccaaagaggaaggataagagggctcaggtcagaggtgctcaaggagctgtgtctagggaaacatcggccaccaatgtcggtgcttcctcaaaaggaagccaaaccaccaattcatcaaagacaccggcggtaaatgctgaacagccaaaaactagcaacaaatctaggaagaagaagtccaggcattagatgagaattttatgttacattaccgtacaaaagaatatgttcgtttatcttctggatgacttgcaattttggactggattgcattcaattgcagatttgctttgcttttacactaacgtttgaagcgactgagactattgattttttttttgccaagatgtgattgatgggttgctccagtaacattctattttttatgagttaatagttcttttgattccattcgag

SEQ ID NO: 12141 - DNA, 403 bp, Zea Mays
aaagatctcacccctccagagtcccgggataattcgcttcgatccccagaggcacagacgagacgacagagatgaaggacggaacgtcgtcggggggaggggcgttcgctgcgggcagcgatccaaggcagccgtcgacggcgaagccatacgcgccgccgaagctgtcgccccaggacctacccatcgactatgcaggcttcctcgccgtcgccttcggcgtcctcggcgtcatgctccgctacaaggtgtgctcgtggatcgcaatcatcttctgcgctcagtcgttggcaaacatgaagaactttgagaacgatctgaagcagctttctatggccttcatgggaaaaaaccagaaacaggatgggagccaggacggaagtacctgggacagggactagaa

SEQ ID NO: 12142 - DNA, 451 bp, Zea Mays
ctgatctggtttctcttgataaactagcaagaaaggagatgcagcagaagcagatcccatggaggaggcgacaaacggtgctacaagccaagaataattctgatttttggaattactgccaccagcttttttcttgtttcttcgctgcatctgatggtgttatattacattcagttgtggaaaaattgagtactatttctagcttctaagaaatgaagcatcctattatcgcatctaatggcgcaaagataatcgacaaggcatgcccagtgttcgttctctgttcttcgtgacgacgctcgtcacttggatttttcggagttcctcccagcccggaaatttcttcctggacattgccaactgctgagatgtagcatccggatacaaatgttcgaattacgtatacaatgttactgtgtatgttttctcggctaacctctctctgttgtct

SEQ ID NO: 12143 - DNA, 2210 bp, Zea Mays
aagcatagatccctttcaaattccatcgtcaccaaaccaaaccagttttgggtgagtggtcagggaacgagcgaagtttgatgtattgagttcaaatgcgggtgactgcgaggcgcaacgtttttcatgtgacttgtagttgtctattgggttttctcgggtattatttttttcctgttcttttggcatgattttgggtgttctaaaaacctccttagcgccagctctcattctacctcttaaaaaatcggcagtgatgagcccacccacggtgtacaagcgagttgatgcaccaactaacgagttgaactgaatactcctacttgcatagtagttctcaatcacaaagccatgggcgaaaattaattaaattaacaactcggtaaaactcaaattgtcttgccactgtaaatggttcggatatgaatcgcatgatgcgtgagcccgtacgtgctgatattatatatacagagaagtaggaaggatcccaagcatccctcccgatcagatccctcgacaatggcactccaggcagcctacgagtacctgcagcaggccgtcggccatggcgcgtggtcgtccacgcagacgctgacgctgctgctcatcgccgtacccaccgtactactgctgctagcgtccctcgccaagagcacgtcgtcgtccggtaggggcaagccgccgctccctccctcgccgccgggcaccctccccatcgtggggcacctacaccacatcttcgcgtcccggccgtggtccatggcctcccacatcctccgctacaacacctgcgacgtggccttctcgccgctcggcgaatactggcagcagaccaggaagctgatgaacacgcacctgctcagcaacaagaaggtctactccttccgccatggccgcgaggaagaggtgtgcctcgtcgtggacaacctccgcgaggcggccgccaagtcgccgtcgacggccgtggacatgagcgaggtgctggcggcgtacaccaacgacgtggtgagccggtcggtgctgggctcgacgcaccggaagaaaggccggaacacgctgttcagggagatgaccatgaccaacgtggacctcctggtggggttcaacctggagtactacatcccgcggtggccgctgacggacctgctcttcaggctcgtgtgctggaaggtcacgcgccacctcaagcgctgggacgccctgctggaggaggtgatccacgagcacgtggagatgaggaagctgtccggcgacaaggagaaggagtcggacgacttcatcgacatcttcctctccagatacgaggagtacggcttcaccatggataacgtcaagtccctcctcatgaacgtgttcgaggcagccatcgagacctcatatctggtgctggagtccgccatggccgagctcatgaaccacaggcgcgtcatgaagaagctgcaagcggaggtacgggcgtacggagcggagaagaagctggacatgatcagggaggacgacctgagcagcctgccgtacctaaaggcgtccatgaaggaagcgctgcggctgcacccaccggggcccctgctgctgccgcactactccaccgccgactgccagatcgacgggtaccacatccccgccaacacgcgcgtcctcgtgaacggctgggccatcggcagagacccggcggtctgggagaagcccgaggagttcatgccggagaggttcatgcgggacggctgggacaagtccaacagctacagcggccaggacttcaggtacctgccgttcgggtctgggcgccggatctgccccggggccaacttcgcgctcgcgaccatggagatcatgctcgccaacctcatgtaccatttcgactgggaggtccccaatgagaaggaagacggtggcgggaaggtgagcatggacgagacgttcgggctgatgcttcgcaggaacgagccgctctaccttgttcctagggccgtctagctagctagttactgtgccgccgccgcctcctatccaagaatgcatgagtcttagacgtgtggcagtaataattgcgtggggtgtagtaaaataataagcacgtttgttgagttgtaatggattcacattatgtgcattcgagacaggtccaaggaattgtatctctaaagtgaaaatttcctttttcaccacgatgaatgcatgtcatactctctcaccggtatacacagaag

SEQ ID NO: 12144 - DNA, 3980 bp, Zea Mays
accgacactcctctccttctcccccaattttctttaaaaatccccgctcgctaaatcccctcccaccgacgcctgtcgccactggcacgcattcctgctctcctctcctcttctccctcgtcggtgcggcgtggcgcggctcggcgttcggtgagaaaccactcggggatgaggatctgctgctagagtgagaggagctacggtcagtatcctctgccttcgtcggcggcggaagtggaggggaggaagcgatggaggcgagcgccgggctggtggccggctcccacaaccgcaacgagctcgtcgtcatccgccgcgacggcgatcccggggctgccagcgtgtgaccggtgacgaggaggaggacggcgtcgatgacctggacaacgagttcaactgggacggccatgactcgcagtctgtggccgagtccatgctctacggccacatgagctacggccgtggaggtgaccctaatggcgcgccacaagctttccagctcaaccccaatgttccactcctcaccaacgggcagatggtggatgacatcccaccggagcagcacgcgctggtgccttctttcatgggtggtgggggaaagaggatacatccccttccttatgcggatcccagcttacctgtgcaacccaggtctatggacccatccaaggatcttgctgcatatgggtatggtagtgttgcttggaaggaacggatggagaattggaagcagagacaagagaggatgcaccagacggggaatgatggtggtggtgatgatggtgacgatgctgatctaccactaatggatgaagcaagacaacaactgtccaggaaaattccacttccatcaagccagattaatccatataggatgattatcattattcggcttgtggttttggggttcttcttccactaccgagtgatgcatccggtgaatgatgcatttgctttgtggctcatatctgttatctgtgaaatctggtttgccatgtcttggattcttgatcaattcccaaagtggttccctattgagagagagacttacctagaccggctgtcactgaggttcgacaaggaaggccagccatctcaacttgctccaattgatttctttgtcagtacggttgatcccttaaaggaacctcctttggtcacaacaaatactgttctatctatcctttcggtggattatcctgttgataaggtttcttgctatgtttctgatgatggtgctgcaatgctaacgtttgaagcattatctgaaacatctgaatttgcaaagaaatgggttcctttctgcaaacggtacaatattgaacctcgcgctccagagtggtacttccaacagaagatagactacttgaaagacaaggtggcagcaaactttgttagggagaggagagcaatgaagagagagtatgaggaattcaaggtgagaatcaatgccttagttgccaaagcccagaaagttcctgaagaaggatggacaatgcaagatggaaccccctggcctggaaacaatgttcgtgatcatcctggaatgattcaggtcttccttggccaaagcggaggccttgactgtgagggaaatgaactgccacgattggtttatgtttctagagagaaacgaccaggctataaccatcataagaaagctggtgctatgaatgcattggtccgagtctctgctgtactaacaaatgctccatatttgttaaacttggattgtgatcactacatcaacaacagcaaggctataaaggaagcaatgtgttttatgatggaccctttactaggaaagaaggtttgctatgtacagttccctcaaagatttgatgggattgatcgccatgaccgatatgctaaccggaatgttgtcttttttgatatcaacatgaaaggtttggatggtattcagggtccaatttatgttggtactggatgtgtatttagaaggcaggcattatatggttatgatgcccccaaaacaaagaagccaccatcaaggacttgcaactgctggcccaagtggtgcttttgctgttgctgctttggcaataggaagcaaaagaagactaccaaacccaaaacagagaagaaaaagttattatttttcaagaaagaagagaaccaatcccctgcatatgctcttggtgaaattgacgaagctgctccaggagctgagaatgaaaaggccggtattgtaaatcaacaaaaattagaaaagaaatttggccaatcttctgtttttgttacatccacacttctcgagaatggtggaaccttgaagagtgcaagtcctgcttctcttttgaaagaagctatacatgtcattagttgtggttatgaagacaagacagactggggaaaagagattggctggatctatggatcagttacagaagatattctaactggtttcaagatgcattgtcatggttggcggtcaatttactgcatacctaaacgggttgcattcaaaggttctgcacctctgaatctttcagatcgtcttcaccaggtgcttcggtgggctcttgggtctattgagatcttcttcagcaatcattgccctctttggtatgggtatggtggcggtctgaaatttttggaaagattttcctacatcaactccatcgtgtatccttggacatctattcccctcttggcttactgtacattgcctgccatctgtttattgacagggaaatttatcactccagagctgaataatgttgccagcctgtggttcatgtcactttttatctgcatttttgctacgagcatcctagaaatgagatggagtggtgttggaattgatgactggtggaggaatgagcagttctgggtcattggaggtgtgtcctcacacctctttgctgtgttccagggacttctcaaggtcatagctggtgttgatacaagcttcaccgtgacatcaaagggtggagatgatgaggagttctcagagctatatacattcaaatggactaccttattgatacctcctaccaccttgcttctattgaacttcattggtgtggtcgctggcgtttcaaatgcgatcaataacggatatgagtcatggggccccctctttgggaagctattctttgcattttgggtgattgtccatctttatccctttctcaaaggtttggttggaaggcaaaacaggacaccaacgattgtcatcgtctggtccattctgctggcttcaatcttctcgctcctttgggttcggattgatcctttccttgcgaaggatgatggtccgcttcttgaggagtgtggtttggattgcaactaggatgtcagtgcatcagctcccccaatctgcatatgcttgaagtatattttctggtgtttgtccccatattcagtgtctgtagataagagacatgaaatgtcccaagtttcttttgatccatggtgaacctacttaatatctgagagatatactgggggaaaatggaggctgcggcaatccttgtgcagttgggccgtggaatacagcatatgcaagtgtttgattgtgcagcattctttattacttggtcgcaatatagatgggctgagccgaacagcaaggtattttgattctgcactgctcccgtgtacaaacttggttctcaataaggcaggcaggaatgcatctgccagtggaacagagcaacctgcacattatttatgtatgcctgttcattggagggcttgttcattacatgttcgtctatactagaaaaaacagaatattagcattaatctatagttaattaaagtatgtaaatgcgcctgttttttgttgtgtactgtaatcatctgagttggttttgtgaaattttcgtagaaagaatgaatgtgagatacagaaaatgtaatgccgtggtatatgcgtatggaacgatgtagtatcttttatggttccataatagtgtatttaacaaccccagcaaggggtttcttgggtttct

SEQ ID NO: 12145 - DNA, 74 bp, Zea Mays
cctggtgtgaattgcagaatcccgcgacccatcgagtttttgaacgcaagttgcgcccgaagccttctggcgaa

SEQ ID NO: 12146 - DNA, 1065 bp, Zea Mays
gattttgtcaagaaagaagtctagaatcagacggcagggaggtgcaacacatgttgacatagcatgtgacaaggacttagtaaagcttgccatggatcttaccaaccttccgatctgtgtctcatctgtagatccttcagcgttccattctgcagtacaagcaggagctaaaatggttgagattggaaactatgattctttttatgagatgggcattgagttctcctctgagcagatactgaagctaacaagggaaacaaggaagatgcttccagacatcaccttatcagtaacagttcctcacacacttagtttgccagatcagatgagactagcagagctactcgaagaggaaggagctgatataatccaaactgagggtgggaaatgttctagcccgacaaaacctggagtgcttggattgattgaaaaggcaacaccaacactcgccgcagcatactccatctctcgggctgttagtattccagtgatgtgctcgtcagggttaagctcggtgactgcaccaatggcagtaactgcaggagctgctggagttggagtcggttctgctattaacaaactcaacgacgttgtggcaatgatcgctgaggtgagaagcattgcgcaagcaatggagcttgcgccaagaatcgtgtccgaaaccctgagaacaattagttactagtggctaggaatacccttgccatttctgagcaaacttgagcagtcaataagaaagcaaaagagaggcatcgactctgcattttattctctctacgctgtcttttgcctgtggcagtgaatagcgcattagcatcatagaagtattagcttgatcaatggaagttgttcatgcgcttcttcatcgctgcaagtgttgtcatcttgtcgaactcacaataagcttagataagtgctgggtttgtgggaacatcgtttgtgcaatataaatgagatcttgcacctacaaatttgactcttctttttgtgctgtgctcagagaaattctatacctagaaaagttcacgagcttcaaatagtacacttgttgatacaagacctaga

SEQ ID NO: 12147 - DNA, 127 bp, Zea Mays
tacgataactcccttgttgcttgtggagtaaggccagatatccgatatttcctacgcatgtttccacggtgtgtgacctccactttcacacctcgtagggcttttttaatctatatatacagaggag

SEQ ID NO: 12148 - DNA, 337 bp, Zea Mays
tttgccttctgccttgatagctgacaggaggtttggtaggaccaacttgctgatatatgggccaacttggtcagagaaaaagaagaaaagatgatttctgaagggggggttcaggcaaggtttgcatgcagggtgtcatgataatcacggttgggaatggttaaggtttcaagatttgcacaggggatatttggcctagtgtaaggcataagaaggtggttgatcttggttcactgggcctatacctgaataacttgcacagcacagagagctcgcatttcgctttcctttgtggtcagagatccacatccgacaagagggggggggggggggggaa

SEQ ID NO: 12149 - DNA, 667 bp, Zea Mays
aaccaagaatacacggttgtgatgcttggtctggatgcagctggtaaaacaacaatactgtacaggcttcacatgggagaggttctttcaacagtccctacagtcggttttaatgtcgagaaggttcagtataagaatgtggcattcactgtgtgggatgtgggtgggcaagaaaaactcaggtcactgtggaagatgtacctgagtaattctgatgcactgatctatgtcgttgattctctggacagagaaaggatcagagacgcgaggcaagagttccagaccattatcaaggaccctttgatggcaaacagcataatcttggtatttgcaaacaaacaggacctgagaggcacgatgagcacggacgaggtcagcgaagggctggggctgcacgacctcaggaacaggatctggcacatacaggggacctgcgcgctccgcggcgagggcctctacgacgggctcgactggcttgcgtccaccctgaagcagctgcaagaatcgggccacgcgacttcggtcgctggcccttccatctgatccagcgcaaggctcagctcggtcagagctttcggttgcatgtggatcggatgggatgcttgtttggtttgtggctaactgtgccccactttgcctaaggttagtcgttcgaattgagggcgtg

SEQ ID NO: 12150 - DNA, 1087 bp, Zea Mays
tggaaattgaccaaatagccattctcttgttggtcttatcaggtgcatctcctggtgagggcactggggcaactatgtctgacgatgaagacaatcaggtggacagtgagagcaacatgtttgatggaaatgaggggtcagatggaatgggatttggcccattaatgttgactgagggtgagagatccttagttgagcgcgtccggcaggagctaaagcatgagcttaagcaggggtacagagacaaacttgtggatattcgggaagagatattgcggaagcgaagagctgggaaactccctggcgacactgcttctaccttaaaagcatggtggcaggctcattctaagtggccgtacccaaccgaggaagacaaggctcgactggtgcaggaaacagggctacaactgaagcagatcaataactggtttatcaaccagcgtaagcggaactggcacaacaattcggcgtcatcctcgtcggacaaaagcaagagaaaaaggtgatgggaacgcagaaccagcctggtagggcatggtcggggaacgaagtttatgtaaataatgcttctactgtgaagagttccatcatatttgttgctccagaaaagaccctcagaccggtgtttcctgaacccatattcatacaaagacatcagacgatgaataatgttgcgagtagtcaaataaaataaataacttgtatagtgaataactagaaactagcattcatcgttttggtattgtatagcgctagagtgtaattgtttggtcggactgtcttgtataatggtgtaaggttcaaatgcattttgacctagcattcgatattgtattttgtgatgttaaaaaccattgtattccgttttgtgttttatccgtggaatagggacactgtttagtgttgccctcaattcggccatgtcgtgttgtcaacttcatattaaacttcaaagttgtttgtatttaataaacttcaaacttcatatataacacgaggttgtggtatagtttcacgatatgcaattatttgtatttaataaacaacatattgttgaagatattattagccaaaatgcagtattgat

SEQ ID NO: 12151 - DNA, 977 bp, Zea Mays
ctaccttgacttgctgcactgccttttggcttgtgcagtacttggtgtctgagggctgcatcaagccattgtgtgaccttcttgtctgccctgatccgagaattgtaacagtttgtctggagggtctggagaatattcttaaagtagggcagcatgacaagaccatgggtgcaacaggtgacactaatgtcttagctcagatgatcgatgaagcggaaggcctggaaaagatcgagaacctacagagccacgataacaatgaaatctatgaaaaggctgtgaagcttcttgagacatactggatggaggaggaagatgacgcaatggctactgccggggaagctgctcctgctgtttttgactttaaccaaggtggcaaccctcctgctgctggtggtctgaacttcaactgatacagtctttgatcgaaagggtgttaattccctcagtgatgggcttggcattggcttgtcgtgacaaatgtagtctggtcgactccacgtgggatataatggtttgtggtgagtccaataaactcaagatttcgaagggagatgggctgagcattatattcccaagtgaaccatggctatcaatatcgcagggtctgtaacaaggattatataatcgtcgaacattagagcgtgggttcttgagaacgctactctaggttgtgcgtcgtttaattatatctggctactgtaaggcattcctgattggtttggttttttaagttcctcgggaatggtctgcgttgcaggttgtccggagtgggtaaacctgagtgggaacatttgagcatattgctcggccttgttttactacggtcgaggctaaattgatttctaaaagctgtttgcttctgcattgttggcgggaaaataaggcgaatgttttgatgccaaattcaatttcgagttaagaggcagatacaaggcccttcacaacgcaaatcttaccaatttcttctcaacagt

SEQ ID NO: 12152 - DNA, 113 bp, Zea Mays
cccgtcgccgcgatccgaacacttcaccggaccattcaatcggtaggagcgacggacggtgtgtacaaagagcagggacgtagtcaacgcgagctgatgactcgcgcttaaca

SEQ ID NO: 12153 - DNA, 126 bp, Zea Mays
ccgggcccaagttctctggaaagggacgcctggggagggtgagagccccgtccgtcccgggaccctgtcgcaccacgaggcgccgtcaacgagtcgggttgcttgggaatgcagcccaatcggggc

SEQ ID NO: 12154 - DNA, 3188 bp, Zea Mays
gttacatggcccgctctgttcccctttccggcgcccgcgacggactgcgacgagcggatagatagatctgtgccccgtccctgtctcgccatcctcctttctcctcctccactccctatcgactatcgagcagagcgaatccttagcggggaagtctttccgagctcagggagtggggtttaaaacgcggctcgacgaaaggaaggccgcactcgctgctgctgctggtcgcttgctttcggtggcgagcgtctcggtaaagcggcgtcggcgtcggaggcggcggcagagactggacttgcttgctccttgctgcgcagtgtagtgctgtgctaccttggagacaggatcctgccgcagggactcataattgatcagtgtgccccaacataagagcgaaacgtgactgagtttgccagctcccccttcatccactgtggtcgctcgtctgctaatgcccgcatcggaggattgctcacggatatgcttctggtgatgggcaacccggggcgctcgcggcagttgtcagcgctggttgcttccgccgccatcttgctgtcactgtccgcgttgccaatttgtcggccctacacctacgagcaagatgtgtttgcgataaacggcttgtacacggcacttggagcaccacagctgcctaattggacttcaaatggtggtgacccctgcaatgaaggctggcaaggtgtttcatgtgtagcgtcaaatataacctccataattctcagcggtgcaaatttaggtggacagctgggcaacactttggggaattttacatcattaatcaccttggatctcagcaacaacaatattggagggaccataccagatggtctaccactcacaatgcagagatttttcctttcagctaaccaactaagtggtagccttccaagtacattgtcatcccttacacttttgacaagcatgtcactcaatagcaatcatttgactggagcgataccagatgtattttcagcactcactggacttgcaaatttacatattcagaacaatcaaatatctggaactcttaatgtgttgcaagatctccctttccaagatttgaacgttgaaaacaaccttttctctggtcccgtgcctgtgaaattactgaacttgccaaacttcaagaaggatgggaacccattcaatacaagcatagctccatctgcgcagcctcccatcgcgccaacaccattaccgtctatcccaccttcgtcagggcatgtcccctcaaaagaacctgcacattcttctagtgttccaggtggtagtacttcaggatcaggaaaacatactacactcaaattagttggatatattcttattggagtggtattagcagtagttcttgtgctaattgcaatgtactgtttatccaagtacaaagaaaaaaggtcgagagatgatatttatatgaaaaacaagataggaagggtacctcagaagcttggagagcctaaaatcaaggagccaccattaaaactcaagaatgatgctgagaaagaaacttcaaatgtggtttatgatccaagtccaagggatggggcagaacttagattcatcaccgacagctgtacctttggctgttacaatgaataaaaaagagcatgtgattgatatggaaaaggctgataattttgttgaggaccaactgcatcctccgcagccgatggcactgcggactgaaaaagtcactgtcaatcccagtgtacgtacaagaaggggaagagtaccttcagttgaaaaggtggaatcgacgactactgtcaagtccttttccattgcatcccttcaacaatataccaatagtttcagtgaggaaaatatcataagagacagcaggtttggtaaggtgtatctggcaaagcttcctgatggagagctactggaaattttgaagattgactcttctaactcaaaagtgccagtagatgcctttcttgagctagttgtgaggatttctgaactgaggcatcctaacatacttggtcttgttggatactgtgcggagtttgagcagcgattacttgtctatgagtactgtagcaagatgaccctacatgatgaacttcgtcatgtggatgactcaagcaagccattatcgtggaatgctcgcctccaagttgcttcagaggcagcaaaagcattgcaacatcttcatgacggttgccaaccaccagttgtacaccagaattttgaaccctctgttgttctgctcaacagcaccttagttgtgcatatttctgaatgtggccttgcatcactagcatcaaaatcagtttctcagttgtctggacacaccttattccattatgaagcacctgaagtgcatgaatctggatcagtaagcgatcgaagtgatgtttacagcttcggtgtagttatgttggagcttctaacaggacgtaaaccttatgacagttcgtatccacgagctgaacaacatctagtacgatgggccacttctcaactctatgatattgatgccataacgaagatggttgatccttccattcgaggacaatgttctgataaggcattatcccgttttgctgacattattagccgctgcattcagcatgaaccagaattcaggccaccaatgtctgaagttgtccaagacttaactcgcatggtaagtaatgtatcaagggcttccatgtaggctatcccttaaacaatggtaaaatgtggaggtccgtccttatagaaattagaattcgaggacgcacctcgttctggagcttcttgctagattcagttctctctggccatgattcaagatgcctttgacgaccattgatgcggtagtaggatattttggccaatgcaaaatgggtggaacacagtggcaggatgcagagactgcaccacgttttgtccactgccagtaatgctcctctgaatctctggtcaatttatagttcaaagctattgttgtaattctgtagtctgcactctgcacaatatatttcttagtgcccagttccagatcacgtggtgtgattatgcgtggttatctagaccatatgtaaataccaagaagttaaacaaatgtattatagcgtgcttgtttgaggaatgagaaagtacatcttcttactcctcactttattatttgatttgttaaatgaaatgagttggtccatcatatttcattcttt

SEQ ID NO: 12155 - DNA, 83 bp, Zea Mays
gagtctattcgaatattattagcctatgccgctcaccattctttcaagttgtttcaaatggatgtgaagagcgctttcctcaa

SEQ ID NO: 12156 - DNA, 828 bp, Zea Mays
cagcagttctatttcaataagtttctatcccaaatgttatagaggaaatgcaagttaataatgaggcaccactagggtgcctcaagccaaatatttctcagtataactctccagagcagataggtggtgttgaagggtttcctgagaataatgaaaaaaggaatgatattgttgctgcggaaaaaatctgggaggcgactccaaaccaaggccttagcaggcccatctaccgacaagaattttatgcctggccatatatttattcagattatcaaatcgtgcgtcagccactaccttatggttttgacaaccaattttatcagataaatagggaccacggtttccctattgagaacagggttcaatatcttccattcaagatgctccctcaaggtcacccccatgatgcacagcttcaggaatttcagtattttgtggttattgactttgaagcaacctgtgacaaggtgaacaatccatttccacaagaaatcatcgagtttccatctgtcttggttaacagtgcaactggaaaactcgaagaatgcttccaaacatatgttcggccgacgtatcatcaatttttgactgatttttgcaaggagcttactggcatacaacagattcaggtggacagaggtgtgcctctaggtgaagccttactcatgcacgataaatggctagaggacaagggcatcaagaacacaaactttgctattgtgacctggtctaactgggactgccgtataatgctggagtcggaatgcagatttaagagaatcaggaagcccccttattttaacagcttttgtgccagggagatgctac

SEQ ID NO: 12157 - DNA, 1107 bp, Zea Mays
aaagaaagcactgttttggtcgaaaatctacctccagatttctcaatggagagtattcaggaaaaattcgcaacagtgggcaaagttgtgaacataacaattaatgatccagaatcagtgaaagaattttcaactgctaagaagcctgacttcaatttaagttttaaggttactgccctaagtgatgagagcaactggagaactgggatgaaagtcaggcttctgtctaaacaaagtgtaatgggaccaggaaagtataaaaaaccttctaaagaaaatcaagatgcagtttccaaaatgattgatcagaatcaacattcaaaagaagaccagcttaaaaccttggaaaagatctccggtgctgatgcagtggggattaccaaggacagagataatttgaaacctgtttttatcactgagactgagcaccaagatcagaagccaaatgctagaggacgaaaaggatggtacaaaggtcaaggtcagatgcagcaaaatgcaaacaaacaaggcagttgtggttccgagtcattaaacaagcctatttctggaccgaggatgccagatggaacaaggggcttcacactgggacgtggtagatctcttccactacagaagtctgagaaggctgaagagtagagctaccaaaaaaggcctgttaagaaccttatccaaagaagctgggtaaaatctaacagaaaacctttgcttttttttttttgaaacttaagatcatcgaagccgttctttgcatggaatgggacacagaagaaagggaatcttggaatggctttctctctgcaagaaatggaacacaaaagggaatctgggaatgacttgtacagaaacacaattgtctgggggtagttccgagttcactcgtatggaacacagtagaacctttgcatgtttcctgacttgcattgtgtcatatactcgtatcatgctgcatgcagcattgcagccctgtttgcaatttcagcagccgggggctggggccgtgagcccgtgaccctgcaccatccgggtctaccacgagcccccctgttctgcgaggcgtttggcccctcatccctatggatctgtactctgtaggctctccttata

SEQ ID NO: 12158 - DNA, 1409 bp, Zea Mays
accgagccgttgatcggtggatgcctccaattgcagcatttcttcaatgcaactctaatgctagagatgttgcggggtaaacgaatgttgtttgttggagattctctgaaccgtgggcaatatgtatctttggtttgcctcctgcaccgaatcatccctgagagctccaagtcaatggagacagttgattcccttacagttttcaaagcaaaggactacaatgccaccattgagttctactgggctccctttctggccgagtcgaattcggatgatgctgttgtgcaccggatcgcggatcggatcgtaagagggacatccattgagaagcatgccaagttttggaagggggctgacatcttggtattcaacacctacctatggtggatgactggacaaaagatgaagattttgcggaactccttcgaagataaaagcaaggatatcatagagatggaaacggaggaagcctatgagatggtacttaatgctgtgctgaaatgggtggagagcaacatgaaccccaggacatcaagaacattctttgtcactatgtcacccacccacacaaggagcagagactggggcgatgatactgacgggaactgctacaaccagacagcccccatcgaggacctgtcctactgggggccagacaccagcaagggcctgatgcgcgtgatcggagaagtgttcagcgcgtctaagtccaggatccccgtgggggttgtgaacatcacccagctctccgagtacaggaaggacgcgcacacccagatatacaagaagcagtggaacccgctgaccccggagcaggtcgcggaccctaagagctacgcggactgcacgcactggtgcctgccggggctccaggacacgtggaacgagctgctctactccaagctctttttcccctgagttaaaggtttgagttgcgaggtgcacggtgaagttggggtctctctctggcattggcacgctgcacaatactagttagcttggcattggcccagcagtctgaagatggatgctctgctgcggtatggcatggcatggtattgttgatgtacgattcattcgttggaaaacctggacgtgagtgctggaattgcaccatctggccttttctgtacatgcctgatgtaacggtggtgttgtgtttccccaccaccacctctcttttcacgatgatgacacagtgcatgaatagttgtatggggtaatgtgataatacatactgtaattctctggttccttcccttcttctctgtttgccctcccttttgttgggcctacgctagcatcaaatctgtctgataggctgggccttgcggagtgggccggtagacaaacatttcggcggctggtcacttggtcagtgacccgttgatattattattattattgga

SEQ ID NO: 12159 - DNA, 85 bp, Zea Mays
gtacattggtaactagtatttttcgtataaaattatacaacgccacgccgataggcgtttaattcgctatcgcgtagtactattt

SEQ ID NO: 12160 - DNA, 4924 bp, Zea Mays
gttctctcaaaaatatttgctacaaccatttcttttctggagaacagatctgcaggcaatgtccattggatgggaaaagttaattttgtggagatacgttcattttggcacatattccgtagttttgacagaatgtggatcttcttaatattgtccttacaggccatgataattattgcttggaatggtggaacaccaagtgatatctttgatgctggcgtatttaagaaggttttgagcatatttatttctgcagcaattttgaagttgggtcaagcaatcctagatctcgtatttggctggaaagcaaaaagaagcatgtcatttgcagtcaagctacgatatgtcttgaaattaatatctgctgctgcatgggttgtgattttaccagtgacttacgcgtacacttgggagaatcctactggtcttgcaagaacaataaaaagctggcttggggatggtcagaatcagccatctttgtatatactggcagtagtgatatatatggcaccaaacatacttgcttctatgctatttcttttcccatttatgagaagaatcctagagagttcaaatgttaaggtcataacgatcatgatgtggtggtctcagcctcggttatttgttggtagagggatgcacgaaggtgcattctccctcttcaagtataccatgttctggattattcttttagcaatgaagttgattgtaagcttctatattgagatcaaacctctggtacagccaaccaaagatataatgagagaacctatcaggacattccagtggcacgagtttttccctcatggaactaacaatattggtgttgttatatcactctgggctccaataatcctggtatatttcatggacacccaaatttggtatgcactgttctctactctgattggtggcatctacggggcttatcgtcgtcttggtgagatacgtacattaggaatgttgagatctcgctttgaatctttgcctgaggccttcaatgaacgcttgattccttctgatgcaaataagagtaaaggtcttcgtgctgctttttcgagtagacccaaggcttctggtgacgaaagtgagagagagaaaagagctgcaaggtttgctcaaatgtggaacgccattattacaagtttccgcgaagaggatctcatagacaatagggagaaggatctgctactggttccagactgtaaagaccgtgaacttgatatattccaatggccgcctttcctacttgctagcaagatcccaatagcactggatatggcagcagacagtggtggaaaagaccgtgatctgacgaagaggataaagtcagatccatacttttcctttgctatcagagaatgctatgcttcattcaagaacatcatcaataccttagtatttggtcagcgggagaaagatgtcctagtacagattttcacagttgttgataagcatatagaagaggaaactctgataacgggtctcaatatgaagaaccttcctgcactgagcaagaagtttgttgaattacttgagttactgcaaaaaaacaaggaggaagacttgggtcaggtagttattttgttccaagatatgctcgaggtggtcacgagggatataatggaggaacaggacctgctcgagacgttggattctttacatggtgccaatagtagaaaacatgaaggaattacaccgctagatcagcaagaccagttgtttgctaaagctattaagtttcctgtggtggaatcaaatgcatggactgaaaagataaagaggcttcatcttctgttaactgtgaaagagtctgctatggatgttcctattaatcttgatgctaggcggcggatatcgttcttcgcaaattctctatttatggatatgcccaatgctccaaaagttcggaacatgttgcccttctctatcttgactccttattacaaggaagatgttctgttttcattacaaaatctggaagagcgaaatgaggatggagtttccattcttttctacttgcaaaaaatttacccagatgaatggaaaaatttcctcgaaagggtgggctgcaagaatgaagaggtactccgtgaagatgaacagctggaagagaagctttgtctttgggtgtcatatagggggcagacattaacaagaactgtaagagggatgatgtactatcgaaaagctttggagcttcaggcttttcttgatatggccaacaatgatgatcttatgaaaggctacagagcaatggaagtaatgtctgaggactcaccattaaagactcaatgcaaggctatagccgacatgaagtttacatatgttgtctcatgccaactatatggaattcagaagcgttctaatgagccttgcgcacatgatattttgagactaatgacagagtatccatcacttagggtcgcctatattgatgaagttgaagcacccagcaaagatagaatcaagaagattgaaaaggtttactactcagtgttagtgaaggcttctgttacaaaacctaatgagcctggtcagagccttgatcaggtcatctacaagataaaactaccaggtaatgccattttaggtgaaggaaagccagaaaaccagaaccatgcaataatattcacccgaggcgaatgtctccaaactatagatatgaatcaggagcactatatggaggaggctttgaaaatgagaaatctgctgcaagagtttgagaagaaacatggagtgagacatccatcaatacttggagtcagagaacacatatttacgggcagtgtgtcatcccttgcttggttcatgtcaaatcaggaaactagttttgtgacaattggacaacgagtgcttgccaatccactgagggttcggtttcattatggccatcctgatgtcttcgatcgtcttttccacgttacgaggggcggtgtcagtaaagcatccaaaattatcaatcttagtgaggacatctttgcaggattcaattccacattgcgcgaaggcaatgttactcaccatgaatacatgcaagttggcaaaggaagggatgtaggtctcaatcaaatatctctgtttgaggcaaagatagcaaatggcaatggcgaacaaacgctgagccgtgacatctaccggctaggtcatcgctttgatttcttcaggatgctgtcttgttactacacaacaattggtttctacttcagtacaatgattacagtatggactgtatatgttttcctctacggccggctatatcttgtacttagtggactcgatgaagcactggctactggaaagaggtttgtgcacaatacacctctccaggttgctcttgcgtcagagtcttttgtgcaacttggatttttgatggcgctgcccatgatgatggaaatcggtttggagagaggattcagaactgcattgagtgattttatactgatgcagcttcagttggcctctgttttcttcacattctcgttgggaacaaaaactcactactacggaaggacgttactccatggaggagcggaatacagagccactggacgtgggtttgtggtgttccatgccaaatttgctgagaactatcgactttattcccgtagccattttgtcaagggccttgagctgatgattctactagttgtgtatgaaatatttggtcagtcatatagaggggctataacttacatcttcatcaccgtatccatgtggttcatggtgggcacttggctctttgcaccattcctgttcaatccttctggatttgagtggcagaagattgtggatgactggactgattggcacaagtggatcagcaatcgtggaggtattggtgtggcaccagagaaaagctgggagtcatggtgggaaaaagagcaggagccccttcgttactctgggaagcgtggtactattgttgaaatactgcttgcattgcgtttctttatctatcaatatggactcgtgtatcatctgaatataacgaagaagataaccaaggataaccagagtgtgctggtttattgcttctcatgggttgtaattttcgttgttttactcgttatgaagaccgtatcagtggggaggaggaggttcagtgcagagttccagctagtgttccggctgatcaagggtctcatatttataacttttacagccatcgtggtaatcctaatagcaatccctggcatgacggttctggacatctttgtttgcatccttgccttcatgcccactggatggggtttgctcctgattgcccaagctatcaggcctgtgattcaaaagatcgggctgtgggggtcgatcaaggctcttgcccggggctacgagatcctaatggggcttctcctgttcacgcccattgctttccttgcctggttcccgttcgtgtccgagttccagaccaggatgctgttcaaccaggccttcagcagaggtctgcagatctcccgtatcctgggaggacacaagaaagaccgagggacgcggagcaaggagtagtagggctgctgattgaaggtccgtctatcgggagttatgtcgtcctggagcggtctatcaggttcagagaatattagggtccgtatgtatgtatgtgtgtgtcgcacctagcaccagtagtatgtatgtatgtatgcgtatgtaggttcagagaatattagggtccctatgtatatgtatgtatcaggattgctatggtcttttggattggaagatctgagatttgctggtgcaatggccagtatctgacatccaaatgttgaaactataattaggctctgctaatagttagctaacttacagctaacaattagtttattagctggcttacgactaagtagtcagattaaagttgggatgtcggtcgccccctttaggtttagttaggctcgttccaatgggtggcgagagc

SEQ ID NO: 12161 - DNA, 837 bp, Zea Mays
cccccctatcttcaacaccgcagccgctcgctcccctcttctcctggtcctcgtgcgcgcgcgcgagacagagagaggcgagtggcaatggcgagctctggcagctgccactcgctcctctcttcagcctcaccaatctcgcctgcgctcttctcgcgacaccgagcggccgccgtcggtggaggagccagccgggcgagtaaagtgcaatcgcaggtcaggtgtcttgctagagatgaggattcgaaggggtgcgcaaacgtttccaaggccgagactaatgaagaaaaagaaactacgccttcatcaagacgaagatgtctggtctgtctcggcgctgttaccttgatcagcgcgacaggaccaccaaacggactcgctgcggatgcgatgaacaaggccggggtacagaaagctgtttgcaggaactgtaatggcagtggtgctgtgatatgcgacatgtgtggtggcacagggaaatggaaggccctcaatcggaagagggcgaaagatgtttatgaattcaccgagtgcccgaattgctacggccgcggaaagttggtgtgccctgtctgtctcggaactggcctgccaaacaacaaggggctcctgcgacgcccagaagccaagcagctgctcgacaagatgtataacggcaagatactgccgaggtcgtagagcactctttaccacgcccaggattttgttgagtcgtcgagtaggaatgacgctcggatcgatgtagccctagtagagtgtaaaattgctgttagccgttcaagaaagattttttacacatacatgtactgacccttttttttaccaaaaaaaaaaaaa

SEQ ID NO: 12162 - DNA, 1218 bp, Zea Mays
ctttaccaggccctttcaaatgtagcaaatgagaaggatttttctggattccatcactgggaggtcctacaacaattgcagctcggcaaagtggttctggaattacatggctcttcccatttgtggatggtcatcctccgctaggctggcatgacacgatatgctaccttgtattgcctgtgctacttgttgcttctcagtatgtatctatggagatcatgaagccacctcagagcgatgacccatcacagaagaacacaatgctcattttgaaatttcttccatttatgattggctggttctctttgtcagtgccatcaggattgtctatttactggtttacaaacaatgtcctcagcacagcccagcaggtgtggttacggaaaatgggaggagcgaagcctgtagtgactgagggaggtagtggaataattaccgcaggacgagcaaaacgctctaatgctcaacctgccggagagaggtttaggcagctaaaggaagaagagaacaggagaaaattcagcaaagcacttgctgcaggagattcagatgcgtcgtcatcgacatatgacatggatgatgaagagtcggatgagacgatagaagagggaggacctgtggaggaagcatctactagcagtgacaagaaacttccaaactactcagggaagaagggcaaaagatcgaagaggaagcgcatggtgcagtaatcgttgcagcataattggatgcgatttttgtcacaactggttaattcagctgaccagttaggtgccgtagtatcatggagacagttttggtgggggccttttggaggcataattgcataaatctgaggtgcagacaattagacagtttccggggacacaagtatttgctgctaagctatccaatgaactagctcagtcagtatatatgctttagacctgagggtaatggacaggagaacaggagtggggtaaatgcacaagcagagagacaggatctgtagaggtaggcgagagatactccggtgtactctgtacatggttctaaaaaattgggcagaaactggattgtccagaccgttcatatacgttgtactagccggttgttgtactagccagttgcgctacggttgttatatattatataaatagatattgagatatttattcaaatataactattgtttatttctaaacactacaagaagggtattatataattgattaattg

SEQ ID NO: 12163 - DNA, 1923 bp, Zea Mays
aacgacaacctccacctcgccttcaactcctccacgctcccgtcctctccacctctcgctcccacctcccccgccgtcaccaccaccaccacagcctctcccccgcaacgcgttccttcccggtgcatgaaaccctaaacctataccccactcccctccccgagccatcctctccccccgcggcgatggccaaggcgctgctctactcctccctcctccccgggctgccccgcgctgtcgggagcagccggagcgctgccgcgaggctgctgctgctcccgcctctccggctgcggcgctctacacgctcgccgacgcagcggtagccgcggcggacgccgccgcgggcgcgggggacgacgccggccaagctgcggcggcggtccagaagaacggcggctggttcggcttcatctccgaggccctcgaggtcgttctcaaggtgctcaaggatggtctctcagcagttcatgtgccgtactcctacggatttgccatcattcttcttactatcattgttaaggctgcgacattgcctttaaccaaaaagcaggtggaatcaactatggcaatgcagaatttacagccgcagcttaaagcaatccagcagagatatgcgggcaaccaggaaaggatacagctagagactgctcggttatacaggcaagctggtgtcaaccctttagcaggatgttttccaacattggcaacaatacctgtatggattggtctttaccaggcactttcaaatgtagcaaatgaggggctattgacagaaggatttttctggattccatcactgggtggtcctacaacaattgcagctcggcaaagtggtgctgggatttcgtggctcttcccatttgtggatggccatcctccgctaggctggtatgacacgatatgctaccttgtattgcctgtgctacttgttgcttctcaatatgtctctatggagatcatgaagccacctcagagtgatgacccgtcacagaagaacacactcctcgttttgaaatttcttccatttatgattggctatttctctttgtcagtgccatcaggattgtctatttattggttcacaaacaatgtcctcagcacagcacagcaggtttggttgcggaaaatgggaggagccaagcctgtagtgagtgagggggataggaggataattacagcaggacgagcaaaacgctctaatgctcaaccagctggagaaaggtttaggcagctaaaagaagaggagagcatgagaaaagtcaacaaagcactcgctgcaggagactcaaatgcatcgtcatcaacgtatgacatggaggatgaagagtcggatgacgagaccacagaagagggagggcccgtggaggaagcatccagtactggcagtgacaagaagcctccaagttactcagggaagaagggcaaaagatccaagaggaagcgcatggtgcagtgatcgtcacagctcaatcggatgcgattttcgccacaactggttgattcagttgaccagttaggtgccgcagtggatcacggagacagttttggcggtctgctggagccctatatttggggtgcagacaaaatgaacagcttccggggtcacaggtatttgctgctaagcttatgcaaatggaggtagctgagtatatatgctaggcctgagggtgagtgatggaccggagaacaggagtcgggtacgcgtgcaagcagagagacagggtctgtagaagtagataaggtgtaatctctcgtcaagctgggttccagaatctggattgtcctcaccattcgtatgcattgcattgtatttgctttcctcttgtaacctaatgaaccactgttttggagggtatgatcgcgcaagctgacaaccatccagtcgtatacaaatgagttcgaattcgtcttgtcagaaaa

SEQ ID NO: 12164 - DNA, 249 bp, Zea Mays
aatctcgatgcattgtaaatcttcttttttggtgtatgcttgggggagaggagagcacgggaggcttggatttggagatgataagagtagtcacatggtgcccctaaaggttgagcttctagctggagaggatattgttcaggtatcatgtggaggaacacattcagttgcgctagctcgagatggccgaatgttttctttctatcaagttttgccgcgcatatcaatggcgagtcccttttctgttgg

SEQ ID NO: 12165 - DNA, 1175 bp, Zea Mays
caggctaacgttatacaccatacaatacagattctgattgctcttcattaggctataaatggcaggaaggcaccgggcaccccgacaataccatgatgaacctcgaggataccgtgatggtccaccacctccacttccacgaccaagacctctctcaccgcgtcgcatggcagaggaactgtctaggcgccgtgctgagatccgtagaatccatgaggacaatcagcgtctggcggatgaaattgttagtctcaagcaaaccatgccgcgtttgcaagaagacctccgaatctcaagccaggctgttccaaagctccgggcagagaaagagctcgagtcgagggagctgactcagaggaacctgaagctggaagctgagctgcgtgccttagaacccctcaggcaagacgctctgcatctgcgatctgaagcaagtaaactgcagtctctgaggcaagagttggctgcgaaggttcaaggcctatcaaaagagcttgaacttcagaagtctgaaagccagaaaatgactgctttggtagctgaacgtgatgcgctgtgtcaagaactgctccaggctagaaggcgaagccagagctgactgcgcaggttcaggcaatggagaaggatcttgtggctatggctcaggaggcggagaagctgagggctgatatcgcgaagagaaacacacctactagtttcagcagccgtggaacgtatggagcctcgttgtcgactcctgggatgggtttgcaaggcatgtatgatggcggcggctattctatggctgggagccgctacggcagtggcactggggcttggagctcgcacgatccccatggctacccgcatctttaactgtgcttctgaccggtgttttctcctgaacagctccctgagtaccttggctaagtttcttgtagtagtataacttgtggtgcaccattgctacccttcctctggtcaatacacaacaatataccaactttggttgtcttggttgttttttcccctactgcacacggtgacgctgttgtgagcattagatgtttggccactcggccgttttgccgtggtgagttttggcttaattcattattaggtaacaggcctgtaagctgtatagtaagaataacacaagatcctctaggacctagccaatgcattgtagctacctc

SEQ ID NO: 12166 - DNA, 741 bp, Zea Mays
atatcggatttaaaatgtgcacaaaacctctgaggaagaaaaaaaaaaggtccctcgttcagttgttcctcaacctacctacgccgctccgcgctcgaccgcctttgcctgccttcccattccccccgtctcctcttcccttccgccatggcccagcccgctttcctctcctctctccgctcccgcctcggctccgcgccgccgcccccgccgaaccatcgcctccagcccaggcgcggctaccacgtcgagcttggggctcgcgaaaaagcgcttttggaggaggatgttgctttgaagaggttcaaatcatacaaaaacagtgtgaaacaggtctccaagatcgggaatgctctcactttagctgttgtacttgcttgcagctacgagcttgctgtgttggcgactagcacaaaatgaaggaaaactcagtcatgtggcggcacggttattccgggaagtgatccatcagcatgaactggcactctctctcttcgtgtttttttagccccgtttgttgatcactcgtaccgtgtaaaataaaataaactaggttaaccttgattggcaaataatgtctctgtttttatggcctagttgcaaacaaagtgagagaagcattccgtggtgaatcgtgaagaatgaacgccgcctgctttgtttaccacctgggagtgaccgggtggatttgtgttcgagcgccttctgccgtctcgtctgtcgcggacaggataccgtgta

SEQ ID NO: 12167 - DNA, 1418 bp, Zea Mays
ctttttcccgatcacaacggggatcttctgtcgcaacccctacaacgcgacgggcatctgcaaccggagctcctgcccgcttgccaacagccgctatgccaccatccgggatcatgaaggtattttctatctgtatatgaaaaccgccgaaagagctcatctgccaaacaaattatgggagagagtcaaactgccgaagaattatgagaaagcaatggaagtcataaacaaacatcttgaattttggcctaagctacttgtgcacaagatcaaacagcggctgacaaaaatgactcaatatcgtataagaatgaggaaacttcaactgaaagtgagggagaaggtcatgacaatgcccaggaagcaaacacagcgtgatctccggagaatggagaaagctgaaagggctgctcaactagaaaggaatattgaaaatgaattgaaggaacgcctgaacaaaggtgtttatgctgacatctataatgttcccttcaaagcgtttgatgaggttcttgatatggaaagagatgaagtggttcttgaagaagaggaggaagaagaaggtgaggtatatgttgaaggcgatgacatggaagagatggatgacatggaagactttgaaggcctcagtgatggaggcacagatgaagatgatgttttggatgatcccgtatcaaagaaacccaagggatcctcttcttattcgaagcaaaatgtcgggaaaaggtctaggaaggttatgactgaggtggaagaagacgaggagataaatacgaggcaaaggcaaagggcgtgagtgcgaaatgtgcaactgcaacgacggttatatgatgttagatgccggcaggcgccacttctgctgtatgttggatcattttatacttgccttcgtactgtaacgcggagtgctgagacgtcaattaattttggccgtggtttacatggcctaatatgttatgagcaagaaaaagaaacgggtgataactcagttgaggatgtgggagaccatctagttttcgaggtgaatttaggtatctatttttgtaagttacagattggtttagctttgttctttgttacgaggaaaaccagagtcatgcgtttactaacacattctgagttgtcattgaggatttgggatatcctaagatcctaggtgagtagcctaaaccgcatctttcgttgactgtatcaaggaggcaacagtagctacaaaatcacatcccggtttcgtttctaatgtcgagcactttctcatatctttaatactcctagttaatatggaggtatgctacattatagcctattgcactcatgggtgccaaatgttcgtgttggttgggatttctgcccgtgtgtcttggcgctactgtctggttgtgtttctgtgtgtctccctttttccttttcaaattgaa

SEQ ID NO: 12168 - DNA, 76 bp, Zea Mays
tccatcctctcctccaccaactgatgcctgagatcctccttgtcggcctccgcagccgccagcctcttcgccagcc

SEQ ID NO: 12169 - DNA, 1994 bp, Zea Mays
ctgctccgcgtggaaaacgctctagaccgcgaccgcgaccgcgaccaagagtccaagacttccccgtccgcccgctccgtcctcacaggtcacgagctcacggccaacgacacaactcacagtaacgttaccagccacgacacctatgaggctatgacccaacgtcccaaccaagaaccaactactctgccagcctacgcagtaacgcagcagcaatcccaacccaagccttcgctggcgcgcgggtccaccccgactcacgcctcccgttcccataccaccagttgcctcccctcctacaaataacccccgaccatccacgaggacgtaccttctgcagcaagtagtgaccaggagcgagcagccaaggaaaggagccaagcaatggagaaggccgtcgacaggcagcgggtcctgctgcggcacctcaaccccgccgcggcggggagccccgccccgcccgccatctccgcaagcgcgtgcgcggcgggggacagcgcggcgtaccaccggaggccggccttcgccgacgacgtcgtcatcgtcgctgcttacaggacggcaatttgcaaggccaagagagggggtttcaaggatacctttgctgaggacctcttggttcctgtcttcaaggctttggtagacaagacgaagctggacccaagtgaagttggcgacattgttgttggtactgtcttagctcctggttcccagagggcaatcgaatgcagaatggctgcactgtatgctggtttccctgacaccgttcctcttaagactgtaaacaggcagtgctcttctggccttcaggcagttgcagatgttgccactgctattaaagcagggctctatgacattggtattgctgctggtttggagtccatgacagtgaacaaagttagtcttgatggccaagcgaatcccaaagttgagctattttctcaagcacgtgattgtcttctcccaatgggcctcacatctgagaatgttgcacaccgttttggcataacacgactggagcaagatcaagctgctgttgagtcacatagaaaggctgctgccgcagcagctgctggtaaattcaaagaggaaattgtgccagttcatacaaagattgttgatccaaaaactggtgaggaaaagaagatcgtaatctctgcagatgatggaatccgagtggatacttctcttgcagtcctgtcaaaactcaaaccagcattttcaaaggatggcagcactactgctgggaatgcaagccaagtgagcgatggcgctggggccgtcttgctaatgagacgggatgttgctatgaaaaagggtcttccagttcttggtgtctttaggacctttgccgctgttggagttgatccagctgtaatgggtattggtcctgccgtagcaatccccgcagcagtgaaagctgctggccttcagatggatgatatcgatcttttcgaaatcaatgaggcttttgcatctcagtatgtctactgctgcaagaagttgaaacttgatcctgctaaagtcaatgttaatggcggtgcaatggcccttggacatccgttgggtgctacaggtgcacggtgcgtcagtactcttctcaatgagatgaagcgccgcggcaaggattgccggttcggagtgatttctatgtgcataggttctgggatgggtgctgctgctgtgttcgagcggggagacggcgttgatgagctcaccaatgctcggggaatctcgacccacaactggctttccaaggacgccatgtaaagctacacccaccaaaatttgccggaactggtagcattgtttccagatcgctgtagggagcgaattggggaataaaatgattttgtatttgtcgcccctgctggggatttaggaagatttttacgccactggtatttgaacttgcttacctggaaagatgcgtgaataactcaatagtctgctgcaaggatcatacgtgcacccgcttaattttaaaatcgaca

SEQ ID NO: 12170 - DNA, 622 bp, Zea Mays
gtgcgaccttgtgcctctttggcataggcttgtcgagctaggttcttgaccagagggtgcagtctctggaacgcgaactcgatgccgccatttctgcagcagctcgagctcgtacagataaacgacaggccgaagctgcgcaacgagctgcagagttacgcacacaggaggtcaccaaggaactggagaacactgcgagagtgtttcagctgcacatggaggagttgcggctgaagcaagaggagattgcgaagaaagatagcgatatcaaggtgttggaagcgataatacgaaccctcggtagcaaagatgatgatggatccagcgaataattgtcatgaacagggagcgaggcttttatgttcaaatatctcacggcgtgtttatgattatgtatttccttttggggtttaatccctttgttactcagatggatgtaacttgtttcgacaagattgagcgtgtccgcactcatactactataaatttgtattctaaaacaaatattttatcatcgttagcaagattatctactatataccataatcctctgtattcatatgtactctatatctcaccactataccaaatatcatatattatatatttttttttcacttca

SEQ ID NO: 12171 - DNA, 2024 bp, Zea Mays
tgtcactctgtttggggattagagttgtttctttcgtcctgttgtttgggtccagttcttgtttttgatttgtctcatcaacccaccagtcgggctgcaggcttagagctggaaggaataatttgactagagaaatggggcagtgttgcagcagagctacggccccggactctggacggggaggtgccaatggttatggctattctaaccaggcaaagccggcgcaagcacctccgagttacaaccctcctcagcaggcggccgaggtgaggtacacaccatcggcgacgaactcttcggcagtcccacccgtggctgtgccgccgaagccaacggcggacacgattcttggcaagcagtacgaggacgtgcgctctgtctactccctcgggaaggagcttggccggggccagttcggggtgacatacctctgcacagagattgcctctggtaggcagtacgcctgcaagtccatctccaagcgcaagctcgtcagcaaggcagacagggaggacattcgaagggagatccagatcatgcagcacctgtctgggcagccaaacattgttgagttccggggagcatacgaggacaagagcaatgtccatgtggtgatggagctctgcgcaggtggggagctcttcgatcgcatcattgcaaaggggcactacacagaacgtgcggctgctacaatctgcagagcagttgtgaatgttgtcaacatttgccacttcatgggtgtgatgcatcgtgatctgaaacccgagaacttcttgcttgcgaccaaggaggagaatgcaatgctcaaggccactgattttgggctttctgtcttcattgaagaaggaaagatgtacagggacattgttggaagtgcttactatgttgctcctgaagtccttagacggagctatggaaaagagatagatgtttggagtgcgggtgttattttgtacattcttctcagtggcgtgcctccattttgggctgaaactgaaaaggggatatttgatgctattctgcatgaggagattgactttgaaagtcaaccttggccatcaatttctgagagtgctaaagacttggtgagaaagatgttgacacgagatccaaagaaaagactgacttcagcccaagttcttcaacatcagtggctcagagaaggtggggaggcatctgataagcctatcgacagtgctgttctttctagaatgaagcaattcagagcaatgaataagctgaaaaagatggccctaaaggttattgcttcaaaccttaacgaggaagagatcaaggggctaaagcaaatgttcatgaacatggacacagacaatagtggcacaatcacatacgaagaactcaaagcaggattagccaaacttggatcaaagctgtcagaagctgaagtaaagcagttgatggaggctgctgatgttgatgggaatggatctattgactatgttgagttcatcactgccacaatgcatagacacaagctcgaaagggacgagcatttgttcaaggcattccagtactttgacaaagataacagcggcttcatcacaagggatgaactggaatctgctttgattgagcatgagatgggcgacacgagtacaataaaggagatcatatcagaagttgacacagataatgatgggaggattaactatgaggagttttgtgcaatgatgagaggagggatgcagcagccaatgaggctcaagtagcctgttcccttaatagaaacggtgtaccactagttactgttcacttttttttcttcatgtttggtacttggtagttggataaagcttacaatgggtgttgcttttgtattgttgagagatgattgtctatacctttttttcccttttgctcgtgtttgttgcattgtagtatcttgaacgtcccttcctttttttaagtttgtttatgcaagtacatctaataaaaagtgcattctgtcttactttgtactgttaaaatctagctttcagttaggtaattagtaagttaggtaa

SEQ ID NO: 12172 - DNA, 416 bp, Zea Mays
taaagcccagcccaagtatccagcctcacgaccgactccctcaattacctgcccgtcccaattgtttccgcaagtcgcccagaccagatttgccagaacgcaacctcggctccgaaaccctagccgcacgcagttgtccacttctactcccctcgcctcgccacacccgccgcgcggcacgatcagacgccatggccgccgagaactactggaggtacgctgatgcgcggcagcagcagcaggcgatggccgccgctgcgccgcctctcaagcgtgcgcgccccgacttcggtgatgtgtctggtgggcaagacatgacaggatattatccacgtgaaactgacaggtcaggataccattccctctgggaaaacgacacacttggggcatcttatgaccgttacttgcgcaatggg

SEQ ID NO: 12173 - DNA, 73 bp, Zea Mays
tgatgataaaatattttaatcacttctatagatgtatatatatatttacgataaagaaatgtttgagtaattg

SEQ ID NO: 12174 - DNA, 1533 bp, Zea Mays
cctccttccccgagatgagctgctctgggtggaagagctggacgcagctaacaactttgcccgtggccactacacggttgggaaggagattgtcgatctatgcctggaccgtgtgcgcaagcttgcagacaactgcactgggctgcagggattcttggtgttcaatgctgttggtggtggtactggctctggacttggttcactgctgttggagcgcctttcagttgattatggcaagaagtctaagcttggtttcaccatttatccttccccacaggtgtcaacagctgttgtagagccatacaacagtgtcctctcgacccactccttgctcgagcacactgatgttgcagtcctcctggacaacgaggctatctatgacatatgcaggaggtcccttgacatcgaaaggccaacctataccaacttgaacaggctgatctcacagatcatatcatcacttaccacctccctgaggtttgatggggctatcaatgtggatgttactgagttccagaccaaccttgttccatacccacgtattcatttcatgctttcctcatatgcccctgtaatatctgctgagaaggcctaccatgagcagctctctgtgcctgaaatcaccaatgctgtatttgagccctcaagcatgatggccaagtgtgacccaaggcacggaaagtacatggcttgctgcttgatgtaccgcggtgatgttgttcctaaggatgtcaacgctgcagttgcaaccatcaagaccaagagaactgtccagtttgtggactggtgccccactggattcaagtgtggcatcaactatcagccaccctctgttgtccctggaggtgacctggcaaaggtccagcgtgccgtgtgcatgatcagcaacaacaccgccgttgccgaggtgttctcacgcatcgaccacaagtttgaccttatgtacgccaagcgtgcattcgttcactggtatgtcggtgagggtatggaagagggtgagttctcagaagcccgtgaggacttggctgctcttgagaaggactatgaggaagtcggtgcagagggtgccgatgatgagggtgacgagggagacgactattgagtagctggctaataagtagttctctggtggttaatggttgggttattttgagtatatactctatggttccactccattggatactgctgctgtgtgtttccattttgtactatgtagtaaattgttcgtagccccctattggccatgattgttcatatcatccttctttggtttgcaacgctattcgtccaatttcggtgtatatgctataatgctattatgttgcaagtgtgctgtgctcaaccattgggttttatttatatttagaaacagaaggcattattactctgcgctgcagcttgtttctggatcatgggaacattgagatttgagaagttttgatagcagtctatcactgtgagggcctaaggaggcccacggaggggctgcggtagcagcagccatgggtcctccaaggaagaatagataag

SEQ ID NO: 12175 - DNA, 1263 bp, Zea Mays
aaaagttgtaagatattgactgttataattagtgcacgaccaaagcttcagaatggcacacttccaaatggagatgcttcgaattcgaagagcaagcttacttcaacacacgatgtattgagaggtttggttgattggctctgttcacagctgaggaatcctacacacccgagctgctctattcctacttctatccattgcctctccactttgctaagagaaccatatgttaggacattatttgttcaagctgatggcatcaagctgctcattcccttaatttccccagcttccacacaacagtcaattcagctcctttatgaaacttgcctctgcatctggcttttatccttttatgatgctgcagttgattatttgtccaccacaagggttatgccaagacttgtagaggttgtcaagggctctactaaagagaaggtggtcagagttgttgtgttgtccttccgcaatttgctggcaaagggtgcatttgctgcccagatgatcgatcttggattgccacaaatggtacaaaacttgaaagctcaagcatggactgatgagatgctctgaatcaactagaggtgggactcaaagaaaacctcaagaagttgagttcctttgataagtacaaacagcaagttcttcttggtcatctggactggtctccaatgcacaaagatccaagtttctggcgtgagaacattaacaattttgaagaaaatgatttccagattctgcgagttctcatgacaatcattgacacatcaagtgacaccaccgctcttgccgtggcctgctacgacctctcacaattccttcagtaccatccatctggccgaatcgtggtggcagacctcaaggctaaggaccgagtcatgaaactcatgaatcatgagaacactgaagtgaggaaaaatgcattgatctgtgtgcagaggctcttccttggcgcaaagtatgccagtttcctgcaggcttgagaaaagctgagtcttgtatttagatccagagaacccctggtcatttttcagaatggctgttgagaaagaaaaaccttgaaaattcttgttcagtgtatcctattgttatttgatttctgaagccgatgtataataaataatcagagtcatagaatgctcgatgtaataaagtgtccatgggcttgttgattcatttatgtaaattttgacttgtaacattagcaaacctcttttttgttattcttctgcctgacaacattgcctgattcgtgtgcattac

SEQ ID NO: 12176 - DNA, 87 bp, Zea Mays
taaaaacacaaggaaggggttgcatgcaccggggcttgcctggaagaacactaggttagtgttgttagacgtcgatcacttgacgac

SEQ ID NO: 12177 - DNA, 689 bp, Zea Mays
gaaaactcttgtgaatacacaagacgctaacaggtattcgaagaatggaaatctatgcgcagggatgagctgactcggttccaaaagcaagttgaggagcaatatctctcaaatgtggagaggcagctggagaggatccagaatgcccggaacgctcgaaaggcgaacgggcatgctaacatgcaagaaatggacaaggagctggacacacacagggcggagcatggtccgaagactcggcgagttcctgaggagggcggtaatgatgacgacgaagacgcagaggacatggctgcggaagacgaggtgatggatgaagttctgggcatcaacgatgggatcaacgaggacccatccaagccgtccgaagaagctactactgaaggtggtgagcctgcacccgaggaagcacaataggattctttgttcacacaagctaggcacatagccgtacgtaccattccgtatgcttagttgccgtattgttgggaactgtttgtgcgtgtatttctgttagacgttccccgctggtttaggctgtgttttatattgctgttttgtctttttgaatgttgagaccatacaactgtcgatcattatctcataattgttgtaaaaatactataattgataccttgatttggacgtcggtggcgttaaacgtttcgggttctgttcttcactacccg

SEQ ID NO: 12178 - DNA, 600 bp, Zea Mays
agaagcaccatttctgccgcgtgagaggctcttcaagcagcaacattacttccagaacttgaccaagcacacctacctgaaagggcgctacgacgtgatcacatctgtcgccatcccccttgcactcgctgcctccagcatgttcatgattgggcgtggagtttataacatgtctcatggggttgggaagaaagagtgatcttccactggttaactattgtttctgcttgtcatggaagtcataccgtcgagactgcgaagtcctcttcgcttgcaaaataatacggccaaataacaattcgactacattttcgcatcaattttctgtttgtatttgtgggtgtgaagtggcagtaacttgaaaatcagcactgtcactgttttggttagttactccattcctttcgtcttttgtgtcccctttcaatagaagcaagctggccttgtacttcctccattcttttttttagttgtcacggtttagttcaaaaaaatgaactagcgggcgacaattatttagttcaaaaatgctctgttcatcaacatgcacgtaacgtaaggggtctgtggtgcacaaaactgtcaaaacaggcggaaatt

SEQ ID NO: 12179 - DNA, 1204 bp, Zea Mays
gaacggcaccgccgcggtgctcgtggacgccgccccggccggctgctgcacccccgcctcgccggcctcagcgtccatctccgaccaggacgagagcactgcagcacagcagggcggcgggtccgcacacgcgatggcgcgaagacgacggggtttccttccctcctcgagctcgaggtcgaggaccgaccgagaggctcggacggcgcggcgccgtgcgcaggggcagggctcgtcacgggcgcgctggtacttgctcagatggtgccgtgtcagaatacgcgcacaagtcagggggcaatctgcaaaccagacatccgatgctgcgtgagtggacgagagggctccggctcacatctgctgcgcccgccgcagcaagacgcgccggaggaggccaagcaagcagctctagtcttcgtcgcgtggttccacccacccccacacgcatcacccaccgcgcgccgcctcgtgcgtgcctctcaattccgtctcgttctgcagcggctctcgccggtggcctgcagcagcagcagccatgatgatggcgtgtgccctcgccgtcgcccagccagcagcatctctcgcgccgccatccggcaagaggaccctctccggcggccgccccccgcggctgccacctcccaggctttcaggtaaacttgccttggccacaccgtgctgcgcgcgtggtgcaggcaagctaataaggagccgcgctgtcgttgccaaggctgcgcaggacgggtcggaatcgtccgggaccgggagcatagtgaaatacgtcacgagctctttcagcaccgcggaagacattttcgccctagctggtataggctttgccgcagtagctgcattatgggcttcggtcaacctcattgagatcatcgacaagctcccggtccttcctcttctctttgaactagtcgggatattggttgcatggcttttcatctacaacaatctcctcttcaagccaaaaaggaaagaatttctagagaacatcaaaagctcaggatctcgaatcctggggcagtaacctttgtaggcgacagttgacagcaaccactctgtcatgggttctctgcaagcatgccgaatgtaattatgcaatgtaactgtatgcgagctatgggtgttaacattttttattgtataagcatcaccaattttctgtacaggttagtgtgattaaaatcaaaaaaaa

SEQ ID NO: 12180 - DNA, 1565 bp, Zea Mays
gcgggaagcagctgtggcctcggtcatcccatccaacgggcgaaaatgagagagatcttgcacatccagggagggcaatgtggcaaccagatcggtgccaagttctgggaggtcgtgtgtgacgaacacggcattgacactacaggtcggtacactggcacttctgaccttcagttggagcgcgtcaatgtctactacaatgaggcctcctgtggccgctttgtgccccgtgctgttctcatggacctagagcctgggacaatggacagtgtccgcactggaccctatgggcagatcttccgccctgacaactttgtgtttgggcaatctggtgctggcaacaactgggcgaaggggcattatactgagggcgctgagctcattgactctgttctcgatgttgtgaggaaggaagccgagaactgtgactgcttgcaaggattccaagtatgccactcccttggtggcggtactggatctggtatgggtacgctgttgatctcaaagatcagggaggagtaccctgaccgcatgatgctgacattctcagttttcccctcaccgaaagtatctgatactgtggttgagccatacaacgccactctttctgtccaccagttggttgagaacgctgatgagtgtatggttcttgacaacgaggccctctacgacatttgcttcaggactcttaagttgaccacccctagctttggtgatttgaaccatttgatctctgcaaccatgagtggagtcacctgctgcctaaggttccctggtcagctgaactccgacctcaggaagctggcagtgaacctaatccccttcccccgcctccacttcttcatggttggcttcgcgccgctgacgtcccgtggctcccagcagtaccgagcactcaccgtccccgagctcacgcagcagatgtgggacgccaagaacatgatgtgcgccgctgaccctcgccacgggcgttacctcaccgcctcggccatgttccgcgggaagatgagcaccaaggaggtcgacgagcagatgatcaacgtgcagaacaagaactcgtcctacttcgtggagtggatccccaacaacgtgaagtccagcgtgtgtgacatcccgccgaggggcctgtccatggcgtccaccttcgtcggcaactcaacttccatccaggagatgttccggagggtgagcgagcagttcactgccatgttcaggaggaaggctttcttgcactggtacacgggcgagggcatggacgagatggagttcaccgaggccgagagcaatatgaatgacctcgtgtcggagtaccagcagtaccaggatgcgactgctgatgacgatgaggaggccgagtatgaggacgaggaggagccagctgatggcatgtgaggggaggctgttaaatgtgaagcctggtgatgtcccctttcgtgttgtcgccatgttatactagtacactagcataccaccctcgtggcccattccgtcgatcgtggctgttgatgcttgtgtttccttgttctatagaaccttgcttttgtcaaaaaaaattattaaaaaaa

SEQ ID NO: 12181 - DNA, 2607 bp, Zea Mays
acgaactggcgtgccagtgccagtgccgagcgcccgagcccttactcctcttcttccgaccccccgctggcttggaaaaaaggggaagaaaactcgcgcagtcggtcaccgaagggaggagcgcggtcgaggtgccgcccacacggagctgcgagtacccaggcagaagtactgtgaatcaacacaccagacaaggaggaggaaaactcgaactgtgatggtggggaatgtgccacttggcagtgatcatcccataaggattcaaaccatgacgacttcagataccaaggatgttgcaaaaacagtagaggaggtgatgaggatagcagataaaggagctgatcttgttagaataacagtccagggtaggaaggaagctgatgcctgctttgagatcaagaacactctggttcagaagaattacaacattccactagtggccgatattcattttgctcctacggtagccctaagggtggcagaatgttttgacaaaattcgtgtgaacccaggaaattttgctgatcgtcgtgctcaatttgaaaagctggaatatactgacgacgactaccaaaaagagctagagcatattgagaaggtgttttctccattagttgagaaatgcaagcagtatggaagagcaatgcgaataggaacaaatcatggtagtctttctgaccgcataatgagctactatggtgattctccacggggaatggttgagtctgctttggaatttgctagaatatgtcggaagttggacttccacaactttgtattttcgatgaaagctagtaaccctgttatcatggtccaagcatatcgcctgcttgtggcagaaatgtataacctaggatgggattatcccttgcacttgggtgttacagaagctggagagggtgaagatggaaggatgaaatctgctattggcattgggacactgctaatggatggtttgggtgatacaatccgtgtctccctcacagaaccaccagaagaagagattgatccttgccaaaggttggcaaatcttgggacgcaggccgcaaaccttcaaattggggtggccccatttgaagaaaagcacaggcgttattttgatttccagcgtaggagtggtcaattgcctttgcagaaggagggtgaggaagttgactacagaaatgtcctgcatcgtgatggttctgtactgatgtcagtttccctggatcagttgaaggctcctgatctcctttataggtctcttgcagcaaagcttgtggttggcatgcctttcaaggatctggctactgtagattccattcttttgagggagctcccccctgtagaagatgctgaagctaggcttgcactcaaaagattagttgacatcagcatgggcgtactggcccccttatcggagcagttgacaaagccactcccacatgcaattgtacttgtcaacctcgacgaattgtcaagtggtgcacacaaacttttgccagaaggcactagactagctgtcactcttcgtggtgatgaatcatacgagcagctagatattcttaaggatgttgatgatataacaatgttgttacataatgttccatatggtgaggagaagacaggcagggtgcatgctgctaggaggttatttgagtacttacaggccaatggcttgaacttccctgtaattcatcacataaatttccctgaaaccattgacagagatggtcttgtcattggtgctggggccaacgttggtgctctcttagtcgatggtcttggtgatggtgtattccttgaagctgctgaccaggaatttgagtttctgagggacacatctttcaacttgctccaaggttgcaggatgcgcaacacaaaaactgaatatgtgtcttgtccttcctgcggccgaacactctttgaccttcaggaaatcagcgctgagattagagaaaagacctctcatctgccaggtgtctcgatcgctatcatgggctgtattgtcaatggaccaggagagatggctgatgccgattttgggtacgttggaggcgctcccggaaagatcgacctttacgtcggcaagaccgttgtgcagcgcgccatcgccatggaaggtgccactgacgccttgatccagctgatcaaggaccatggccgatgggtggatcctcctgccgaggagtagggctgtaggctgtagccaagtctgtagtttatatattctgtaaagcgaaacacgcaatgcagtaactgagcatacgatgtacatccctacacattttgtacatttattgagatctgagaaataaactagaaaccgtcggtgacggcatgtctgcagcaccccaaatgaagcacatacgatttacatattagtagtagcccatgtgagcaagacataatcctatacaatcttgaagtctgcattatatattttttccaacagaggtagcttagaaagtttttcgagcaatgcaattttgttcgttactttccgtttactttttcttttttttagcgttgagggttatataaatagatttataatacaaagagaaaaacggtcgtgattacacaacaccaaaatttttattgtggtcttgagagtttgtgatgatc

SEQ ID NO: 12182 - DNA, 1348 bp, Zea Mays
tcctccgaggaatcaagcttgaattcgttcggagagcagacagaactcattcctattgaccacggaaggagggcggaatgcctagaagacccctacttcgagtggatccactggccgcagtcgtctgttcccttctccgtcgaggagctcgaatacattgcaaaacttgaccctataaaggacgcagagatgctacgcgtggagctacctatgatacgggaggcgtgtctcagggtgctggtgctgtcgacagtgtttctcaaggaagctgcagcgttcggcctctgcctgtctgagataggagacatgatgagcaggcagttcacagcaaaggaagaggaaccaagccagctcgagcttctctgcatggagacgaggaagtgggtcgaggaaagagagttatttcttcccgacgaagccggagttgaagacggcgatgatgacttcacccagttccctctcgacagcgacgccttcgaaccgccagctttctgcaagtttggcagcgtgaagacaagttccaggaatccactatccaagctggacgagtgtgacgaggaagacggagacttgtcggaagaggagggcgagcacggtgacgtcctgaccagtggtgcattgccccagaaggttcctcccatctccaagctgtcgtcgtccatgaaggggcttggcttcatcgggaaatcgaaaccctaccgtacaggtggcgtccccaagggtaaggtgacaggtagaactaactacagtggcaaagccagcgagcatcagtccgggagccggagcgccaacgagctgctcccgcccagcgcgagtttcgtgaagctgtcggacatgagccgcaaggagtggagcgcgttcctcgagaagttccaggagctgctcccgagcgccctccgcacccggaagcacagcgccggcgtcggccagcgcccgatgccgaggctgggcacgtgcagcagtcagcaggtattattataacaaaaaagcttgtaggtgtatggagccagtagaagaggttgtctgagaataagatcgtcgatggcacagatgagatgagcttggattgcaggagagtggtgtgtttgtgcatagtgttttgacatatgagatgcgttgttcttttctttttttttctttttcttttttgtatatagtgagtactcctgccgcctcgcaacaccgggctcgatctcggccgttacctgatggttggtggtgagtgtgcttggcatcgcctgtgttctgtctttgccgctgtaccattttggagacgcttaccataatatgaacagctgtgatatgatatcgctacagatatatgcataaataacacctgatagtctgc

SEQ ID NO: 12183 - DNA, 76 bp, Zea Mays
atagccagttaccccagccagggaaacgcccgctcctcttaaggagctgacctcaagagattgcacagaagtggcg

SEQ ID NO: 12184 - DNA, 70 bp, Zea Mays
cgccgctaccactcaggtggtcagcgccacgatcatggttgagagacgagaagaagggcatgcattgccc

SEQ ID NO: 12185 - DNA, 925 bp, Zea Mays
ctattctgggcgatttccacgtcgccaaaggcagcagccgtggctgtagactgtagcacgaaagagaaatctgtaacccagcagccagcgagtcaggcaatggcggccgtcgtggcgctggcaccggcctctccagctctcctccctgtccccttccgcggccgccgcgacggccgggtggccctctcgcctcgccgaacccgctgctccgcggggcgctgcagagccacggcccagaccttccaggggggcgccgccgccagctacgcccgcgagatggagcgcctctccgccaaggagtcattgctcctcgcctttaaagatgctgggggtttcgaggccttagtcagcgggaagaccactgagatgcagaggatcgatgtcaatgagcgaatcgttggacttgaacgcctgaatcccacaccgcgccccacaacatcgccgtttctggagggtcgatggaactttgaatggtttggtgatagtagtcctggagcatttgcagcccgtcttttgtttgagaggtcacctacggctgttgcacactttatgggacttgatgtgctgatcaaggatggatactccaagctctcatcaaacctcaagtttgtaaacacgatacaaagcaagtttttactgactactcaattgtctgttgagggccccatcaggatgaaagaggaatatgttgagggccttatagagattcccagaatcaatgaagaatcattgcctgaacagttaaagggcttgcttggccaaactgcaggagctctacaacaacttcctagccctataagggatgctgtttcagaggggcttaaattgccacttagtggatcatttcaacgcttattcatgatctcttacttggatgaagaaatattgctcattgagttgaagcctgatgaccaactaaaccaga

SEQ ID NO: 12186 - DNA, 825 bp, Zea Mays
gattcataatactttggagatcaattgcaatatttcaaacaaagtaatgcttggtatgccgtcacaaaagccttttgcattgcctttgtcatgaccttcttctctgtattcgacgttcctgtcttttggccaatacttctctgttattggattgtgctttttgtcctgacaatgaagcgacaaattgtgcatatgatcaagtacaagtatgtcccattcagcataggaaagcagaggtatggcggaaagaaaggccctgccgccagtgcatctaaggagtaaagacggagggagggtgtgggacctcgagagcagtgcatgtgctatctttgaggcatcctgctggcatggtggtattttgagtaccagggctactgatagtgaacgcacaccatattcgctagtggagagtggagattgcagagaagctgaccagacttttgcattggttgatgatttctgttttacgtgtcggtagtttatgtacaatggcatggagcatagctagtagatcaaatttccggatcctctgttgtactgtccctttgtggacaagttgtggacctgttggatccttgcaaacgcattgtgatccaggacctagaggacaaaatcaaactgtccagcgattgttacttggaccttccaacattgactgcatactagtaccagcgattcgtagctgctactgcctttctcatggttaccggcgaacgtttcagccattgtttatttgcatctagcaggcagttgtaagggagttattcgctattatattactcgtttgaagtggcttcttcgtaatagtattaacaactaaggcta

SEQ ID NO: 12187 - DNA, 1044 bp, Zea Mays
cttggtggttacatgacccaaatttattttcaaccctgaatggatttagattattgctcttcgaagagcaaagaggagaaatatggagaggcttgtgctagcatgtggtggtgaagctgtcaattcagttgatgagttgactgaagattgtctaggctgggctggtcttgtctatgagcatgttcttggagaagaaaagtacacatttgtggagaatgtgaaaaatcctcgctcttgtactatactgattaaaggacctaatgaccataccattgcacaaatcaaggatgctgtccgtgatggtctaagatctgttaagaacacagttgaggatgaagcagttgtgctgggtgctggtgcttttgaggttgctgcaaagaagcatcttatcgacaatgtgaagaaaaccgtcaaaggacgagcacaacttggggtggaggcgtttgcggaagctcttcttgttatacccaagactttggctgagaactctggtttagatactcaagatgtgattgtttctctccagaatgagcatgaccgtggattagttgtggggttgaaccatcactctggggatccgattgatccccagatggaaggcatcttcgacaactactctgtgaagcgccagatcatcaattctggttgctgcttgtggatgaagtgatcagggcaggccgcaacatgaggaaaccgacttagatttttgtcgccacctagccgagacttatttgttctaccttttgttttggttttgtgcctagtagtgatctggatgatacgtttgacttgagttggtcccatttcacgaagcaggtcgcattcgctttttttttttgggattactgcgtgcttccattttaacatgggattttagttttatcgatggttttaacatcctcctatgaggaaacaaagcctctagagagacgaggttgccttcccgaagttagtgccaccaaacttgctgcatggaacatgaagaagcaatgtttataacaatgttattatcaagtaatccgatgtgatggataaaatattggt

SEQ ID NO: 12188 - DNA, 2391 bp, Zea Mays
aaacacgaggacctcgcgacgcgactccacccacacgcacagctccatgcctgcccacgcggacgcctgagcatcagaccagaggagagctatatctactccgctcgccaccaccaccaccccagtccagcccagcccaccacacccagctctctcccttctccaccagacacagccaggccgcctctccctcctcccttcgcttgcgtctcactactcatcactgctactgctacttcgttcgagagggatacggataccccattgccggcccactgcgcgagagagattttggtgcgactacagagtcccaatcctataccccggccccaaaactcttctctgctaccagtaaccgttccttccgccggaatcgattttgtgagggggcgagttccgccaccgtgggcgtatcaatatcggcgaacgctcgagttctcgcggcgaaaaacaacgcgttctgcgaggattccgtggtgaaagaccgggtccttttttctgcggattccagctgccaaacagagatgtcggctctcctcgacctactgatggggatcttccgccagcagaccctcggcggcgccgccctggagctggccgcgctggcggcgcccctctggcttgccgcgctcgttggcctcctcatcgggtgggcgtggcgcccgaggtgggcgggggtcgtcgtcggcgaccacaacgcccagcaggcggcgcagctccctccgccgcccgccgctgccgcggtggtccctcgcaacgaggcgcccgccgtcgtaacgagaactgtggtggctcctgcggcgcccgaggacgagcagctggcggtgaacacccgtgacttgatgcacctctggcggctcgtccaggagaaggacggtggcccgtcgtggatccacatgatggaccgcaccttgccgaccatgaggtaccaagcctggcggagagacccaccgaatggtccaccacagtaccgcagtagcactatctttgaggatgcatcaccagaggttgtgagagatttcttctgggacgacgagttccgggtgaagaacagctgggatgacatgcttcttcagtacgagacactggaacagtgcgccaagactggaaccatggttgtccggtgggtcaggaagttcccgttcttctgcagcgacagggagtacatcataggccgcaggatatgggcatctgggaagacgttttactgtgtgaccaagggcgtgcctcgtccctctgttccaagacaaaacaaacctcgtcgtgtggacttgtactactcgagctggtgcatccgtccagttgaatcaagaaaaggcgacggtgcaatgactgcatgtgaggtgctcttattccaccatgaagatatggggatcccatgggagattgcgaagctcggtgtccggcaggggatgtggggctgcgtcaagaggatagagcctggccttcgggcataccaggttgcgaggactgctggagagcctatctcaaaacatgccgccatggcgcatgttaccaccaggttcgatgccgacgagctcgtcacggaagacagcgcggaggccagttcatccagtgacaacaacaagaccgccgaggttgagaagccaaagcactggacaaacaacatacccaaggttctcatgatcggcggcgccgtcgccctggcttgcaccttcgacggtggattgatgaccaaggccgccatattcggcacggcgaggaggtttgcagggccaggaaggcggtaggtggatggagctggtcaccctagagcaatgccatgctaatcatgtgtagcaaagcgttggttggatggatgcctggaagtgccctaagcagtcctttttgtagcaatgcactgcagaggacagaatgccttgtctagttgctcagtctagacatcatcctcatgttgcagataaggtggtgtgctcttattacagatcagtatcagttgagaaaaatagatccctgcacatcccgagaaaggaaatggacgacaaagatccagcgacacagagaagtgtacgtaagcagaccgggcatgcttgtgctgctgctgcagccgcgccgccgggttagagccagctggataggttagaaatgtagcattattatgaggacaaagtgtacgatgaacaaggttcattctggcagctgtacgacgaacaaggttcattgtcgttagatgaaacgacaagaattcactgctgtttagtaacaagaattcttggtcttgtagctctggcatctatttgttctcccctatggaaactagatgttgacctttttggcagttggtgcaggatttttgcacgtacaagtttttacccaatgctgtgtccaatccagctacgctgtgtgtttggaataagaaattttttctct

SEQ ID NO: 12189 - DNA, 1880 bp, Zea Mays
cctcgctttcgaaccgattcgtatgggcgcagctggttccagtgttctttggtggtggccttgctttgcccgaaaaggttggcatttcgagtgctgagacatcggcttcattgaatcctaaagcacggttgagccatggctggctcccttgctgcctcagccttcttccctggcccaggggcgtctccagcagcatccgcgaagaacttggctggtgaagtaccggatagtttgagcgtccgtggtattgtcgcaaagcctaatgccaattctgggaacatgcaagtgaaggctcaagcacaaacccttcccaaggttaatggcaccaaggttaacctcaagaatgcaagctcagacacagaggaggcgataccctacactgctcccaagacattctacaaccaactgccagattggagcatgcttcttgcggctgtcactaccatcttcctggcagcagagaagcagtggacactgcttgactggaagccgaagaaacccgacatgcttgttgatacatttggttttggtgggatcatccaggatgggatggtgtttaggcaaaacttcattattcggtcctatgagattggtgccgatcgtactgcttctatagagacattaatgaatcacttacaggaaacagctcttaaccatgtgaagacagctggccttcttggagatggttttggcgccacgccagagatgagcaaacgaaacttgatctgggttgtcagcaaaattcagcttcttgttgagaagtaccccttgtgggaagacacggttcaagtggacacgtgggtagctgccgctgggaaaaatggcatgcgtcgagactggcatgtcctcgactgcaagtctggatgtacgatcttgagagctacaagtgtttgggtgatgatgaataagaacactagaaggctttcaaaaatgccggacgaagtaagggctgagataggcccgtatttcaacgcccgcgcagccataacagatgagcagagcgagaaactggctaagccagggagcactgctggtggcgatgctatgaagcagttcatgagaaaggggctcactcctaggtggtggggtgaccttgatgtcaaccagcacgtgaataacgtcaagtacatcggttggattcttgagagtgctccgatcgcgatcctggagaagcacgagctcgcaagcatgacgctggattacaggaaggagtgcggacgcgacagcgtgctgcagtcgctcaccaccgtcgcgggtgaatgcgtagacggcgacacagactccaccatccagtgcgaccacctgctccagctggaaacaggagccgatattgtgaaggcgcacacggagtggcgcccgaagcgggcgcatggtgaggggacccccatggggggtttcccggcggagagcgcgtgaatccatatttggcagggtgagggggacggctgtgaagcacagatcctatgtttatgggtacactaacgcccaactgagttgagtgtgttttggttggttggttggtcgcgacaagtatggcaggcacatgggggagcgccgcattacccacacccaacctggggatttggccaagacaaaagcccagcggtatgaggatcgaggaagcagaccagagttgttgcggagcgagaggactggggatcagtgtgtgttgtgggttgctgggcaaggatacatgcagggggagctgatggttttgcaggggatgatgttgtgtagctggttggttggttggggtgtgtagaaggcattcattcccctttgtaacagcctaatctgtacattcttaccatcatctttgtcttgttgattgatcgagtcgcagacctcctgcgtttatttgcattcctcctggtggtgcc

SEQ ID NO: 12190 - DNA, 76 bp, Zea Mays
cgacaacacacaacatgagggccatgactttgattctcatttaatttagcgttattagtgatgagatcgatgagtc

SEQ ID NO: 12191 - DNA, 89 bp, Zea Mays
accaatgggtcacttaaggcaactgcagggaacaacctcatagatgtggcttgtatttcctcccttttctggtaacaaatggttgttag

SEQ ID NO: 12192 - DNA, 830 bp, Zea Mays
agcgagagtagcggccgtggatgattctgccttttcttctccttccctcacctgctctctctctctctctctctctctctctccctttctttcccgcggcgacggtgacgacgaccgcgcgagcgccgccgactccctactgcatcaggtgcctcggccttcgtcgtgctctccgccggcaacgagtatagacgggcgcgcatggccaccttcgagctgtaccggaggtccaccatcggcatgtgcctcaccgagacgctcgacgagatggtctccaacggcaccctcagcccggagctcgctatccaggtcctcgtccagttcgacaagtccatgacggatgctctggagaaccaagtgaagagcaaggttactgtcaagggtcacctgcacacctacaggttctgtgacaatgtgtggaccttcatcttgacagacgcaagcttcaagaacgaggaggccacggagcaggtgggcaaggtgaagattgtggcatgtgattccaaattgctcggacaataggcctgtgtaccctcgaggtcaaggaaggaagcttttaagtgcggcgaggcggggtctgtctgcgcgtcagctgtacacgcctaggctaccgcgaggcggggtctgtctgcgtcagctgtacacgcctaggctaccgcccgaacggcatttcatttgccttcttcgtactgtatgtgtatcttcttttttccccttgtatacaatctgctgcagctataccggccaagagtatggcatggtatggcggcaggcagccgcaaacttgtttttacctacttggtgtagcgcctgtgtaacaaaaaaatata

SEQ ID NO: 12193 - DNA, 64 bp, Zea Mays
ggaaaggggccaccgcgagatcgaccgcgaccgcggtcaggacgaccacgagaatgcgaggaac

SEQ ID NO: 12194 - DNA, 1422 bp, Zea Mays
cacgagaattccatcgccgcggtattaaaaagtccctcccacgccgccgccacctaaacctcctcactcctcagactcctctccgcacataccctccctacctcgccgtcgccgtcgcatctgccatgggggcgtacaagtacgtctcggagttatggagaaggaagcaatccgacgtgatgcggttcgttcaacgcgtgcgctgttgggagtacaggcagcagccggccatcgtccgcctcacaaggcccacccgccccgacaaggcccgccgcctcggcttcaaggccaagcaggggtatgttgtttaccgcgtccgtgtgaggcgtggtggcaggaagaggcctgtgccgaagggtattgtctatggcaagcccaagcaccagggtatcacccagctcaagttccagaggaacaagagatctgttgctgaggaacgggctggacgaaagcttggtggactcagggttctcaactcctactgggtgaatgaggatagcacctacaagtactttgagatcatcctggttgatgtggcccacactgccatccgcaacgacccaagaatcaactggctatgcaatcctgtgcacaagcatcgtgagctccgtggtctcacctctgcaggcaagaagttccgtggcctgcgtggcaagggccacactcaccacaagaacaggccgtcgaggagggccacctggaagcgcaaccagaccctgtccctccagggctggacgaaagcttggtggactcagggttctcaactcctactgggtgaatgaggatagcacctacaagtacttcgagatcatcctggttgatgtggctcacaccgccatccgcaacgacccaagaatcaactggctatgcaatcctgtgcacaagcaccgtgagctccgtggtctcacctctgcaggcaagaagttccgtggtctgcgtggcaagggccacactcaccacaagaacaggccgtccaggagggccacctggaagcgcaaccagaccctttccctccgccgctaccgttgagcacacacatcttgatgctctgctactgtggaacccgccccatgcaggctctctgatagtatttggtatatttgtttcattgttaaattttgctacatgtgttacttttgagccccttgaactccgttgtctgtaccatggagcaagtgacgcgtacgagtcgatgaaaatgattgtttagtagtgcattgctgtgtattctgtctggcacgattgatttagggcatgtttgggaacacttctttcaaaaccacggtttatattaccatagtttaccgtatgttatgacatgaacatattgtattttacatcattctaattcaacatctgtttggagccgggaggagaaaggccaagacaaggaaggagaaaggggctagactgcgcctgcgg

SEQ ID NO: 12195 - DNA, 1353 bp, Zea Mays
gttgacgatggtcaattgtgcgttagcaaggattcataggcacaaccagctacaaggatggactcggcaaaagatattccattttatgattggtctatcaaacatagtattcctagtatatttcgtgtctaccatcattgctacttgtcagagatggatttgctgggtacatggatgtggatttgttctcatggctagtccacagatattgcttcttgcttctttcctcttgctactgtcattctgggttgacctgtgtcatcagacaaatgatgaagacgaagaagatggaaggagtcagagtcaccatgaagctttactagacagaacaaaagcgaaacctggcattcatcctgttaatatccgtcagaggtgttgcccaggaatacagcttggaagccggcaaaaatttgtgattttggtgcttctactgtcatttgttgttatgcttgcctttgccatcctcatatgggttggtagaggagacaatcctatcgattcttctctactgaaaagggtttatttggatgtattttcagtagtagttattgtacttggtggtgctctggcatgttacggtgcagtgttattctcgaagatgagcaaagttcgttctgaaactgtatcaactgagaagtggaaggttgccagtttagctgctgtctcgctgatctgtttctcgtcttctgctatacttgcacttgtgactaatgttccagtgcttttgtattggtactcaacagatgtggacatcatcaacaatgctgttattttgtttatatattacttcataggctcgtcagtgccatcaggatttgttctatggatcatgagagagatgcctcatcggcaggtagttgaaagatccgtagaatcgagggtggttactttgttcagggaaagaccatcaactacgcaggatccacagtggaggacagctgtcacatcctcaaacaaggccctcaagtcaagcccaatttaacctgaagacaaaccatcgacagtgatacctcacgttctgcttaatgtgctgggactaataccaacacgtcagggtcacaactggcgtctgctggcattgcgctaactgatgcatttagaactgaaggttggggccatatttgaagaattaacaaaatgtaaatagctttggcagttactttacccttttagatgtaacaaactcatcccgttggttacatgtaccttgttttatttagcgcttcatctaatttaccgtagaaggcatgtgttcaaccgatctttgggctgtttggttcttttagtcacttctaaattttaggtactaaactttagttcctagaaattctatttaaaaactctattttagtc

SEQ ID NO: 12196 - DNA, 69 bp, Zea Mays
caaaaagaccaagaaagggttcaacaaagagagcaaaagacaacccaaaggcaccctggtctggcgcac

SEQ ID NO: 12197 - DNA, 727 bp, Zea Mays
aggcaggattgccgcagctgccatcgaacgcgaagaacaagctcgctggaagaccttccgagcaagctgaagggcatggtgcgcaacgcgaagaaagccgaggcggagatcgccgctctgaagatatcctacctcaagaagatcggaaagggctccaacgtcatcatcatggactcgtacagcgacgtcgccaagactgtggcgaagacgctggacagcgtggggttcaagaactgctgggtcatggccggcggcttctctggccggaaagggtgggcgcagagccgtctcggaacggattcctacaacctatccgtggtcgaagtcgtcacgccgtcacgtgtgatccctgctgtcgcaggccgccgcactgggacgaccgctgcacgcattgggacggcctcgtcggcgtccagagcgactactcgcaagcttcttcccggcggcgtagactgatgatgagtggagctgaaactgaaacaactcccaagtgtaaatccatatgtttcttttattttcagatgcaacttttggtctgtgcgttcattttttttcttttgcagtaataacacaattttgtgtccgtaaatagggactgtcatcttctacacagtaaactatctcaaagtatgtctacatactagtcggttgtccgtgcgctgcgatagctcaaaataatacccacgtaaactatctaccaaaaagatctcgaaattttttattaatt

SEQ ID NO: 12198 - DNA, 294 bp, Zea Mays
cttcagaccacacttgttgggctctatcagggttcattgaggcccataatcggttcgctgatacagaatgcagtgaggcccacgtccctctcgtctcgtacagacgacgacggaaagaggatgatgcggggagtcggaggtccgctgctcaccatcggggatctactcagcgacctcgctgtcgacgacccactcgtcggcgtcggagatgcgtctgtcccatcatctccatcggcggcgcagcaagcggggaaggccaatccgtccgatctcagccggctctttgagtttttg

SEQ ID NO: 12199 - DNA, 530 bp, Zea Mays
taagaaatgggattatagggtttccgctaccgcagccacaccccaacatcaaaaccctcccatctcttcccctccgccgccgtctctgctctcaagatcgccatggcgtcagaaaagaagcagtcgaacccgatgcgggagatcaaggtgcagaagctcgtgctcaatatctccgttggagagagtggagatcgactcacccgcgccgccaaggtgttggagcagttgagtgggcagtctccggttttctccaaggcaaggtatactgtgaggtctttcggtattcgtcgtaatgagaagattgcatgctacgttacggtcaggggtgagaaggcaatgcagcttcttgagagtggcctcaaggtgaaggagtatgagcttctgaggaggaacttcagtgatactggctgctttggttttggtattcaggagcacattgatcttggaatcaagtcatgccttgtatgcctacttagctgtgagctgatgactaatatgcctttttatcaatttaatttgtcacatgggtg

SEQ ID NO: 12200 - DNA, 2333 bp, Zea Mays
ccaccattggtgcggcgtggttctgccacgacgcccgcgacaaatccctgcgcgacggcatcttcgcctcccatcccctcccagcttcccctcccactccggccctcacacaaattgcccctctccttgtcctcctctttacacgctgccgaccacggctgccgccaaccacccgccccacccgtccaccgctgccgagtgctagccatttggagctgccgcgccatggcgtccgtggccgccaccaccacgctggcaccggcactcgcgccccggcgccgggcgcggccagggaccgggctgctgccgccgcgccgggcctcggccgtccgctgctcgctcgaccgtaacgtctccgacatgggcgtcaacgctcccaaagggttattcccacccgagccagagcactacaggggcccgaagctcaaggtggccatcataggggcaggccttgcgggcatgtccaccgctgttgagctcttggaccagggccatgaggttgatttgtacgagtcccgtccgtttatcggtggtaaggttggctcctttgttgacaggcaaggaaaccatatcgagatggggctgcatgtgttcttcgggtgctacagcaatctcttccgcctcatgaagaaggttggcgctgataataatctgctggtgaaggaacatacccatacttttgtaaataaagggggcacgattggtgaacttgattttcggttcccggtgggagctccgttacatggcattcaagcattcctaagaactaatcagctcaaggtttatgataaagcaagaaatgcagttgctcttgcccttagtccagttgttcgggctctggttgatcctgatggtgcattgcagcaagtgcgggacttggatgatgtaagtttcagtgattggttcatgtccaaagggggtactcgggagagtatcacaagaatgtgggatcctgttgcttacgctttgggtttcattgactgtgataatatcagtgcacgttgcatgcttactattttcaccttgtttgccacaaagacagaggcatccctgttacgcatgctaaagggttcacctgatgtttacttaagtggcccaataaagaagtatataacagacaggggtggtaggtttcacttaaggtggggatgcagagaggttctctatgagaaatcacctgatggagagacctatgttaaaggccttctcctcaccaaggctacaagtagagagataatcaaagctgatgcatacgtcgcagcctgtgatgttccgggtatcaaaagattacttccatcagaatggagggaatgggaaatgtttgacaatatctacaagttagatggtgtccctgttgtcactgtccagctccgctacaatggatgggtcactgaacttcaagatttggagaaatcaagacaactgcaaagggcggttgggttggataaccttttgtacacggcggatgcagacttttcctgtttttcggaccttgctctctcatctcctgctgattactacattgaagggcaaggttccctgatccaagctgtgctgactcctggagatccatacatgccattgccaaacgaggagatcattagtaaggttcaaaagcaggttgtagaactgttcccatcttcccggggcttggaagttacatggtccagtgtggtaaagatcggacaatcgctgtaccgtgaggctcctggaaacgacccattcaggcctgatcagaagacgcccgttaaaaacttcttcctctctggatcttacacgaaacaggactacattgacagcatggaaggagcaactctctccggcaggcgaacgtcggcctacatctgcggtgccggggaggagctgctggccctccgaaagaagctactcatcgacgacggcgagaaggcgctggggaacgttcaagtcctgcaggctagctgaacaacccctcctgcactgcagagaagcttggatctttccaaccacacatacatgctggaatggacaaaccaaccaaccattggcttttctcgcttcagggtgctggcgattcccgcagcgacctcctgtgtatcgtatccaatttgagcattagatctgccccccctgcaggcgtttctttcctatccctgatccgagaagcagggtgtagtctaggtggctggcatacgggattacatcaggcagtgtgtaagttcagctggaactcgattggtaattgggatggatgattgatgatatatatatagcacacactgttcttgcgtcttgcaagaaaatatagcaagcgatgatccggcgacacttgctgggagactgaaaaaaaaaaa

SEQ ID NO: 12201 - DNA, 831 bp, Zea Mays
ttttttttttcgatcctaaggtccccggcggcccggccggaacaaaacccgttcgatgcgtctccgccgtttcaggacacaatcaagggctagaagccactacaggcccaaattcagcccatacccactctcccatccacgagaccacaagccacaccaaacccgcgttcatcgacggacgagctcgccggcgagagagcgactgagatggaggcggcggcagcggcggccggcgtggagctgggctcctcgaagccccagatcgcgacgcaggcggagatggcggaggcccgggtgccgctcgcctaccgcgatcagtgcgcgcacctcctcatcccgctcaacaagtgccgcgtcgccgagttctacctcccctggaagtgcgagcccgagcgccacgcctacgagaagtgccagtacgagctcgtcatggagcggatgctccagatgcagaagatccgcgaggcgcaggagaccaaggtcaagggcggcgcctccattggcctcatcccggccaccgccaagctcgcctgatacgggtcccagaccgatccgcttgatttaggtctgcctgttggctatagcagcgtccagaggcgttgcgccgtgcaaggatcctcaatgtttgttgtgtgaacagagatacgcgtttgaatttggcataaagttaactgttgtcttctttttcccttcccctctctctctatctccctgcctgatggctatcttcaggtttcaatttgatgatggaataaggaaaggtacttgtcctattaccgatgactggatgacttttttgaagttttgaaaacttgttcaccttaaaaaaaa

SEQ ID NO: 12202 - DNA, 230 bp, Zea Mays
tttcgtctttcataaatccaagaatttcacctctgactaggaaatacgaatgcccccgactgtccctattaatcattactccgatcccgaaggccaacacaataggaccggaatcctatgatgttatcccatgctaatgtatccagagcgatggcttgctttgagcactctaatttcttcaaagtaacggcgccggaggcacgacccggccagttaaggccaggagcgca

SEQ ID NO: 12203 - DNA, 87 bp, Zea Mays
cagcggccgtcccagagctgacggccgtcagtctttgccgagagccaatggctggcactcggcaaagaggcttctttgccgagtgcc

SEQ ID NO: 12204 - DNA, 627 bp, Zea Mays
atgacccttagtgggttctgcctatataggtatgcaatcacaaaagcttttgttgtagcttttgtgatgactttcttctctgtgtttgacgttcctgtcttctggcctatactcctctgctactgggttgttctctttgtccttacaatgaagcgccagattgtgcatatgatcaaatacaaatatgtgcctttcagtatcgggaaacagaaatacggtgtgaagaagagtgtcgcaagcaccagttcctcgaaagactgattatgagtctacctcagtaggaacttggcaggggaacaagatacggtggatgatgatgtgctaaatacctaagtgtaatactccattcatatctagatgtagacggatattcgctcctgtttctgactctgggctcactgtttaattcgatattgtgcttagctccctcctatgcttgtatagcgaattccgcatctcagataaattatttcgtttatttactagatatctgggccccgaaaacaataacctccatgctctcagcgagtttcttggttgtgagttggagtgaattaggcgggttttttttataaaaaaaatcaaactgaacagaatgctaaagtttagacgcataacgtttgagcc

SEQ ID NO: 12205 - DNA, 96 bp, Zea Mays
aaagttgactgggagacgacgacctagaccactcacgaactcatcgcagcatcttccatgagcatcatcctgcagtacctggtcttgacctggggg

SEQ ID NO: 12206 - DNA, 76 bp, Zea Mays
ggagcgttagaccaggccgcacgtcctccgtgcttaatcgagcaacgagggtgactggagtgcggggaattgctca

SEQ ID NO: 12207 - DNA, 90 bp, Zea Mays
tcgcttgcgacttcttcttgttcttcttcttggtgccgcgctgagcggacgcctcgaggacgtcttccggctggcggccctcgggctgct

SEQ ID NO: 12208 - DNA, 604 bp, Zea Mays
atcttaactacaagttagctgttggtaattatattctgtatgactcgtggtcaccagcgatgaccgtgagctctgtctgtatcagtatcctgtctatgttgtctagttcgccagcaaagcaacgcccggcggacaatgaccgctatgttaggaactgccgcaacgggaggtcgccaaaggagactagatggtggttccatgacgacacggtgtaatgatctctgtggcattgcctgtcagccttctgtactgtgatatatctcttcaagggggagatgagatgatttaggcctatttctaagcagccctctattggattgcgaagcttaccttgctgtggtggtatgtaaatgagttgctcacgtgtcagtctgggaatatgtgttatcaccatcaatgatataatatagaataaagcaagattgtaccctgcctaagtcactgaaacgagctcaaaagtaatgtgcaggtttgactatgatttgttgtggtcaatgtgccttcgtatcagtctgcagtctgcttatgcatttgcctatttgttcattgtagtgctgtactgctgctactgtgatagttccaactagtcacaaattatctgtgt

SEQ ID NO: 12209 - DNA, 275 bp, Zea Mays
aactgcacgtctcccgctttgtgctattcccgcagccagaaaaccctaacttcccggccgccgctttcctttccctcgatccacagctcgcgccgttcctgcaagtgcgcacccatcgtcccacctacgcactgccgcccaacgatctacgagctgccatggctaactcagcggcaccgggaggaatgaggtcgttcctgcaggccgtgtctacggtcaccgaggaggcgccgacgccactccgcgtcgtccagatggagggcctggcttcggca

SEQ ID NO: 12210 - DNA, 3187 bp, Zea Mays
cccttcttaataacaaagcacaacacaggcaaagaggatccgtcttcctccgtgctgcctcacttccgccgcacgcgaccggagaggcggctcactgcgtagcgccgcgagcccaaccctagccccgcccgcccgtccattccttccgtccttctggtggaccagctgccgagcccctccggcaggcatgtctccccccgagaaccccagccccgcggcgccggccgagccgtcgcagccgccgccaccggcggccgcggccaaggggaaggggaagaaggacgagaagaaggatgacgatctgtcggaggaggatctggcgctcaaggagcagctggagctctacgtcgtgcgggcgcaggacgcggatcccggcgtgcagaagctcgcgctcgagagcatgaggcaggagattcgctctgccacgagctcgatgacttcggttccaaagccactgaaattcctccgcccacactttggaactctcaagtcctatttcgaaacaatgcaagagtctgagctcaagaagtacatggctgacattctgtcagtgttagctttgacaatgtctgttgaaggggaaagagagagcctgaaataccgtttgttgggctctgaaggtgatattggttcatggggtcatgaatatgtgagaaatttggccggcgagattgcacaagaattccaaaagcgtcaggatgatgacttgcccattgatgtcctaatggagctagtgcagcaaattgtttcatttcacatgaagcataatgctgagcctgaagctgtggatcttcttatggaggtcgaagaccttgatttactagttgagcatgtagatgctacaaactacaaaagagcttgcttgtacctgactagttcatccaaatttctccctgcccctgatgatatgttggcacttgacatagcatataccatctacatgaagtttggagaccttgcaagcgctttgagaatttctctgcagcttgagaaatccacccagtatgtgaagcaagtctacacagcaactgatgaccttctgttgaagaaacaattctcatatctcattgcacgccatggtttggctatggagattgatgatgagatcgccgctgatgacaatgacaaggaggttttgcaagaaatagtaaataatactaagttgagtgagggatatcttactcttgctcgcgatattgaggtcatggagcctaaatccccagaggatatatacaaggtccatttgattgatggtcgtggtgccagctccagtcttgattctgcaagacagaatttagctgcaacatttgtaaatgcatttgtgaatgctgggtttggccaggacaagttgatgaccgctccatctgattcatccagcagcgggtcttccggaaattggttattcaagaacaaggaacatggaaaagctagtgcagcagctagtctgggaatgattctcttgtgggatactgattccgggctcgctcagcttgacaagtacttgcatagtaatgatactcatgttgttgctggagctttgctaggtattggaattgtcacttgtggggtgaagagtgattgtgatcctgcgtttgctattcttatggagtatattggcaaggatgactcaaacattcgtattggagcaatattgggtcttggaattgcatatgctggttcccagaaagaagagcttaaaatgcatctatctgctgtgttgggagactcccaatcacctcttgaggtcttggtcttctcggccattgccatgggattggtgtttgtcggttcttgcaatgaagagattgcacagtctattatatttgctttgatggagcgtagtgaggccgagttggcagaacccattatacggttgcttcctgttgcgcttggccttttatatcttggaaaacaggatagtgtggaggctaccgcagaggtctctaaaacatttgatgagaagatagggaagtactgtgatgtaacacttatgtcactggcatatgccgggacaggaaatgtgcttaaggttcagaaacttcttggcatttgctcacagcatcttgagaaaggtgaaacacaccaagggccagctgtcctagggattgctcttattgctatggctgaagaattaggagctgaaatggctgtacgttcacttgagcgtcttctgcagtatggcgagcagaatataagacgggcagttcctcttgctcttggtatactctgcatatctaatcccaaggtaaacgttatggacacactaagcagattgagtcatgatgcagacgccgatgtgtcgatggctgcaattatctcattgggtttgattggtgctggcacaaacaatgccagaatagctggcatgcttcgcaatctttcaagttattactacaaagaagctgctcatctgttttgtgttagaattgcccagggccttgtccacctcggaaagggcttgttgaccctttctccataccattccgatagatttctcctctccccgatggcacttgggggccttgtaaccgttctccacgcgtgccttgatatgaagtccaccatcctagggaaataccactacatcctctacattattgtcctggcaatgcagcccaggatgcttttgactgtcgacgaggatctgaagcccctgtcagtacctgtccgcgtcgggcaagcggtcgacgtggttggtcaggcaggaaggccgaagacaatcaccggcttccagacacactccacgccggtcttgctcgcagcaggggagagagctgaactagcaactgaaaaatacattccactgaccccggtactagagggctttgtgattctgaagaagaacccagagtaccacgaggagtgaagacccagatagcatattggtgtttccgaggcccgtccagataggcagcctcgaatttgcgcggccttggatatctatcttctttcttgctcagcggcagcgccatcctggccctctccttcctgggtccgtgtccatgtttgattcttatcttaccggagctgtggctaactgaaagagctgtctttggttggcttaacttgtagtacgaccgtatttattaattactagaagacgtttatagagcgtactctgtacggtgaggtgatgacatggtggcatagcgtagtgtaattttctttttggcgttcaaaaaataaa

SEQ ID NO: 12211 - DNA, 1190 bp, Zea Mays
cttgcatgtgggtcctggtgatcctccgtggctgcgggtggggacgcggcaccagtgcgttcctctctgttgtacccgataaagcgtaacaggagccggattgttaggatgcggagaaatccggcagcctgggatccttatcatctgggctccgggtatatatcacgtgagcctctcgccctcatccacaccagaaagccaatccaaaatcaaaagaccccatacgaacttcgtcgagctgcaagaaggaaaaggaggtagtcgccggggtcggctgtgtgcgagtcgacgctcgggtctgggtggttgaaggctcgtctgtgcgtggaggctctggcaagctacaggcgatgcgacggcgcgcctctaaccagcctcgaagttcactcgagggggtgctacaggacgccggagcgaacagtcggccggccagccaagtcgtcgtcgctcaaaccaggcaaatcgtctcacccgcgtgcaaccggggcgcgacgtggaggtcaagctcaagccccgcctgtgggtggcactctccttcatcccgtcgccctcaacgccacagtcgggaggcctcgatgctcgcgcccggcgtctctgacctccttatccacgtcatccagcttcccctgtgacggctccgcctgctcctaccgtatcctttttccgggctacccgcggcgtcggcgtctacgtccacgcttatctcctcggcgacgttcacgcagcaccgccgccctgggtcaatcactcaatcggatgggggacgatgaagatgactcatacaccgttgattaggaaatgcgtggctccgatcatatggccaagcggtgaggtcacgaggatctgaagaatcaccctggtaactggaatctcaagtgccaggtcaagaacaggtaccgcaggatgaggcgcatggaggatgctgcgatgagttcgtgagagatctaggtcgtcgtctcccagtcaactttgggttgctggaccgttgtctccttgtaatgtaattatttatttattttgtatagaactcctattatatagtaaagatgtgacattcgatccagtgccatgatttatcatatgtgtgagacttggtcccagcacacctggtgattatgttcgcgcccgggtcttggtgccccgaaacccgggtgtgacagaagtggtatcagagcaatgttgactgtagg

SEQ ID NO: 12212 - DNA, 64 bp, Zea Mays
atgcaccggggcttgcctggaataaacactacgttagtgtttgttaggtgacgtccacttggcg

SEQ ID NO: 12213 - DNA, 1019 bp, Zea Mays
gtggaggggtctagtgtatcattctggactatgttccgacggtgtttgacaacttcagtgctaacgttgtggttgatggtaacactgtcaacctcggcctctgggacactgcaggtcaagaggattacaacagactgagaccactgagctatcgtggagctgatgtttttcttctggctttctcactgatcagtaaagccagctatgagaatgtttcgaagaagtggatacctgaactgaagcattatgcacctggtgtgccaataattctcgtagggacaaagcttgatcttcgagatgacaagcagttctttgtggaccatcctggtgctgttcctatcactactgctcagggagaggagctaagaaagcaaataggcgcgccatactacatcgagtgcagctcaaagacccaactaaacgtgaagggtgtcttcgatgcggcgataaaggttgtgctgcagccgcctaaggcgaagaagaagaaaaaggcgcagaggggggcgtgctccattttgtgatctaataatgatcagtagacaaaagaaacaagggcgaaggtgccatggttctattatcgccgcgtcttgcttcagcgaaacagcaatggatgatcccaccccctcccccccctagattttactggcggctgcagcgagtcgaggcattcgagagcgatatgtttgtttcatttccctccttcccgccttgtgattatctggtgtgtgtgactgacgaggtcgtggcaatttaggtaactcgcttagaaggtatttcccccgtgtttgagcccccacccccaccaaaaaaaagaaggtatcatgctatctctgttccataagtagacatgatgtaatcgtactaagtgtttatttttattttttttacttatttcacttcaatcaatggaaaattatgcttcccaattatatggtgggtcatggcagtccccctccctccttgtttgcctgtcaagttctcagtgtctttgtggcaaatggagcatgcatattgattta

SEQ ID NO: 12214 - DNA, 2513 bp, Zea Mays
gaagattttgagcaacttctttccttttcactgaatacaagtatgtgggactattcatgggcatttttgctgtcctgatcttcctcttccttggttctgttgagagcttcagtaccaagagtcagccatgccactacagcaagggcaagacgtgcaagcctgcccttgccaatgctatcttcagcaccattgcctttgtgcttggtgcagtcacctctcttgtttctggtttccttggaatgaagattgccacatatgcaaatgccaggacaactcttgaggctaggaagggtgttggaaaggcattcattaccgctttccgctctggtgctgtgatgggcttcctgcttgctgctagtggcctttttgttctttatattgcaatcaacttgtttggaatttattatggtgatgactgggagggcctttatgaggctatcactggttatggtcttggtggttcttctatggctctttttggtcgtgttggtggtgggatttacactaaagctgctgatgttggtgctgatcttgttgggaaagtcgaaaggaatatccctgaagatgatccgagaaacccagctgtcattgcggacaatgttggtgacaatgttggagatattgctggtatggggtcagatctctttggctcttatgctgagtcttcatgcgctgcgcttgtcgttgcctcaatctcttcattcgggatcaatcatgaattcacccctatgttgtacccactcctcattagctctgtgggtatcatagcttgcttgataaccactctttttgcaactgatttctttgagatcaaggctgtagatgaaattgagccggctctcaagaagcagcttataatttccactgctgtgatgactgttggcattgcacttgtcagttggttagggcttccatatacattcacaatcttcaactttggtgtgcagaagacggtgtataactggcaattattcctatgcgtggcagttggtctgtgggcaggactagttattggatttgttacggagtattacacaagcaatgcatacagtcctgtacaggatgttgctgattcctgcagaactggagctgctacgaatgtcatctttggccttgctctgggatataaatccgtcattatccctatttttgctattgcttttagtatttttctcagcttcagccttgctgccatgtacggtgttgctgtggctgctcttggaatgctcagcacaatcgctactggccttgccattgatgcctatggtcctatcagtgacaatgctggaggaattgctgaaatggctggcatgagccacagaatccgtgagagaactgatgctcttgatgctgctggaaatactactgctgccattgggaagggttttgcaataggttcagcagccttggtgtctcttgccctctttggtgcttttgtcagccgtgctgagatctcgactgttgatgttctgacacccaaagttttcattggactgattgttggtgccatgctcccatactggttctcagcgatgacaatgaagagtgttggaagtgcagcactcaagatggttgaggaagtccgcaggcagttcaacaccatccctgggctcatggagggcattaccaagcctgactatgcgacgtgtgttaagatctctactgatgcatctatcaaggagatgatcccacctggtgcacttgtcatgcttacacctcttattgtggggatcttctttggtgttgaaaccctctctggagttcttgctggtgctcttgtttctggtgtccagattgccatctctgcatccaacactggaggtgcctgggacaacgcaaagaaatacattgaggctggtgcatctgagcatgcaagaaccttgggcccgaaaggttcagacccacacaaggctgctgtcatcggtgacaccatcggtgatcccctcaaggacacctcaggcccctcgctgaacatcctcatcaagctcatggctgtcgagtcccttgtctttgctcccttcttcgccacccatggaggcatcctcttcaaatggctttagaggaagaatggaagatggatgggtagtttatttttgccgggggagagcactagatatatgtcatagagaagtttcagtttacccatatggtgcacttcatccttttttgtttcgcttgtactgtgtcgcagtcttgttgaacttgtcagccgtggtatcacctagtttttgggtctagatgcagtagccgagtggagcaaaaacgtctagcattctacaggattggaatttggacatggatgtgttgggaagtttgatactgcatgtagatatttcgatgatgatgatcaaggaatgcacaagtcagatttacctgtgtttgtgaaacttgaaactctgcgtaggagtgtatggcggtagaatagtcaatcagtgaccgatcaaaatctgtaactcatcgaccttattttaatagtataaactagataaaattatacaacaaacccaattaaa

SEQ ID NO: 12215 - DNA, 639 bp, Zea Mays
tgcactggttatttgttattggcagagccatcaaaatggacattcagctcttacactatcctaaagactgctgaacaggcaccaagaaccccatcgtttgcagatcagttaatagaagctgacaatggtcttggcgaagtaatgaaaccacctgagaaatctttctgggctaaatattggatgtacatcattccgcttggtcttattgtcatgaatgctgttacggcagctgccaacataccagaggaagctgcagggcagggccaacctggagcacaacgggcacctgctgctgttgctgggaggaggagatgatggctgccttccataccgtagttaactatcttcacattgttttctgttttttttggggtattgtatcaatcttaccttgactgcatcatctatggcactgcatgatgatgccatcttttgcttgtgttgaaacacgtagcctatccaagacaatgtggttcctatacatctgtagccaattttggccactagcatgccattggacactgaaactttgcttgaagcctgtgcacacatcatttgcagtgaccacttcatacttgatgcagcaaaaacacctattaatttcagctgttgaattttctgctaataattcatgctttc

SEQ ID NO: 12216 - DNA, 645 bp, Zea Mays
ctcagatggtgactaaggaaggcagaacaagattcggatggctcggcacaaagcacagctgatatgacggcttttgtgcaaaaccttcttatgcagatgcaaaccaggttccaagctatgtcggagaacatcatttcaaagatagatgaaatgggtgcgagaattgatgaattggaacagagcctcaatgacctcaaggctgagataggcggtgaaggcatgtcgacgccatctaagatgaaggaagagtcaagaccttcagacagctccgcatgagtgcagcagaagcagcatgactcgtttcagaggccgttgctgtgtcttgggcgttcatcactaacaaatacgtacctgttttaaggtctcatttgagcaagagattgtaacccgtgctacttgtgttttgctgaatggtttgccataaattgtacccgtcttcgttctgtgtagacctacccgtggttatgcgctgagcatgtagtgacagctgctagaatgctagcaccccaattactaagaattcgggattcgcaagcataatttactttgcttctgtgttagttttatcacttacatggatagtagtgtatatatttttaattggcttacatattaaattcatgttcgcaacataatttactttgc

SEQ ID NO: 12217 - DNA, 1091 bp, Zea Mays
catgctttcaacctgatcaagatcattcccaagagagccttgaaactgaatcgctaaacaagtttatcaaaatgcatggcatgccctcctgtaaaatcctagatacgggctggaaaactgtggtcacaggtccaagatacattcaagcagatggacactgccgcaacagagctcgaatgcttccaagagctgcagaaacaggaacatctcgctgcttcatatcgaatccaaaatttgtctgaagaagtgagtaaacagaaggcactagaaaggaccctccagagccgctacggcgagctggtttctggtttccagaggatccaagaacaggtcgaggagcacaagaggcaactcaaggtacaagaggcggtagaagccgaaagtcacgctcaggaagaggaagctgcggcatcaaatcatgctgctgctgaggaagaggatgaaaggaaggaagatgatgaaaggaaggaagaggatggaaggaagtctctcagctctgaagagaaaccacagcagacaagtacggctaccgatgaagaacctgcaggaagcaaaggaaccaccgaggatcagatggacgtggacagcgggaatggagagggtggagttgtaggccctgtcccaccagcaccagacactgaagggggtaatgatgaagtatcagttcaagagatcagtgaagcccagcccttgccttgaagacggcgctcctttcccttcaagctccgctttcttctcccgcacctggcgatcttcacgatgttgttgttgcacagcaggtccggactgagtatttcctatttggttatatttttagtgcactataatatcgcaagcgaagctacaattggttgtgagctaaatttgcatatccttccctttgttgtattcccttgaacaatgaatcagaacaactgtttaccatttttctaaaggatcgacggcttatgtactcatgcagaactgcctcattgtgcctctggctgaatagcagccaagtaagcgtgacatgctctttgttcatttagtatggtccacaatgctttatggaaacattggtgtacgaaatttctaaccagctgttttccaat

SEQ ID NO: 12218 - DNA, 1036 bp, Zea Mays
ccaacgaaggaattcctggaagggaatcgaggatgtcatctctagtaaggaactaaataaaatacggttttgttaacgctagtttccaccccctacataaggcctttcgggccacccgttttacaagccgaagacgcgaccgacccaggcaggcaccactccgctcaacgcaccgggcggcacccaaatcccaaaccctagcacacgcaccatggcggcgcagcagaagatccggtggggggagctggaggaggacgatggcggggacctcgatttcctcctcccgccccgcgtcgtcgtcggacccgacgagaacggcctcaagaaggtcatcgagtaccgcttcgacgacgacggcaacaaggtccgggtcacgaccaccacccgcgtccgcaaactcgctcgggcgcgcctctcccgcagcgccatcgagcgccgccagtggcctaagtttggggacgccctcaaggaggacgccggctccaggctcaccatggtctccaccgaggagatcctcctcgagcgcccccgcgccccagggagcaaagctgaggagtcagctgcatctggtgatccgctggctatggcgagcaagggaggtgctgttctcatggtttgcagaacctgtgggaagaagggcgatcactggacctcaaagtgtccgtacaaggacctggcaccaccgactgaaactttcacggacaggcctccaacgtcagatggccctcctgcaccaggtggtcctgctaagggagcatatgttcctccaaccatgagaggaggtgctgataggactggagactcgatgcgccgcaggaacgacgagaattccgtccgtgtgaccaacctctcggaggacacccgcgagcctgacctccttgagctcttccgtgcctttggccctgtcagccgtgtctacgtcgcggtggatcagaagactgggtcgagcagggggtttgggtttgtcaactttgttcacagagaggacgccgagaaggccatcaacaagctcaacggacgagcaagccactgtggg

SEQ ID NO: 12219 - DNA, 64 bp, Zea Mays
tttcccacataacaggtatattacagtaatcacatttgatacacacacattggagatagagcgg

SEQ ID NO: 12220 - DNA, 1761 bp, Zea Mays
gagaagccgaatcgcgagcccacccggccagggggcagatttcgtgctcctctcctccagtctccaccctccagcgccctccacttgcagaggttcgcgactcgcgacgcctccgcagccccagccccagccccacgccccgcgatccaaaccctagccccctccaccgtaccgccaccgtcatggccgaaccatccgccgccgccgtcaccgcagctgaggtcggggaggagtccgatgccgccgcgatggaggaggtcgcggcggccgcgaagaggtggccggggtggcccggggacagcgtgttccggctggtggtgccagtgctcaaggtcggaagcataatcgggcggaagggcgagctcatcaagcgccttgtcgaggggaccaaggccagagtccgcatcctcgagggccccgtcggcgccaccgagcgtatcgttttggtttctggaaaagaagatccaggcttggagctatctccagccatggatgctctcatgagagtttttaagcgtgtcattgggataacagatggagctgcggagggcactcaggctgctgctactcctggtgtatgtgctgcccgattgttggttcctggagctcaggcaattaacctaattgggaagcaaggtgccactatcaaagcaatccaggagagcacgggtgctacaatacgggtaatatcagtagatgaacatgagagaccattttatgtaactgacgatgaaaggatagttgagatacagggcgatacagagaaagttctaaaagcactgcaagctgtttctaaccatcttcggaagtttttggttgaccatagtgtacttccattatttgaaaaaactaatactgcagtgagccaagatcacaatgttggttggagtgatatgtcacatccttcaattggttctgcacaagtgaatcaaccaccttcagtggtagatgaatatattcttccagtgaagagggatactttgtatcttgaacgagaaactttgttagatcataacattcatcgctcaggcgtatcactttatgggcgggatccagccttgtcaacactacgaccacctggaatacatggtgctggcccgctacttacacagataacccaaaccatgcaaatcccacttacctatgctgaagacattataggagttaaaggagcaaatattgcgtacatacgagctaatagtggagctgttgttacaattcaggagagtttgggtagtccagatgatattactgttgaaataaaggggacatcttcacaggtacaagctgcacagcagctcatccaggactcgttggctgcacaccgagaacctgtcagaagcagttatgtgggagcaggattagattcactgtataggtccagctactcacaatatggcagctccacctatccttcgtcatcactgccatcttattctagcatcgatgatgttagtaggtacccatcttcaggtcttggtggctatgggtcgagttacaggtactagtactagttcgtccttaggcttgaatgcttgatggcaccttgtatccattcctgggtgattattgtacaagtcagcaagttttctgctctgcgtgcttacgggcaggggatcattttacaagtcagcaagttctctgctttgtatgcttccgggcagggatctggtagattatactgcatcccaattcccagtacccagacttcggagtccaatttgctttgacaatggaatcggaaatcgtgcttgttaacaa

SEQ ID NO: 12221 - DNA, 1069 bp, Zea Mays
agggattggaggtcgccggcgcgcgcagcctccaggaaagcctgcaccttgctccgagctgccaaggccatatctctgcaatgggtgactacacaatccagattagcaccaagctcattgaccagcttgctcgtgatgacgagaaggtaaaacggaaagccaggaagcccaagcctaagaagaagcccaccgtccagccacatgaagagcccctggaattcccgagagaaccaaagacgacaagccttgctactgctcctgggtggcctctgcagcctccccctatgtttctgccagtgacccctgctcccccgccacccccggccacaatgccggaggtggaagccattcgttccgtcctgaaagaaagtgaggcgcttctcaagaagctggagaaccaggaaactggggcacgccaagagctcagcaagagagcaaaggagctgcacgacaaggagttcaagctaccataccagaaacccatgccctgcacccaggagagggcaggctgccttgagtgttacaagaccaatacaaaggacccgctcaagtgtgctgaagcagtcaagagatttgaggcatgtgctctcatggccatcaaaagtactgccgcaaaagctgattagtatgtagtccgtgaagctttgtgagttggggcgagctgatacgcggactctgttttttatcttttgaggcaattcaaataaccaaggattttcatgggacccactgtagatttctaatgccactgcactgggctacctgaggcagcgcaccttgagcttagcgatattgcatatgtttgttaaaattggtatatcaagttgctggtgcaaaggttttttctgaaatatatattgatcttgtgttggattggtatccactagccacgctgcagatttttgctgtgttctatggtgtcattattgtgctattgtcgtactcttgtgtgcatgatgcctctgtttacctattttccgtgccagcactgctattttgtatttcattcagtccatgggctgtagaattctgttccaagtggatcaatattattatcttctcttgtgct

SEQ ID NO: 12222 - DNA, 861 bp, Zea Mays
attttgtctatgttgggtctttgacagagcatagactcaaaacctgctgttggctctactctcattggtggtgagacagaagctctggagaggttgaagaagtttgctgcagaatgctctatgcagccaaacaaagtagacaaaagcaatacccaagatagcatatatggtgctaatttctcttgcaaaatttctccatggcttgctacaggttgcctctctccacggttcatgtatgaggagttgaagaagcatgctactaaagcaattccttttgggtcaacacccaagaataatgatggcacatctgatgctggaacaaattggttaatgtttgagttgctgtggagagatttcttcaggttcatcacaaagaagtacagctctgtacagaagacatctgaagttgccactggctgcactcccgccccagcgcttgcatgaacttacttagacaagctgattgccagctgcttttttggggtgataaacttatgtgcattttcaatggagtcttttttttgccgccaataatgttggtagtcaaagtgaacgccgaatgcgcattcctgcgttttggtttggtcgatgtatttaatgctgtcgacatccctccaaatgactgttgaatgcaaatgatactgtgagcaacctatcatctgctgtgtaaatgtgttctgtcgacgttcctccaaatgacacttcgatgcaatgatattgtgagcaacctgtaagctgttatgtaaatgtgatagttagatgcatatcatgcatgtgacctgctattgttctatatatcatattattgttctatatatcatatgaatagactttatttaaataaaacacaaaaatgtatgt

SEQ ID NO: 12223 - DNA, 1846 bp, Zea Mays
ttgatattttggtacatgaaaaatagcaacgaggctcgaggcaggagaatgacggaagcgacgacggtgagaggcacagaagcaaacttgtgatcgtacacgatatgcggacaacgccgcacccttctatctaggccagactagaagggtagaagaagcaacaacggtcaagggcctagctatttgttaactctggcccctcacctgctccccttctgtccagcccacgggagggcgactagggttaggggcgaccggaggtccccgcgcctgcccaaatccacccatcccttccgttcaagccgccggagctcccaggccgctggtgtcgaagccgtcgccccttccttccaggcccgcctcctctctgtccgttctgtcttggtcgccgaagctcaagaccacagtgtcaggaagttctccaatcttccagccaaacacaattcatcagtcagatacactttgaccgaggaattattcagaatcactccacgagaggatcagctttcgaagctagagaagcagagctctaccaaacaggccaggacgtctctcaaatccccagttcagtaactggctaactgtaggagaaggagagagagatggagaacggcggcgctaaaggcgacgtccccgacgatgcgaacgagcattgccctggaacacagtctgaggaggcaggcaaggcagatgcctgcgctgggtgccccaaccagcagatttgcgccaccgcccccaaggggcctgatcccgatgtggttgctattgttgagaggttggctactgtgaaacacaaattgttagttttgtctggaaagggaggtgttggaaaaagcacattctcagcccaactctcgtttgccctagctgaaatggaccatcaggttggccttcttgacatagatatatgtggccctagcatccctaaaatgctaggccttgaaggacaagatattcatcaaagcaaccttggctggtcacctgtgtatgttgagtccaaccttggtgtgatgtcgattggtttcatgctgcctaatccagacgatgctgtcatatggaggggtccccgcaagaatggactgatcaagcagttcttaaaggatgtcgattggggggagattgactatcttgttgtggacgctcctccaggaacatctgatgagcacatctcgatcgtgcaataccttcaagccacaggaatcgatggcgcgataatcgtcacgactccgcagcaggtctctctgattgatgtgaggaaggagataaacttctgcaagaaggtcggtgttcctgtcctaggtgttgtggagaacatgagtggtctgaggcagccgctttcagacctcagattcatcaagtcagatgaggcgggcaagacagatgcgacagaatgggccctgaactacatcaaggagaaagcccctgagcttctgtcggtcatggcctgcagtgaggtatttgatagcagcaagggaggcgccgagaagatgtgccatgaaatgggggttcctttccttggtaaggtgcccatggatccgcagctgtgcaaggcggctgaggaagggaggtcatgctttgctgatcagaaatgcagtgccagtgcgccggctcttcgaaacatcgtgaagaagctgatcaaggccgagtgagaaaataatgttggcctgctggggaatctggtagtgagaaatgagatgaaatgacagatgccagagttctcgttaccaatatatatatatgttacggcgttacacactgaatctgtattagtgcttgtgttggacctgtaagtttttgttcgtgaataatcagtgggtgcacagactattaaaagcttaaaaaagaa

SEQ ID NO: 12224 - DNA, 70 bp, Zea Mays
ttctcattactatttaattgaaattcataaagtagcgcgtgcacctcttgttgtagctagttagctcggc

SEQ ID NO: 12225 - DNA, 546 bp, Zea Mays
gatccttatctttcttaacttcaggtattttgcacaccatattcttccatagaaccctcagcctggttcgccccaaagatgttgactgtgatttcctcgatattacttatgtacaatgtggtctaccggaactagaaaaggaagttgacgaaaagatagaccagttcagtgcatgggtggagaaacacccaaaccgcagaagccagatctgcctctcctttttcgacgagaaacacagacaccctggttggtttgtcaacaaaacagagcgcatctattgggagcaatggttcatcaatttgcaagtcatgttccccaaaagatacagcaagtcaaacagctccaaagggctgacaaacatccaagcaaatgccgtggaggagaccagcacaaggcgtgctgcattggaggcgtcgattaacgaagtgctgttccagatcataaagttcgccaacgagaaaaaggaccacattcctgctatccctgacaggattttcaatcacgagatcatgatcccaagattctctacatatatctcgatcaaca

SEQ ID NO: 12226 - DNA, 99 bp, Zea Mays
gcgagatggagtccattatattttaagacaacaacaaggcaggcggccgcgttgcatccgaacaagaggcaaacaccgatcactcgaaaggatcagacc

SEQ ID NO: 12227 - DNA, 56 bp, Zea Mays
ctataaataccccaaccaccaccactccaagcatccaagattccagcacttcacat

SEQ ID NO: 12228 - DNA, 1886 bp, Zea Mays
tccctggttccctgcctcctctgtatactaactctcctctctcccagagtcccggtcagctcgactgctccagttcttcccatttcccagccgccgcggcgccacgcagacctagcagagaaacacccacccgagatggcgatggctctgcgccgccttgcgggcgtgtccggatcgccgtcggcctcctctgccgcggccacggtgctactccggtcggcgctgacccgcccgatctccaccggcttccgcgaggagcgcgacaccttcggtcccatccaagtccccaacgacaagctgtggggcgcgcagacgcagagatcgctgcagaactttgacattggcggggagcgtgagaggatgcccgttcccatcatccgtgcctttggcgtgctaaaaaagtgcgccgctaaggtgaatatggactatggccttgatccaacaatagggaaggccataatacaggcagctgaggaggtcgcagagggaaagttggatgatcacttcccacttgttatctggcaaactggcagtggcacacaaagcaacatgaatgccaatgaggtaattgcaaatagggcatctgagatccttggacacaagcgcggtgagaagtttgtgcacccaaatgaccatgtgaataggtcacaatcttcaaatgatacatttcccactgtaatgcatatagcgacggccgttgagatacattcgaggtttatcccaagtttgcaacagttgcatgattcacttcattcgaaaactattgagtttaaagacataattaaaattggacgtacacatacccaagatgccaccccattgactcttggccaagaattcagtggctacactacacaggtcaaatatggaattgaccgcattaattgtacattacctcggatgtaccagcttgctcaaggtggaactgcagttggaactggcttgaacaccaagaaaggatttgatgccaaaatagctgctgcagtggctgaggaaacaaacctaccctttgtgacagcagagaacaagtttgaagctttggttatgggtaatcatgttggtgttacaattggtggtgccaatgggcattttgaactgaatgtttttaagccaatgatcgcagccggattacttcgatcattgaggttgttaggggatgcatccgtgtcctttgagaaaaattgtgtcaggggaattcaagcaaaccacaagagaatttcacaacttttgcatgagtctctgatgttagtgacatctttgaaccctaaaattggctatgacaatgctgcagctgttgctaagaaagcccacaaagaaggaaccacgttgaaggaagctgcattagaccttggagtattaacggagcaagaattccatgagcttgtcgtcccggagaaaatgattggtccttctgattgataaccccatgttcactatgtttctttgaagcattcaggttgccacatccgcgagttctggtggccctgtgtttccaagttaatgattctagcgcacccataaataaagcaaataatttttcatatggtcattaggtcctcaccgtaccgcactagagaaatgatttttgcatggcggatggtatctgagaaaacagttgtattcttgttcaaatagggagcagtgcactttgattcatgaggcgccttccattatcttggcatcagtcaaccttttcttgccaagtagctagtgctatgtaacaagtgacatggcaaccatgtatagaaattatttgcatgggtttgtgttcttgccaggtagctaatgttatgtaataagtgacaaggaaacaatgtcatgaattatttgcattgggttttgacgagtgaaatagaaatatacgccctgttttagttttcttttta

SEQ ID NO: 12229 - DNA, 112 bp, Zea Mays
aggagcacgttgaattgaaggggaagagaggatcaaggagatgttcttctccatctcttcttgcagaatttcatggggaaaccctaggtggctacactccagatcatgccta

SEQ ID NO: 12230 - DNA, 1609 bp, Zea Mays
caatattattattcaggttgatgacttggaagaagtcagtgagtactaccagaatagaggatgcttcagtgaacttattgctctcatggagagtggtcttggacttgaacgtgcacacatgggcatcttcacagaattgggagttctgtatgctagataccgctctgagaagcttatggagcacatcaaacttttctccacccgtctcaatattcctaagcttattcgagcctgtgatgaacagcagcactggaaagaacttacctacctgtacatacagtatgatgaatttgacaatgcagtcaccactattatgaaccactctcctgatgcatgggatcatatgcagttcaaggatgtttgcgttaaagttgcaaacgttgagctatattacaaggcagttcacttctatttgcaagagcatcctgatctcatcaatgatatgctgaatgtgcttgcacttcgtttagatcataccagagttgtagacataatgcgcaaggctggtcaattgcatcttgtgaaaccatatatggttgcagttcagagtaataatgtctctgctgtgaatgaagccttgaatgagctttatgttgaagaggaagactatgagagactccgtgaatcagttgacatgcatgacaactttgaccaaataggtcttgcccagaagctggagaagcatgaattgcttgagatgaggaggattgctgcctacatttacaagaaggctggcaggtggaagcaatccattgctctatcaaagaaagataacatgtacaaggattgtatggagacatgctcacaatctggtgaccgtgaactgtcagaggacttgcttgtgtattttatcgagcagggtaagaaagaatgctttgcttcttgcctcttcatttgctacgacctgatccggccggatgtcgctcttgagcttgcgtggatgaacaacatgttggactttgccttcccatacctgttgcagttcatccgtgaatacactagcaaggtggatgatttagtgaaggacagaattgagtcacagaatgaagaaagagtcaaagagaaggaggagaaagatcttgttgctcagcagaacatgtatgcgcaattgcttcctcttgctttgcctgctccgccaatgcctggcatgggtggccctccacctccgatgggtgggatgggcatgcctccaatgggtggaatgggtatgccgccgatgggccctggtccgatgccagcattcgggatgccagcaatgggaagctactgagatgtttttgcagagagcttagacgatgatttgaatcgtccctgtgtaagcgaaggtggaaacttcattggagttgtagatggttacagtttggaattaatattctttatggtaccagaatttttttggcaagtgaaaccttagccagagtctgagaattgcaacctgttataccgtaggatcggataggatgagggtgattaggttggttgagcgagctgttgaaagctggtatcatttgtatagtgtgatgaaaactttgtagacattttgcttgtataatactcctacttgttggcacagtgaaggacaaacaaatgtatgctgacttgtaaaaac

SEQ ID NO: 12231 - DNA, 2115 bp, Zea Mays
agcgagcaccgtcgtcgtccaaggtgatcccaatggcccatgtgcggctgcttctcccctccactagctccgatcacctagctagcctctcgctgtactacagatcggacaggggccgcgcaggcacaggcgcagcgtcccaaccaatcgtatttactccgatccgccccgccactgcacagccgccttctgccctccttccatcgcgctcgctcgctcgctctcctatataaacgccctgcagtcctgcagcacctaccagtccagtctcgcagagcagatagcatcagtgcctactgcggtactgcatagctagcttagcttggtcttcgatctcgaccagagccagagagtgtggtgtgaccgtgtgagcgacgatggggaagcacgtctgggcggcagcgctcatggcgctggccgtgattgtcgggctcggtgtgccccccggccgcatcgccgaggcgcgcaccttagagaaggacgacctgctgggcggcggcggtgactttggtgctggagagggaggaggcttcggtggtggtgctggtggaggtcttggaggtgggtttggtggaggaggaggccttgggggaggcggcggtgctggtggtggttttggtggcggggctggtcatggtggtggccttggaggtggcttcggaggtggaaaaggtggtggtgcaggtggaggtggtggtcttggagggggtgtaggcgggggcggcggccttggtacaggtggaggaggtggctttggaggtgggaaaggtggtggacttggcggaggtggtggccttggcagtggaggtggtgcaggcgtaggcggtggtcttggagggggtgccggtggaggcggcgaccttggaggtgggaaaggtggtggccttggtggagggggtggcctcggcggtggaggtggacttggcggtggtgcaggtgggggcggcggccttggtgccggtggaggaggtggctttggaggtgggaaaggtggtggtcttggtggaggtggtggcctcggtggtggaggtggtgcaggcgaaggcggtggtcttggagtaggtgccggtggaggaggtggactaggcggtggtgccggtggcgggtttggtggtggcgcaggaggaggtgttggtggaggtggtggccttggtgacggtgctggcggtggtgctggagctggcagtggtcttggaggaggtgttggtggaggtgcgggaggcggtgctggcggtggtgctggagctggcggtggtctcggtggtggtgcaggcagtggtgtcggtggtgggtttggaggaggcaaaggcggaggctttggtggtgggattggcgggggcgggggcgcaggtggtggtgccggtggtgggttcggaggaggcaaaggtggcggttttggtggcgccggtggtgggttcggaggaggcaagggtggtggttttggcggaggtgcaggtggtggcttcggaggtggcggaggttcgggtggtggcatcggtggtggactctagaggtggcgggagctcggcgcgcgcacgttgagtgcgtgcatgccatgaaattaaaaagcgatacatggagtgtgtggtacggtatggacattgctagagttacattacatcatcactagtatatataaggttgactcttatttgtaagcctaatgaaagtgaataattggatgcgttatgtaagcctactctactatatatatgtttgttttggaaaatcgagggagtgtgttacttgactatccccaatcacactcataaaaacttgacttgtgtgttgtttgtactcgaccaattatatactacaatacatatttggtcatgcctgtgtgatcgctgtgctttgtgcttttaggaaggaatgcacgtgcgcgcaatgggtgttaatgagaaaatagaacacaagagagagtgcagcttcaaaattgataagttatcctgatatcgtcttggtattgtattgaatggtacacattagcagagagtgaaatatgtgataattcacaaaactggcgtacttgttagttccacgagtcttgtttttttttttgaaagggtaaatgatttagttaaaacacctctatttttttttaaaaaaaaaaaa

SEQ ID NO: 12232 - DNA, 121 bp, Zea Mays
  misc_feature (1)..(2): n is a, c, g, or t
nnggggaccgaagcgttctccctcctcccgctctgccgccgccggctgagctcgtgccgtgcctgtgtccgacgatcccgaactggtggggaaacggacggagtgttgcttggggttttgc

SEQ ID NO: 12233 - DNA, 407 bp, Zea Mays
ctcatccacccggaggcacctcacacacacacactctctctctctccactggctgacgccgcgaccgccccaacccaactgcccttttcggagatctcgccgcctccgccgtcgacttccgtcgcccccctatcccgcgtccgggcttacccgatggcacggctgcactggcttgaggccgtcctgccgctggggatcatcggcggcatgctctgcatcatgggcaacgcccagtatttcatccacaaggccgcgcacggcaggccgaagcacatcgggaacgatatgtgggacgtcgccatggagcgccgcgacaagaagctcgtggaacaatcctccggcaactagggagtgtgtggctgcagggcagatggcgcggtgccgatggtgtcaggcgagcgcagcag

SEQ ID NO: 12234 - DNA, 704 bp, Zea Mays
ccgcagtacctggagaagcaccctgagctcaagggcgtaaaggaggcggctggggagaagtggcgctctatgtcggatgaggagaaggcgaagtatggcggtagcaagaagcaggatggcaaagcaagcaagaaggagaacactagctccaagaaggccaaagctgatgttcgggagggagatgaagcagaaggttctaacaagtcaaaatctgaggttgaggatgatgagcaggatggacgaggatgagtaaatagtacgatggggaacagcagctttgcaattgagtgtttgctgctttacttatttttctatatgctgttccttttgatgttatatgctgtaaggaaaatctgtacatgatggtaccttagggtatggcatgctggagttcccctttaacccgaagagccggatacttttgccagcctcgtcagcatgtgtaaacagttgttttcttgttttatcgacttattgggtgactacccaagagttggtttgtagtcaatgaggtatgctgccccctgtggtgctacgcagctgcagcaacatcagatggtcaggctaaaatcatgttgtgggatctgattctaatgatgcttatttagtactattacaaatatctatcgttgcttatataaatttgttaaaccttgagatatttttaccaagttctatattcgtatttccctccattccattga

SEQ ID NO: 12235 - DNA, 1678 bp, Zea Mays
aacagtgtcgccactcgccacagagcgctccatcaacacgaccgccggtataaacgcagcccccctccggcctccaccaaggccaacattgctcaggctgctcccaactcccatcctccccctcccggagtacgaagtactagaaagagagcggctttcctctaagaatggcgggtggcggcgccggcgacgacgacgtggtggtggtgagctgcggcggcagaggcggcggcgaccccggcgcatacgccgcggtgctcaagaggaagctcgacctgtactgcgccgccgtcgccaaatccatggtgacatagatggggcaagcctagttacaaactctaatgtcatagaagatgatgattttcaaggcaagccaaccaacagtggcacatcaaaggaactgtcagacgatgatggtgaccttgaagagaatactgaccccgctaacgccaagaagatgaggagaatggtgtcaaaccgggaatcggctaggcgatcaagaaagaggaagcaagcacacttgaccgatcttgaatcacaggtttccaggttaacgtctgagaatgcatctttgctgaagcgactggctgatatgactcagaaatacaaggacgcttccgttgacaataaaaatctaacagttgatgttgagactatgaggagaaaggtgtgaggagttgtaaaacgaaacaaaacattaaaagcgcacataccatgccgcaatgcgccaagtgtgtgtcccattaagcctgtggggtgttgcccttgccttgccttgtggatgggctgctctatctcaaatgataccgagaggagtccaaacagaatactaccatacaaacatttcttaatgcttgtgtgtgagtatatgcacaactctgtactcttgtatcattagtaaaactgtgtttttttaaatatccatgctgaagggttctaacataatcatgttaagtttttatgaaaaaaatttgcttaaactatgactgttccaatcagttttttacctaaagaaggtattcacaagaatcttggcatttaacagacctgcacaccttgactttatgaaaagggacatgtcttcaggaacacagtactgttttaattccaggtgaacatagccgaggaagctgtcaggaggctaactgggatcaccctcatgctaccgaccgcttttgagaagcccacgagcagcgcgcccctgtcatcatgtccatctgatgcagcttctgcttctgcttctgccgccattgaagacagcgtgaagcatttcctccaggcgccacttgaaaacagtgggatcatcccaaacgcagcagtttttcagaccaagccagcttctctgcaccgtgttgctagcctggagaacctgcagaagaggatcgtcggggatgcaatgtattccgagaccgcgtcaacgacattctcagatcctgaagctcttgccgataggtaaaggttgctcctgtcctgtgatgaacagccgtgtgatgctctagcggcctaagtgcttctggtaatggaagttgtagcacccatgcgcctgggtggggtctacacagtgatttgtacactattttgaaggttaataataattgttgagaaatgatctcatccctttgtacctatataagtaaagtattccattaataaagagaatagagttttcactcttcat

SEQ ID NO: 12236 - DNA, 270 bp, Zea Mays
gtggcagctgtgttgcgtttcggtgcagtaggatgcaggggagtctgattctgatagtgaagcatcggatgttagcggctctgatggagaagacacctcatggatttcatggtattgcaacttaagagggaatgagttcttctgtgaagtcgacgatgattatattcaagacgacttcaacctttgtggtctcagcagccaagttccttattatgattatgctctcgatctcattttagatatcgagtcatctcatgttatgtaattgtg

SEQ ID NO: 12237 - DNA, 378 bp, Zea Mays
cagaagaactacgacatgctcctggacatattcaatccagagggctggctggagataacatatgttgatgaatcgctacggattggacgagacgacaaagaaaacatattcgtgctggagagagcagacctgccagacgtctgatgacgcgcagttcatgcgcacaggcgatccgtaattttgtgacgaggagcgagtgtatgtaacacgcagaaaacatagcctgcaaatatataaatatggtatatccgacagctaggactcttgcatggttattggcagttcgatgcagacaatctaccactcgaagtaaaaacaaacaaaaaaaaacttttcttctcgaataaagtaggtatgtatacgcacaggcacaggccg

SEQ ID NO: 12238 - DNA, 1121 bp, Zea Mays
tataacctgcgcgcccaccctcccctttgctgcacatgcactcctcctctcttgcccaccagcgactcccgtagctggaactcgctcgtcaaaaggaaaagaaacacttcgcttcagctggttgacagacgactcagagcaaaatgggtatactggtgattacggtggacctagactgctgtcgctgcagagccaagatcaccaaggtcctggactgtctcaaagaggagttctgcatcgagaaagtggagttcgatgacaagaaggagaagaaggtggtggtggtgcgtgggaagttcgacgccgagaagctctgcaagaaggtgtggtccaaggccgggaaaatcgtgaaggggattgtcatcgctgaggtgtggccaataccagccccgcccaaggagtgcaagcctgaggcaccgaaatgttgcgactgtgagaagtgcaagccgaagcctaagccggagccaccgaaatgttgcgactgtgagaagtgcaagcccaagcccaagcctgagccaccgaaatgttgccactgtgagaagtgcaagcccaagcctgagcctcccaaaccagagaaatgctgcagtgcctgttgtcactgcaagcctaagcctgatcccaaaccgctgatatgttgtgtctgttgccactgcaagccggagaagaaggaagagaagaaggaagaaaagaaggacgaaaagaagccggcgccggccaaaacggagtacaagtttgtgccctacccgtacccgctgccgaaccccgcgatgtgcccgagctggccgtggcagtgcccgcctcagcagcagtgccagtgctgccagaagcctccgcctccgccgcccaagtcgccgccgaagccgccgccgtgcacctgttcgagccacgccgcctgtgtctgcggcaagacaccgccggcggtctggccaccgatgccgccgccggtctggccgcccccgtggggcacctgcaacgtcgtcaccgaggagagcccgtgctccgtcatgtgacgctacgcgcttgctttgtcatgtactcgtcgctgttggcctgttgctgtgctgccatcggtactggacctcggtgctacttgggccggtgccattctttttaaaaaaaaa

SEQ ID NO: 12239 - DNA, 563 bp, Zea Mays
ttctccccctatcctccctgctggttgaaagaacttcaccaaaagtgtcccaaggaaatggatgaatatgctggttgcatgtattactacaccaacgaattcgacttctgccgtaaggagcagcaagcttttgaggaagcctgccccatttccgagtagatcttgagagttttacttgcagtggtcttcgcaaataagggaaaaaaggcagaaaaacagcgttcatgatatcccatgtttgttgtcctcatggaatttgtactggtgaatgaatagcacagcctggagctattcaccccatttgccgcccctcaggattttagagcaggcgaatgctctaaaatggtgatgatggtgttttctctttatggttcacaaattacatttggcggactcgctgttatttctgtctgtcccgagtgtgttaacccgctaatctgatcttctgctctggacttccacaaggctatggcacaactacaatgtactcctacatcatatcgtctcaaatctgaatagtctgtactctgtacagactacagaaaaaaaacattcattgcctt

SEQ ID NO: 12240 - DNA, 364 bp, Zea Mays
cgttatgagatcttcggtcctgaaaacaaggacctgttcaccatttttgagggcctaataagtcgcaatattcgctagtctcattacccatcgttactagtgattcaagttttaccggtatattgttattacgatattcatcactgtttgtatttgaagtctgtggtctgttacggattcttggtatatagtagttctatggttcatcttttcatgcttatgtccatgtagaatgggtttgtctggaagctacaatttatattccaatacaaatggaagctaaaattgtacgtaccaacttgcatgtttctacattatttattatttttcttcttttatctacacatatttgatgatttataat

SEQ ID NO: 12241 - DNA, 2485 bp, Zea Mays
gaagaaaaaggcaaagaaaatcaatcctcgccgccgataaatccacagttcaaagatcaggccgacggctttccattcacctgcccagcggaggaagagtgcggattgcggcggcgccggcggacgaaacaatggcgtcggcgagggacgagcatcttgatgggattcgcgcgctgatggcggcccactcgccgccgctccacgggctggtcgtcccctccgaggatgcccaccagagcgagtacgtgtcggagcaggataaacggcgggagttcatctccgggttcacagggagcgctggcttggctcttatcaccatgaaagaggcattgttgtggacggatggccgctacttcttgcaggcaacacagcaactgagcgatcgttggaaacttatgcgcatgggagaagatccaccagttgaagcatggattgctgataatctggctgatgaagctgtcattggaatcaatccatggtgcatctctgttgattctgctcaaagatatgagaactcattttcaaagaggcaccagactttgtttcagctttcttctgatttggtggatgaagtatggaaggatcgcccgctagttgaacctaggcctgtaattgtacacccagtagaatttgcagggcgcagtgtaccagaaaagatgaaggagctaagagaaaagcttgtgcatgaaaaagccactgccattataataactgctcttgatgaggttgcttggttgtacaacattcgaggaagtgatgtggattatagcccagtggttcactcttatgctattgtaacattgcacagtgctttcttttatgttgataagagaaaagtaactgtcgaggttcagaaatacatgtctggaaatggtatcgaaataagagagtatgaaactgttcaatcagatgcaagtttgcttgcatctggcaagctacaaagttctgtacatgtggaaaagtatatggatgaggtggagagttcaaaaatttggattgattctggctcatgttgccttgcactctactcaaaattgagtccacatcaagttttgacgcttcaatcaccaattgcccttccaaaggctgttaagaaccccacagaactggatggattgaggaaggcgcatattcgagatggtgccgctgttgtacagtaccttgcttggctggataatcagatgcaggagaactatggagcttctggttatttcagtgagataaaagggtcgcataaaaatgaacatttagcaaccaaacttactgaggtgtctgtgagtgacaaacttgaaggcttccgtgcaacaaaagagaactttaaaggtttgagttttcctacaatttcatctgtgggaccaaatgcagcagttattcactataaacctgaagcaagcacatgttcggaaatggatgctgataaaatatatctttgtgactctggggcacagtacctggatggtacaacagacattacaagaactgtacattttggtaaaccctcagcacatgagaagtcatgctacacagcagttttgaaaggccacattgcactagacattgctgtgtttcctaatgggacgacaggacatgctcttgatattctttcacgagcaccactctggagagagggtcttgactatcggcatggtacaggccatggaattggatcttatttgaatgtccatgaaggtcctcatctaattagcttcagaccttctgctcgaaatgtaccgctgcaagcatcaatgactgtgacagatgagcctggttattatgaagatggggcctttggtataagattggagaatgtacttatttgcaaagacgccaatgctaagtttaattttggagataaaggttatttggcatttgaacatataacatgggctccataccagaccaagctgatagacaccgggcttctgacccctgttgagatcgactgggtgaacacgtaccactcagactgccggaagatcttggagcctcatctgaacgagcaggagaagcaatggctgatgaaagctactgagcccgtagctgcaagaggctgagccttttcgtcaacgttgcatgccaccgagcgccaggctcatcttctgcgtggcatacatataagattggctgcccccgctggttaaataataatagcggcgaaggaacaggatagcttgttctcaacgctgatcttcgccgctaaagtggagtgtttggcaggatgctattttctttcccattagggtacgttcgggttttacggaacggtaggtttttatacggaacggtgggtacaacaattcctagagccggattgtttctctaattatttatataaggtttgatcaattgaaataattttggatccattcttgacaacctaaggcccataagctgatttgtacagttattctgggaagtcgcttccaactgaatacgctgctaattgtttcgcccaaaccggatagccttctttgacgctaaataa

SEQ ID NO: 12242 - DNA, 718 bp, Zea Mays
aacatctcgccgtcatcacgtctctctttcaacttcgttcgcaagaagctcagaacagaacccatcaaaagcgaggctgcgagagagagagagagagagagagagagagagcgagagagagagagagagagagagagagagagagagagagagagagagagagagtgagtgagggaggcgccgccgcgccgacgccgagtcctttctccatcctgcatctgccgctgtttccgacaggatgtttctcacgaggacggagtacgaccgcggggtgaacaccttctctccggaggggcggctgttccaggtcgagtacgccatcgaggccatcaagttgggatccactgcgatcggtttgaagacaaaggatggtgttgtactcgccgttgagaaacgtgtgacctcaccactgctggaaccaagcagtgtggaaaaaataatggaaattgatgagcacataggctgtgccatgagtggacttattgctgatgctagaacactagtggaacatgctcgtgttgaaactcagaatcataggttctcatacggagagccaatgactgtagaatcttcgacacaagctatctgtgacttagctctgcgttttggcgaaggtgacgaagagtcaatgtcacggccatttggagtctctctcctaattgctggacatgatgagaatggacctagcctatgcttttctttacttaatggaatgttg

SEQ ID NO: 12243 - DNA, 76 bp, Zea Mays
cttgcaaaagagaccctgggttttcatacattcaacctaccgtccacacctgtggtaaagtaattgcacctggacc

SEQ ID NO: 12244 - DNA, 1672 bp, Zea Mays
gtggactcacatgtaagtgagatagtaatggtatgaatccaaagtggtgatcttttaatggtatgaatccaaatttccccttttaaaaatagtatagattgaattctccccctcaaacaaaccactcttcgcttcgactcccactcccactctccctttccactctcaggctcccactccccccctaccggctaccctacccatcacacacaaacagccactcctcacctcccccgtcctccggttcatgtcctgctgctccccatgtcgcccccactcgacctcgactacataggcctctcgccggcggcggctgccgccgctgcccacgacgacctgaagggtaccgagctccgccttggtctgccggggtccggttcgccggaccgccgtgttgtggctgccaccgcaaccaccctggacctgctcccggctaagggcgccaagcgcgggttttctgacgaggcgccgacgccatcgcccggtgcagcttccgggaagggaaagaaggtagcggaagaggaggacgacaagaaggttgcagcgacgccgcagccggtcgcaaaagctcaggtggtgggatggccaccaatccgaagctaccgcaagaacacgatgtctaccacccagctgaagggcagcaaggaggatgctgaggccaagcaggaccaggggttcctgtacgtcaaggtcagcatggatggcgcgccgtacctcaggaagattgacctcaagacttacaagaactacaaggacctgtcgactgcgcttgagaagatgttcagtggcttcagtactggtgagatgtctcgggttactctcctctcccggatggcacgtcagtatgtaattgtgtttcattttgatgtggatggtgtaagaagtacatcaagaagcctttaaaaagcatcataattgattccttggataagcaatagctttgacttaccgttagttttgagtaattgtgagattacaaacaattgaatccttggataagcaatagcttcgacttaccgttagttttgagtaattgtgagattacaaacaatctggcacatcttctttttttatctttagtgaactttttattccttgctaaacaaataccctgctgcttgttctgttattgcatttgcatcaagtctttcttagaaagattttatttcctgtaaggcaaaataatttttgtctccatgttatgattattcgaggatatcttcgggtcctgagtattattccagaaagctactatcactatgagagcaacatccactatatatttctgaaatttggagatctatggtctgtcctgtatttgtatatctaatatctcattagttgtcaccactttcttagaatcatggacatgaaaatgcggtccgagtcttttcagtagaaattttagtacaagaagaggttctcttctgctttccttttattggtcttacaggttagtatgggtgtaatgccatatcaggcaaggatggcttatctgagtaccgcaaggatggtgaatatgttctgacttacgaggacaaggatggagattggatgcttgttggcgatgtaccatgggagatgttcgctgactcttgccgcaggctcaggatcatgaaaggatcagatgcaattggacttgaaaggagacataattcatggtccctgcatc

SEQ ID NO: 12245 - DNA, 69 bp, Zea Mays
cttcaatgagctcttgctcagtattttccacctgttgagtaccgggctcctcaattgcttgctcgtcta

SEQ ID NO: 12246 - DNA, 2849 bp, Zea Mays
ctgtgatcacttcgggccacccagctgaggagagtctgaaataccgtttgctgggttctgaaggtgatattggttcatggggtcatgaatatgtgagaaatttggccggtgagattgcacaagaattccaaaagcgtcaggatgatgacttgcatgctctaatggtgctagtccagcaaattgtttcatttcacatgaagcataatgctgagcctgaagctgtggatcttcttatggaggttgaagaccttgatttactagttgagcatgtcgatgcaacaaactacaaaagagcttgtttgtaccttactagttcatccaaatttctccctgcccctgatgatagtttagcacttgacatagcgtataccatctatatgaagtttggagaccttgcaagtgctttgagaatttctctgcaacttgagaaatctgtgcagtatgtgaagcaagtctacacagcaactgatgatcttctgctgaagaaacagttctcttatctcattgcgcgccatggtttggctatggagattgatgacgagatctctactgatgataatgataaggaggctttacaagaaatagtaaataatactaagttgagtgagggatatcttactcttgctcgcgatattgaggtcatggagcctaaatccccagaggatatatacaaggtccatttgattgatggccgtggtgccagctccagtcttgattccgcaagacagaatttagctgcaacatttgtaaatgcatttgtgaatgctgggtttggcaaggacaagttgatgaccgctccatctgattcacccagcagcgggtcttccggaaattggttatttaagaacaaggaacatggaaaagccagtgcagcagctagtctgggaatgattctcctgtgggatactgattctgggctcgctcagcttgacaagtacttgcatagtaatgatactcatgttgtagctggagccttgctaggtattggaattgtcacttgcggggtgaagagtgattgtgatcctgcgtttgctattctcatggagtatattggcaaagatgactcaaacattcgtattggagcaatattgggtcttggaattgcatatgctggttcccagaaagaagagcttaaaatgcatctatctgctgtgctgggagactctcaatcacctcttgaagtattggtcttctcagccattgccttggggttggtgtttgttggttcttgcaatgaagagattgcacagtctattatatttgccttgatggagcgtagtgaggctgagttggcagagcccattatacggttgcttcctgttgcgcttggccttctataccttggaaaacaggatagtgtggaggctaccgcagaggtctctaaaacatttgatgaaaagatagggaagtactgtgatgtaacacttatgtcgctggcatatgccgggacaggaaatgtgcttaaggttcagaaacttcttggcatttgttcacagcatcttgagaaaggtgaaacacaccaagggccagctgtccttggaattgctcttattgctatggctgaagaattaggagctgaaatggctgtacgttcacttgagcgtcttctgcagtatggcgagcagaatataagacgagcagttcctcttgctcttggtatactctgcatatctaatcccaaggtgaatgttatggacacactgagtagattgagtcatgatgccgatgccgatgtgtcaatggctgcaattatctcattgggtttgattggtgctggcacaaacaatgccagaatagctgccatgcttcgcaatctttcaagttattactacaaagaagcagctcatctgttttgtgttagaattgctcagggccttgttcacctcggaaagggcttgttgaccctttctccgtaccattctgatagatttcttctttccccgatggcacttggagggcttgtaactgttctgcatgcgtgtcttgatatgaagtccactatcctagggaaatatcactacatactttacattattgtcctggcaatgcagcccaggatgcttttaactgtcgatgaggatctgaagcccctctcagtacctgtccgcgttgggcaagctgtggacgtggttggtcaggcaggaaggcctaagacaattaccggctttcagacacactccacaccagtcttgcttgcagcaggggagagagctgaactagcaactgaaaaatacatcccactgactccggtattagagggctttgtgattttgaagaagaacccggagtaccatgaagagtgaaacgctttagcatgccaaatagcatggtgtttcggaggctcgtgcacatggcagtcttcaagccctggcgcacccctcgtcgagaaatcgctcgccctttgctcaacccttcgcctggagttcatgttgaattcttaccagagttgtggctaactgaaagctgtcttcggttgtgctgatatacgattgtatctgtacgattgtagcaattactgggacagcttactctgtatggtgtggtgataacgtggcatagcatttttggcgctggtctaggttagtccttgtgttgacatggtgcaccatcattataagttttctgtattttatggatccgttctgttcgtgtgtactggaaacattgtacacatgatatgtaagtgtgcctccatgtgtatgtgtgccttcgtgtgtgttttggttttgtctttagcatggcttttgtccccttaaaaccaaaagacaaatcaaagcgctcgaagcaactttttccaaatatatatggaagaacttttagggctgatttggtgatgggttttttacatt

SEQ ID NO: 12247 - DNA, 412 bp, Zea Mays
gaggaatcacggcaaaacacggagggatctgaaggtgattcagacgatgacttgccccctctcgagaagaatatgaaccacctgaacctcgacgaagatgaagaaagcgaggaagagagtgaaagcgagtaaaattgtgggctgaaagtgctgccatggtaactttacgactgttttacaactgaatttcagttgccttgcctgctacgaagcaaccgttgtaggtgcttcagtgtctaatagccagaataagcttcagtggccttttcgcccagatgttgaatgcatggttcgaaaagaaatccttgtacgccttagtagtgtgtatctatagcactatctttgaagataaatgatgaattgaacacattgagatcatttttctttctaggagaatatatatatatatata

SEQ ID NO: 12248 - DNA, 3566 bp, Zea Mays
ggagctgtacgtctcctgcgagtggaatgttgagctcgtgagatactctgcaagcaatggatcggcgcagctggccttggaagaagaaatcatctgatagatcatcaaatgcagatgcgttgcagaattctaatcatgctgaacaggaagataaagctccaaagtttgtgcaaatttcacctcaaacatattcacatcttactgagtcagaggaaaaagtaaaagttttagaagaaaatgtgaaggtcttgaatgaaaaactgtctgctgcacaatctgagatcacaactaaagatgctcttgtgaagcagcatgcaaaggttgctgaagaagcagtatcaggttgggagaaagctgaagcagaggcctccgcactgaaggttcagctagaaactgttacattgtctaagctagcagctgaagaaagaggtgctcatctggatggtgcattgaaagaatgcatgaagcaagtaaggactgttaaagaagaaggtgagcagaagctacatgatgtagtatttgcaaaaaccaaacagtgggagaagataaaggccgagttcgaagcaaaattacttgaatttgaacaggaactcataagggctggtgctgagaatgatgcactcacaagatcacttcaagaacgggcagaactattgatgaaaattgatgaggaaaaaggtcaagctgaagctgagatcgaaattttaaaaagcacaattcaatcaggtgaaagggagataaattcgctaaaatatgaattgcatgttgtctccaaagagcttgaaatccgcaatgaagaaaagaatatgagtgtgcgctcagctgatgtagcaactaaacagcaccaggaagatgtcaagaaaatatcaaaactcgaagctgaatgccaaagattacgcggccttgttcgaaagaagttacctggccctgctgcactagctcaaatgaaaatggaggtggagagcttgggtagagaatatggagaccacagagtacgaagatcccctgcaaagaattctagttttcatcggcctatgtctcctgttcctgattatgcaatggagaacatacatcacatgcagagagacaatgagtttctgactgctcgtttattaacaatggaagaagaaaccaagatgcttaaagaggcattggcaaagagaaacagtgagctgcaatcttcaagaagcatgtatgctaagacaacaggaaagctccgaagcttggaagttcaaatgttgactggaaacaaacataagagtccatcaactccaaacatggatattcactttgatggtgcatttagccaaaatggaagcaacccacctagcatgacttccatgtctgaagatggggtagatgatgaaggaagttgtacagaatcttggaccaatgctctggtatctgagccctgtcaattcaaaaaagagaaggcagccaagagcagcacgacagaaagctccaataggttggagctcatggatgacttcttagagatggagagattagcatgtctgtcttctgaagttaatggcaatggcagtactgttgacaagatgaaggtagacaatgttggggctacttttgctggctttactgaaagagatggtgttaaagatttgcagtcagcttcaccaatgtcagaaactccatctaataaacagtgtctgtctgagaaatctccgcttttgaatttccagtcaagaatatcttccttactggattctgaatcaccagagaataatgctggaaaggtacttgatagcatcagaaacattctaaaggatattgaagatgaggcagattcggtgaatgtaaatgggactcatccttcagatgggaccttaagttcagagagcaaatttgccatggatcaagatcttaagaatgccatattgaaaattctagactttgtgaagttacttgatcaagaaatctccaagtttcaaggccagtcacctgattatgatggactatgtgagaaaacacaacagttctctgcattagtcgataaagttctgtcaaacgttgatgttctaaatgatattgtcatagcactgtctgttatcttgtcagaaactagccagattaagttcacattgttgagagacaatagcaatgaagcagaaagtaataacttagattgtgttgataaagtgactctacttgaaaataaggtgcagcttgagccagtaaaagacaatgttcctggtatctgcccactgttgcctcattcatcttctgatcctgagtttgaggggcctgctgatgctagattcgatgttaagactgcagtgaaggtgtactcgccggaggaatatgaacaacttaaatctgagaaggcaaatttggagggagaactagcaaagtgcaacaaaataatagaagaaacaatggctaggttaagtgatatggagaaaaaactggaagacctgacatctaagttggctgacagtgagaaatcaaatagcttgaatgagacacagttgaagtgtatggctgaatcctacaagtcacttgaatcaaggaaaattgaattagaaaatgagatagaagcgttacggtccagaatagatgctctaacagctgaactctttgatgaaagacagagtcatcaggaggacttagttaaatacagagatctcgaggagaagatggaaaggtatgagatggagaggagttcaattcttgtggatgaggacccagacaacaagtcaaagcaggagagagagatagcggctgcagcagaaaagctggcagagtgccaggagaccatattgattcttggccgtcagctgcaagctatgcgtcctccagccgagtcgctaggctcttcacctaatcggcaacgcatggaggagtttctgaaggatgcggcaggaacaaccgcaggagaatatttccagaaaccttcaggccaacctgatacagaccaggatatgcttgggacaggaaatgtgtctccgatcagtgggtacaagacacacatgatcccttctgatgcggacgttagccctttcccttctccaaacacctccaagcgcccgaagcatcgatcgagatcctcttcgtcttcctcattcaccaaccaccagttgccagacaaacagaaccgaggattcagtcggttcttcgcgaagagcaaagagtgaaactattccggatcgcggtgttaggtttgttgatttttggcgccaattgggtgggatggtggtcatgaatttctgtagagctagtgagggatgcttgcttgtgcgttctctcaggtcaggtgattcctttgggttgctggaataatactcagcttgcagtcgagcgggttgtggcgagagtgtgtgggggaatatttaagttgtcagtctcttctgctagagcttttctgggtttctgtgtgctcgaaacctcactaaaacctcactgtacatgtgcttacttgcttgaaggagcttggctgttggtttgtgtttaatcctcttgtgaattagcccgtgtattgtgcttgtactggtttggtgtacaattaacctgcgcccatttcaagggtattgatgtcttccctcggttct

SEQ ID NO: 12249 - DNA, 1110 bp, Zea Mays
gcttgccgctccctcaggctcgtcttgcgcgtgcccgccaaacccacgccgccccgccggagttccccaacacctatcttctcgtcggatgctgcaacgacgagctaacctaccgctacaagggcaagaccgtcatgacccaggaagagcgatacgaatccctgcggcactgcaagtgggttgatgaggtcattcctgatgcaccgtgggttctcacacaggagtttattgataagcatcagattgactatgttgctcatgatgcgctgccttatgctgatactagcggaacagcaaatgatgtctatgaatttgttaaaaagattggaaaattcaaggaaacaaaaaggacagacggggtttctacttcagatctcataatgaggatcttgaaggactataaccagtatgtcatgaggaatttagcacggggctactcgaggaaagatcttggtgtgagctatgtcaaggagaaacaattgcaagttaatatgaagatcaataaactgcgggagactgtgaaggcacatcaggaaaagttgcaaacagtggcaaagactgctggtttgaatcatgaagaatggcttgctaatgcggatcgctgggttgctggtttcctagagaagtttgagcaacactgccacaatatggaaactgcgatcaaggatcggatacaggagaggctagggaaacagttgagcaaaggaataatcgctggtcttgtgcaggaaccggtgacagcctaaaacaggtgatgctgtcaatgaaacgcactgatgcttttcagatcatcctcccgatgtggttctggtgcgaggcttgtaagggtgcaacgcggttgctgagacgttttaattttgtggtgcatgtgaactcttcccgtatacaaatgtctataggagaggcgtttggtgttttgggcatcgtcgtgggcgtgtttctttgtatctaacgggttagattaaccttttttttgtatcgagattgatgttctttcgtggttataataataataaataataataatattgtcaaagcacaatgttgatgacattctagatttggtaccttaatgactctgtatttacgaatgtatgatatcatatctat

SEQ ID NO: 12250 - DNA, 89 bp, Zea Mays
ggcacttattcagtctgccatcttcaggttgatcccccagcatcaccttggggagaagcccacgcttaacatcatcttgtggtcgactc

SEQ ID NO: 12251 - DNA, 1586 bp, Zea Mays
aaagctcaaagctactacaggggactaccagatgggcggcgccgtggagccgctggaccccggcgcggtgggcagcgtcgtgcggtacggcctccagaactacacctccggcatcatccaccacgtccgcctccagggcctggagcctgggaccaggtacttgtaccggtgcggcgacccggccatcccggacgccatgagcgacgtgcacgcgttccgcacgatgccggccgtcgggccggggagctacccggggcggatcgccgtggtcggggacctcgggctcacctacaacaccacctcgacggtggaccacttggtgcgcaaccgccccgacctggtgctcctcctcggcgacgtctgctacgccaacctgtacctgaccaacggcaccggggcggactgctactcctgcgccttcgccaagtccacgcccatccacgagacgtaccagccgcgctgggattactggggaaggtacatggagcccgtgacgtcgagcatcccgatgatggtggtggagggcaaccatgagatcgagcagcagatccacaacaggacgttcgcggcctacagctcgcggttcgcgttcccgtcggaggagagcgggtcctcctcgccgttctactactcgttcgacgccggcggcatccacttcgtcatgcttgcgtcctacgccgactacagcagatcaggtgcgcagtacaagtggctggaggcggacctggagaaggtggacaggtcggtgacgccatggctgatcgcgggctggcacgcgccctggtacaccacctacaaggctcactacagggaagccgagtgcatgagggtggagatggaggagctcctctacgcctacggtgtcgacgtcgtcttcaccggccacgtgcacgcgtacgagcggtcgaaccgggtgttcaactacacgctggacgcgtgcggccccgtgcacatctcggtgggcgacggcggcaaccgcgagaagatggcgacggcgcacgcggacgaggccggccactgcccggacccggcgtcgacgccggaccccttcatggggggccgcctctgcgccgccaacttcacgtcgggccccgccgcgggccgcttctgctgggaccgccagccggagtacagcgcgtacagggagagcagcttcgggcacggcgtcctggaggtcaggaacgacacgcacgcgctctggcggtggcaccgcaaccaggacctccatgccgccgccgccgccaacgtcgccgccgacgaggtctacatcgtcagggagcccgacaagtgcctcgccaagacggccagattgttggcctattgattgatccatcactcctagctactcctactctggtcgctgcctattgattgatccatcaatcctgttaattttcagaagagtttcagaagagtcttaatactcctagtcttaatagtcctagctatgcaaatatgcagtgttaatttgcggcagtaccagattaagcttccatccagattggcagcggtcaattcttgtccttggcacactactcgagatgaaataagctttaccttaaaaccaactgtttagatcggtgcaa

SEQ ID NO: 12252 - DNA, 1986 bp, Zea Mays
aaaggctttcgtgtgccctccggtccggccgccttctccgcgcgcgctaggagtaataaacggaaggcaccaatctcggaggcaacggcccagacgcgcaagcggaagaaagggggagcgcaacattcgcggccgcggggagggagagagacaaggggggcggtcacacacacgcggaccgcgcgagctagcgagcgagcgagatccccctctcgcgctgctggatccgatctgacctgaccttacctcgtcgccgccagccgtgagagagagaagaggaagaggaggaggaggcggagatggcaccggtgtcggcgctcgccaagtacaagctcgtcttcctgggggaccagtccgtcggcaagaccagcatcatcacccgcttcatgtacgataagttcgacaacacttaccaggctacaattggtattgatttcctgtcaaagacaatgtaccttgaagatagaactgtgagactccaactctgggatacagctggtcaggaaaggttcaggagtttaattccaagctatatcagagactcttcagttgctgtcattgtattcgatgttgcaagcaggcagtctttcttaaatacatccaagtggatagatgaagttcgcactgagaggggcagtgatgttatcattgtgcttgttgggaacaaaactgaccttgttgacaagaggcaagtctcgatagaggaaggagaaggcaaggcaaaggaccttggtgtcatgtttattgaaaccagtgctaaagctgggtttaacattaaggcgctgttccgtaaaattgctgctgcccttcctggtatggagacactctcatcagcgaagcaggaagacatggttgatgtgaacttgaggtctggcaatgcaaactcgtcccagtctcaggctcaggctgggggatgcagttgttagttgcagtctctgacacttgctgctcatgatctctgagaccctgagcatcagaacgcgttaccactgatgcttctctcgggaaggagagttgatcggcattgaacacgcacacgctatagtttttacccggtgaatggaccatttgcattggaacgatacgtttgagttctctagtgttatttccagtggcctaagctagcaacagtgtatagttgggttggcactgcaaacttctaccgttcgagttgggtattagagctagttattggttcatgttgaacttatattattttctatcttgctgcagttatgtttgctatgtgtaccaaacatgtattggaatttttgtaagctataatatggccagcacagcagtagcctcacatgataccccttgaatctgtatcgttcaaaccgtggtatcctaaatttatatcgttcaaaccttttgccttttgcttttgagggtgtgtttggtttgtccaaacctcgcgctcctcctccggactctccccagtccccactccgtctcaaccccccccccccctccctccctccctccctccctccttgtcgcgcccagccggcctccggtccttcttcccggttcctggttgccgcctcggaacgcatggcgttgcacttgcagagcccgagttccttcccctacaggaggaggacacccggttcgtcgtggtaaccttctacaaattcgtgcccctcgacgacccccacgccgagttcgccagacacctcatcttcctccagtactatcgtgtttctgtcgggactcgggaagctcaagagagcgaccaccgcactggaggccgaagggaagggacgagatcgttgaatcgcaggtggacggctaggattggtcgcctgaggcgagaaggatgagtgaagaggataaggctgctacttctgctgagcaccgaagagggcccctaagctcaattaaaggatcctctcttctctgtccaggaggtccgtagctgctcatctttggcatgagcatgatcttgagatcgattcaatcggccatgttgggcccatgctt

SEQ ID NO: 12253 - DNA, 106 bp, Zea Mays
gtcaccgcaaaaaaaaaaaaaaaaaaaaaaaaaaaaaaaaaaaaaaaaaaaaaacaatggtgctgctgaacagctgaagcgctgacgcacgcacgccatgtgccaa

SEQ ID NO: 12254 - DNA, 1846 bp, Zea Mays
ggtcaaactggatcgggaaagacctttacaatgagtggtcccaaaattttgacagaagaagggctcggtgtcaactacagagcactaaatgatctatttggtatccaggagcagaggaaagatacaatttgttatgaaattgctgtacagatgatggagatatacaacgagcaagtgagagatctccttcagactggcggaaacaaaaaattggaaattcgaaataattctcaaaacggaattgcagttccagatgcaaatgtggtgccagtcagatcgaccgctgatgtaattgacttgatgaatctgggccaaaagaatcgaacagtttgctcaactgccatgaatgaccgaagtagtcgctcccatagctgtctgactgttcatgttcaaggacgagatttaacatctggaacagtcctaagaggttgcatgcatcttgtggatctagctggcagtgaaagagtcgataaatctgaagtggtaggaataggattaaaggaggcacagcacataaacaagtcactggctgcactgggagatgtgattgcagctctagcccagaaaagcacacatgttccttacagaaacagcaaacttactcaactattgcaagactctcttggtaacccccaaagttcgaaatccttggtttgcaacttgccagcaccaaagatatgcgctgtgagtattttgtttccccttttttcaggaggacaagcgaaaacattgatgtttattcacatagccccagaaccagatgctattagtgagtccataagtactttgaagttcgccgagcgtgtttccactattgagcttggagcagccaagtcaagcaaggaaggaggaggaggaggaggaggagaagccagagagctcaaagaacagattgcttgcctcagggcagcattagctaggaaagatggagatcatgagagcatacgaagcactcaatcgagcccagacatatatagaatgggaacgggtaatgcatcacctgcgtccaggcacccaatagaagatgggatcatagagaacgactcagcattgggagatttggctgaacactcacagttcgggagcagcaattccctaccagagttgggacctgatgccacacaagatctagccttctaccaaagaagcaactccgaacagcaatggagctggtctgggtctgttgcaacggaggattccgatgatttcgaggttgcaactaattgctcgttagagctggactgcgtgaggccatctagtgccccaaaagcttcaggtttatcaaatggagggggcacagctgtaaaaaagatccaagtcaagggttcaaaaggttcagacgttaggggagtgaatcctggaaaaaggtcatcgccattacagaagaagccgagtggaccctcaccgacgctaatcaagaagggcggaggtgaaggaaggaagactccaaatggtaaaacaggaaccaagaagtaagcaacccagatgaaacttggttttgctgtgaccaacttcaccttggttagggacagataaacatgttgatactatcgggtgatacattgatatttgccacacgaatacgtcagtcctcttaagggaggaggtcgctagatcttcgggcatctgctgtaaatcactcgttgatttgttgtagtacgaacagaaaacggaccacaaaaaactcgaggatgggaggaagatcatcatcacaaggacgtttttgttagatgtatatgttgcttagcttatttttctcgctgtgtgtaagggcttctatgccctgcccatgtacatgtttggcttcttgccccatggaatatacaaagctcatttcgctctaaca

SEQ ID NO: 12255 - DNA, 1371 bp, Zea Mays
agaaaggtccccgtagaaattcgaaaccacaccaccacctggaaacccagacaaagcacgagccacgcacggcccccgctgcctcccttccgccgccgccgccgccggcggcgcgccaccgtcgctgctctcccgccttcaccgcgcccaactccaatccttgcctcccccgcgcgcttcagcctcttcactccccatcgttttcgcctggccagatccaggtttccttgacccagacctcgcctgccttacgcctccggtcggattcttcgccgtccttgtccccactgggcaccgctggggtggagcggagatcggatccgccgggagctgattccttctctcgcagtctagtttgacgcggattcatttgctggtcggcatagcatgatcctgcggtgattgcggatagcttgtgcaagctggtggcttgggtgttgtctttttaatctggcctaaagatatcctgagacggtagcgtcacatggatgctagtacagaggttactgatgctattggtgcggtgggctttgacaatggggccgcggggaagttgccgcccagtgatagtgtagaggggcacgcagaagaacacgatgtgctggctgatggagcccattcgggcgagagcgaggtgatcaacccatctgaagaagtagaaatggaagccacctcgcagtcccaggacataaagcctcgagttcctgagggggttcaaggccattcaatgaaggttggtactaaatctcagcgacagagccctcgaggcggggataagagtcaaactaggaaaagctcttttagtccttcttatcctaaggcgcccattgcacgggtttctgatccagatctagttgattgctctttgagcaatggtgatgctggttccagtaagaaaaaggccgaaaagagcagtttccgcccagttgccaaggagaccccatcacttgaggactcaaatgagaagaaaaaaactcagaaggcatcaaaccaacattctgtcaaaaaggatattgaagaagaatcaaatgaaagtgtgaaacctcaaagggttggcagcactccttcatatggatttagttttaagtgtgatgagagagctgaaaaacgaagagagttctactcaaagctcgaggagaagattcatgcacaggaactagagaaaagcaacttgcaggcaaaatcaaaggaaactgaagaagctgaactcaaaatgctgagaaagagtttaaatttcaaggcaacaccaatgcccagcttttataaggaaccacctccccccaaggttgagttgaagaagtgcggtgctccagccgccaacctacagacgcatcgcgcccacacgccacagccgtggtgccgccagccgcc

SEQ ID NO: 12256 - DNA, 864 bp, Zea Mays
gcgagaattacggcccattagggttcacttccaaactcggcatctataaacacttctctcacgccccgccgccgcctccgctcgccaccgtcgtctaagttaggctagggttcgaccagctagcggaaatggtggccttcaggttccatcagtaccaggtggtggggcgcgcgctgccgacgcccggcgatgagcaccccaagatctaccgcatgaagctctgggccaccaacgaggtccgcgccaagagcaagttctggtacttcttgaggaagttgaagaaggttaagaagagcaacggccaggtcctggccatcaacgagatctttgagcgtaacccgacgacaatcaagaactacggcatctggctgcgctaccagagcagaaccggctaccacaacatgtacaaggagtaccgcgacacaaccctgaatggcgctgtggagcagatgtacaacgagatggcctctcgccaccgcgtgaggtccccctgcatccagatcatcaagactgcgacggtgcacttcaagctctgcaagagggacaacactaagcagttccacaacagtgagatcaagttcccgctcgtgcaccgcaaggtcaggccgccgaccaggaagctgaggaccacgttcaaggcttcgaggcccaacctgttcatgtgatttagctgtggtcagtgtatgcgatcataagagtcacaagtgtttctgtttttttttaagttttgacttcctaatagtaatacttaatcggtttgatgattcaactcgttttgaagcgagcttggtgaaccaatcgacgtgttgcgggttgttcgctctcggcatacttgaagtggtgtgggtcgtggctgatgatgcg

SEQ ID NO: 12257 - DNA, 1125 bp, Zea Mays
gcttggcgggcgtcgcagtgcgagtgacgctagggaaacgagaagcagaaaggcaacaatagcaatatgaaggcttcttcgaaagtcaagaaagaagtcagttctgatgatgattttgtcatgccaacggcgcagaagaaaagtgcaggtgctgctggaagtaatgccaagacatccaaggttaaaaaaattaaagatgaagatttggaagatctcaaggaggacaagaaaaggaagaaacgagtgggtgtcaaagaagaggcaaagttggccttggccattgtaaagggagagaaggttaagaaagagaggaaagtgtatggtttgccagggcagaagcatgatcctcctgaagaaagggatccattgaggatattctatgaatcactctatgagcaggtccccaccagtgacatggctgcaacctggttgatggaatggggtttgctcccggtggatgtggctagaaaatgttttgagaagaaacaaggtcagaaggttaagtcaccagtcaaagcaattgtggcgaagagaattccttcttctccagccaagacactgccttcatctgcaaagaagttagttatgccttcaaacagtgctggaaagctgaagtctcagaagaaaaggaaggcaagtgatgacacagatgatgacgacgacgacgatgattttgtagcttctaaagcaaagaccaagaggcacaaggcctagttaggtcctagcatctcattatcctagtaatgagacgtgttcttcagacaatttctagctcggatgaccttggatgattgttccttccattggtttgctcatttggggcgcgcaactaaattatgtgaagtagcgtgttgtgttgtgtcaagaagtaccacttgtcgatggccttttcagatctggaatgaaggtaagttcctgcaaactttcacttggttagcatttgactccagtgaaacatctggttggttagcatttgactccagtgaaacatctggttggatgactgtatttgcacggggtaacatatttcgccgagctcgacgtaggcgcatccccaagcaaaacagaatttagaataattattaggttgccgtcgatgatacgtaattctgaaaagcttgaacg

SEQ ID NO: 12258 - DNA, 1526 bp, Zea Mays
cagcgctgctgctaaaacctcccgactaaaccctagcagcggttcctctccagtctccagcagtccagctcgatcgcgatcggaggccagaaatccatggccgctcccgccgccgcgccgctcgacgagggcaaggcgaagaaagtccttcgccaggtcgagttctacttcagcgacagcaacctcccccgcgataagttcctgcgggagacggtcgagcagagcgatgacggattggtgagcttgcccttgatatgctccttctcgcggatgaagtcccacctggggctggacgcagatgtcaagcccgagactgtgccggaggagaccgtgcttgcggttgctgaggtgctccggccttctcctgccctccgcgtatcggaggatggaaagaagattggtagagctagtgaactcttgaagccagatgagatcatagaacaagtagactctaggactattgctgtatctccgctgccttgcaatgtaaagcaggaagacgtccaatcttttttcacaaattatgcaaaggtaaacagcgtgagacttccacgcaatattgccaacaaaaaacacttctgtgggactgctttggttgagttttctgaagaagaggaagcaaaaagaattatggagactgctttagtatttgcaggggcaaatctggaaataaggccaaagaaggagtttgatgctgagcaaaagtccaaaaaagaagcatatgaaaagacacaccttaaaaaggacaaccagtatgaaggctatcaaaaaggcctaattgtggccttcaaattggagaaggccacagctgatactgtagtgcagcaagataacatagataaagagaatgactctgctacgaaattagatgtttccagttccatggaaaaaccttcaggccaggggccagaggagtctatccttgagagcgatgttattaagcaagggatgtcctcagatgacatgaccaaagagaaagatctaaacactggggaagctacagaatctgagaagtgtattagtgatgtccccatagaaagtgataaacatggtgatagtgaaccattgagcagggaaggcaaaatcatttctggcaatgtgaatgtgaagaaccaaatatcgagggaggatctaaaagaagcattcaaaaaatttggagctgtccggtatgtggacttcagcatcggagataattcaggataccttcgctttgaagattctaaggcagctgaaaaagcccgcatgtctgcagtacttgctgatggtggcttgataattaaggaccacattgttactttggagcctgtgactggtgaagctgagaaggattattgggacacaatccgcagtattcaaggaaagtacaaggatagtagaagctacaagggaagggcttcaaataaccagagaggaggaaagcgtttcaacgcgaagcgagatagaaacccagactcggagaagaattctaacaaggctcggaaggttgaagctatcgcatgaggttaatttagctacaaggccagggg

SEQ ID NO: 12259 - DNA, 1631 bp, Zea Mays
taaacaattaaaggggcatcaatagactctggcaattcttcattttctttttggagtgcggaacttgaattttcttagagtgagagaaagccttaaaaatgcaaagagggattttaccaagactgaagacgacttgaaatctctgcagagcgtggggcaaataattggagaggttctccgacctcttgataatgaacgctttattgtgaaggccagcagtggtccccgatatgtggtcggttgccgaagtaaagtagacaaggagaagttgacatctggaactcgtgttgtacttgacatgacgaccttgacaataatgcgcactcttccacgggaggtggatccagtggtatataacatgcttcatgaagatccaggaaatgtcagttactctgctgtaggcggtttgtctgatcagattagggagctcagggagtccattgagttaccacttatgaaccctgaactctttcttcgggtgggaattaagcctcctaagggtgttctactctacggtcctccgggaactgggaagaccctattggcaagggctatcgccagtaacatcgatgccaactttttgaagattgtttcaagcgctattattgacaaatacattggagaaagtgctcgtttgattagagaaatgtttggctatgcacgtgatcaccaaccatgcatcatcttcatggatgaaattgatgccattggtgggcgaagattcagtgagggaactagtgctgatcgtgagatccagcggacgttgatggaactccttaatcaattagacggttttgatgagctcggaaaggtaaagatgatcatggccacgaatcgacctgatgttctggaccctgcgctcctgcgtcctggacgtttagacaggaagattgaaattccgctacccaacgagcaatcaagaatggaagttctaaaaatccatgcagctggtattgccaagcatggggaaattgattatgaagcagtcgtgaaactagctgaaggtttcaatggtgctgatcttcggaacgtgtgcactgaagctggtatggctgcaattcgtgcagagagagattatgtagtccacgaagacttcatgaaggctgtgcggaagctaaatgatgcgaaaaagctggaatcaagtgcgcattacagcgcagattttggcaaagagtaatgtatgatgctggacagatgcataaggcgtgtatcatcagggagctctgtcagatgcgatgcaaaagcgaaagaaaccagctatttatgttcaggctccaggcagctccactttttcctgatattcacaattttagtgaggaggattgtcaagctgaccagtgggggaaatcagtcgagaatttagtagttctgcgccagatggcctttgcttctgtaaatcgtacgtaatctgcttccgtgcgtcttagtctggtaataactctggttggacctgttctgtttccatgtacttttggacagtgtgcctgactccgcggtaacagaggaaaaaagaacattttgtattcatcctgaactacaattccccctcatttgtactattcacactcccattactgcgtcagggagtcgatcagacatgtgattaatttcggttatacgtttcgtcaacc

SEQ ID NO: 12260 - DNA, 1511 bp, Zea Mays
cgtcagctagctgaccaatccactctgcctccacaaaccaacaggtgacaacggagccagaatacgcatctacctataaaacaaaagcaggtgcattcagatacaaacggatgctgcaaattcccattgtatccgtcacttcatatagcaaaacgactccaagcatcatctcatatcaattgactggaacactgatacagctatatagataaagcattggcatagaagacacatacaagtacttgaatgcctctcctattcctcatatcatcaatcatcattatatctaatgtaggccaacacgcttatcctatttaacgaccaatgtacaaaatgtgagcagcccgtgctgtggcagggcaaatcaccaaaacgtgctgcaaatcatggtagaagtggacgcaccacgacattgcaggaagattgccatcccagtggtatcgcatagtcccggagctgttttggactttgtcactaaccaccaatcaggcaaggtatttgtacgtattggcgttgtccttgtcgcgctccaaatagtcccttgtgatgagatcctcaatcctcttctttatggctttgaagtaccttaaacatgcggctaagctgctcaacacattcagcaaccagctgttgatgacccataactttgcggctcttcataatgcgcacaattgatgcatcaattgcatacctcctgtctttgtcaacatcttcaacaacctttttcttctcatcaacgggaggcagaaataccttaattcttctcattctgtcagtaaattttgaattgaactcaaaaacatcattgggcgagatggatctatttgctggttccttgttaaggatcttgtattttgcacaagaaagtgaatggagcaaacgcactacatcatcatctgacaggtttaattgtgttgcaatttcagaataactaagcctttcggatccattgaacagtagtagtaatgcagcctgatatgtcgtaacaatgagctcaataggtttagcatcaaacttagcattgatgttgcaggaaggtttatgtcaaaagttttgtagcttggccagaatcccgttgtcaaaacagtaacagccaaatctatgccaggattcaactctggatgcccagctacaaactcttcaaacttagtttggtgatctctagcgacagtaaggtccgtaaccatgccctccattttggaagtaaactgccccccgcactgttgcttgagctttgtcagaatacttctctcatgctcatcattagcacttttgtcgaaaagtaatcttctggcaagtttcttcctataaaactcggcaaacaggtctttatcactgatcaaaagtaaaaacagaagtaccttctcaagggcatcttcaatggcttcatcactgagcttttcactgcagcctttcttcagaatattgtcgcagaaggtagccaacaactcagcattcgaactgccagagacacctttgttacagaagacctcaaaggcttctttaagtgc

SEQ ID NO: 12261 - DNA, 281 bp, Zea Mays
atcatgttattccacaattgatgtaataatgctggtacattgtgcagatggttttttctgctcttgctttgtctcaatgcgaggtgatttggtacttccaacatgtggggattgcatcatcaaaatctactcgattgaaaactgttgacattgatgcgatagacccaactattggtttcttactagatggaataggcaaactttgttgcctggttcgtaaatacatagcagcaataaaaggttatgccttatcatatttgttatccagtgctggaagaata

SEQ ID NO: 12262 - DNA, 1218 bp, Zea Mays
ggagaatgcaggaaggtattatctgacgggtatgcggtcatgcggacgcaaagttttccaaccactggccacacgcggcatggagcgaacggaccatgtgtggagcaaggaggcccacctggcgggcggggttctcgaccaatcactccagtatccagtctctctctcggctctcctctccccgatttccttccccacccgctgtcagtctcactccccgcgcgcgcgctctctctttcctcgccttcgccgccggcgacgagcttgagctcgagctggttcctcgtatagaagacgacggccgcggtatggagcccatgaacgtagacaacggcggcagcggtggccttgacgcgcagatcgaacagctgatgcagtgccgcccgctcgccgagcaagaggttaaggcactgtgcgagaaggccaaggagatattgatggaggaaagcaacgttcagcctgtcaagagtccagtgacaatatgtggtgatatacatggacaattccacgatcttgtagagcttttccgaattggcgggaagtgtccagacaccaattacttatttatgggagattatgtagatcgtggctactattctgttgagactgtcactatgctagtagcactaaaagtgaggtatccacatcgaattacaatccttcgtggaaaccacgagagtcggcagatcacacaggtgtatggattctacgacgaatgcctacgaaagtatggcaatgcaaatgtatggaagacatttacggatctttttgattattttcctctgacagctctggtggaatctgagattttctgccttcatggtggtctatctccatcaattgaaaatcttgatagtgtgcgcagcttagatcgagtccaagaggttccccatgagggacctatgtgcgatctcttatggtcagatccagacgaccgatgtggttggggcatctcccctcgcggtgctggctacactttcgggacatatcagagcagtttaatcacacaaacaatctcaaactcgtagctcgggctcatcaattagttatggagggatataactgggctcatgagcaaaaggttgtcaccatattcagtgctccaaattactgctatcgatgcggcaatatggcatccattttggaagttgacgactgcaacagccacacattcatccaggtgttggcacgcgcgagagatgcgtgctgacacgcaga

SEQ ID NO: 12263 - DNA, 1525 bp, Zea Mays
tcttctcgcctcgcctcgtctcctctgttctccagttctctcatagtcactcccccaactctgctgcttcccgtggccgtggttcaaaattcgaatccagaaagacttccccaagcattttccgtttctttaaaccgtcatcgtcctccctcgtgctagcctcgctcgttgcgcgttcaaatttcgaaccacctccgccttcgacgccccaaaccctagcccgacccctcctcctccacctgcgccaccgcccaccatgagctccgccgccgcgccagctgccgtcggcagcggcaaggagcttgccaacccgcccgccgacggaatcaccaacctccgcttctccaaccacagcaacaacctcctcgtctcctcatgggacaagacggtgcggctctacgacgccgacgccaacgtgctcaagggggagttcatgcaccccggggccgtcctcgactgctgcttccacgacgactcctcgggctttagcgccggtgccgaccacaccgtgcggaggttggtatttagctcgtccaaggaagatgttttggggcggcatgatggtccggttcgttgcgtggaatactcttatgctgcaggtcaagtcatcaccggcagctgggataaaactgtaaaatgctgggatccaagaggagttagtggaccagagcgcacccttgttgggacatatgctcaacctgaacgtgtatattctctttcgttagtaggaaataggttggttgttgcaacagctggaagacatgtaaatatttatgatctgcgcaatatgtctcaacctgagcaaaaaagagactcttctttgaaatatcaaacacgatgtgttcgatgttttcccaacggaacaggatatgctcttagttctgttgaagggcgagtttctatggaattctttgatctatctgagtctgctcaatctaaaaagtatgctttcaagtgtcatcggaagtctgaggccggcagggacaccgtttatcctgtcaatgcaattgctttccatcccatatatggaacatttgccaccggagggtgtgatggatttgtgaatgtgtgggatggcattaacaagaaaagactatatcagtactcgaagtacgcatcaagcatcgctgctctatcattcagtaaggatgggcatctgcttgctgtggcatccagctacacttatgaagagggagaaaaaacgcatgaacctgacgctatatttatccggacagtgaatgaagtcgaggtgaagccgaagcccaaggcattggcagccccccagtagtgctgtgacctgttctggaggctagatgacccgtacttctctgcgttgatgtcaattacattagttgacggagtgcttgtttgtgttgaaagagctgaaacgcctgtgtttcttaatctggaaccctcttctcccgttttacttgtccgtggaaacatttcatgttccagctggttgtatattccgaaacagaccatgtttaagttcactcggttcttcgttgacttaaaaaaaata

SEQ ID NO: 12264 - DNA, 153 bp, Zea Mays
ggaaaaaccctaggtggctacactccagatcatgcctagtacatttcttcttcttcgatgaaggtgctggttgctcatcaagggaagtgggaagtagcagcacatccaccttcactctcataataacgctgcttaggcgctgtcatgatttaa

SEQ ID NO: 12265 - DNA, 1136 bp, Zea Mays
ttttataggcatttattttcaaggctgggacaggtatagctgaacttatagctcttgagatctcacgtcagacgaaagctcctatagaggagtgccgcaagaaaatctggcttgttgattcaaagggcttgattgtcagtacacgaaaggagtcccttcaacacttcaagaaaccatgggctcatgagcataaaccactcagcaacctcttagatgctgttaatgctatcaaaccaacagtgttgattggcacatccgggaaggggcaaactttcacaaaagacgttgttgaagcaatctcctcatttaacgagagaccaatcattcttgccctatcgaacccaacatcacaatctgaatgcacagctgagcaagcttacacatggagcaagggacaagcagtgtttgcgactgggagtccatttgatcctgtggagtacaatggcaagatacatgttcccggacaggcaaacaatgcctatatcttcccagggtttggcctcggcgtggtgatgtctggagctatccgcgttcatgacgacatgcttctggcagcatcggaggctctggcccagcaggtcacagaagaaaattttgagaaggggctgatttatcctcccttctcaaacatcaggaagatctctgcccacattgcagccagcgttgcagcaaaggcatatgaacttggtttggcaagtaggcgccctcggccaaaggacctggtgaaatatgcagagagttgcatgtacagccccatctaccgcaactaccgttgaattcggatcaactccagttatgtgcaaatcagcagcagctattccgcagcgtttatctcttgcgatgtcatgtaaatcagctccggttagccttttggatgctagtcagtcatggtgctggtgccgtccttccggacaaggataaatttggaataaagtttgagtcgacgattcctccctcggtactgcgtgttcacctgaacgtttttttgcttcacgcagttgctgttgttttcaacaagtgcttggttgtatgcgtgaaggtaagtaggtaacaccaggaaaggttcttctttttttccctgatgaggacagattctcgtttgcttgaggctctgtttggttaggggtggattgagg

SEQ ID NO: 12266 - DNA, 1037 bp, Zea Mays
taggcagctaagtatcgttcacagtattgattagcaattatgctggggcgttcttcatcctgctttttgcttccatcttcgccactggtattttggagcttcgatggagtggtgttggcattgaggattggtggagaaatgagcagttttgggtcattggtggcacctctgcacatctctttgctgtgttccaaggtctcttaaaagtgctagcagggatcgacacaaacttcacggtcacatcaaaggcaaccgatgatgatggtgattttgctgagctgtatgtgttcaagtggacaactcttctgatcccccccaccactgtgcttgtgattaacctggttggtatagtggctggagtgtcgtatgctatcaacagtggctaccaatcatggggtccactattcgggaagctgttctttgcaatctgggtgatcctccacctctaccctttcctgaagggtctcatggggaagcagaaccgcacaccgaccatcgtcatcgtttggtccgtccttcttgcttccatattctcgctgctgtgggtgaagatcgaccccttcatatcccctacccagaaggctctttcccgtgggcagtgtggtgtaaactgctgaaatgatccgaactgcctgctgaataacattgctccggcacaatcatgatctaccccttcgtgtaaataccagaggttaggcaagacttttcttggtaggtggcgaagatgtgtcgtttaagttcactctactgcatttggggtgggcagcatgaaactttgtcaacttatgtcgtgctacttatttgtagctaagtagcagtaagtagtgcctgtttcatgttgactgtcgtgactacctgttcaccgtgggctctggactgtcgtgatgtaacctgtatgttggaacttcaagtactgattgagctgtttggtcaatgacattgagggattctctctcttgaaatttatatatgtatttctaatattcatgccatgtcattattgaaattaatagtccattctacggcacggattgatg

SEQ ID NO: 12267 - DNA, 84 bp, Zea Mays
atcgcggcgcggtcatcagtagggtaaaactaacctgtctcacgacggtctaaacccagctcacgttccctattggtgggagaa

SEQ ID NO: 12268 - DNA, 2423 bp, Zea Mays
ttgtggggtgcatgtgcatccacaaggtaacatgtagctttgcccctgctcagagaatcactccatggtgtcaacccaatcatcctctacattgctagaggtgcatcaattgcctccttatctggaaagaatgatattgagtttgggcatgttgttgaatggcttgaatatgcccccaccttcctttcaggctctgaatttgaaaatgcatgcttatttgttgatggattcttggcctcccggacctttctggttggtcatggcctgacaattgctgacattgcagtttggtcaaatcttgctggaattggtcagcggtgggagagtctaaggaaatcaaagaaataccaaaatcttgttcgctggttcaacagcatagattcagaatacaaagaggcactgaacgaagttgtggctgcatttgttgggaaacgaggtattggaaaatctcctgcacctagccttaaggagaaggtacatgactcaaaggacccatcagctccagaagttgatctccctggtgcaaaagttgggaaagtctgcgttcgttttgccccagagcctagtggttacctccatattgggcatgcaaaggctgcactattgaacaaatactttgctgaaagatatcaagggcgcttaatagttcgatttgatgacacaaacccttcaaaagaaagcaatgagtttgttgagaatcttttgaaagatattgagacgttggggatcaaatatgatgctgtcacatacacatctgattatttcccaaagctaatggaaatggctgagagtttgataaagcagggtaaagcatatattgatgacacaccaaaggagcaaatgaggaaagagaggatggacggtattgagtcaaggtgcagaaataataccgtggaggaaaatctctcattatggaaagagatggttaatggaactgaaaggggcatgcagtgctgtgtacggggtaaacttgacatgcaggatcctaacaagtcactcagggatcctgtttactaccgctgtaatactgatccacaccatcgtgttggttcgaagtacaaggtctatccaacatatgactttgcgtgcccatttgtcgatgcattggagggggtaacccatgctcttcgttccagtgaatatcatgacagaaatgcacaatattatcgaattcttcaagacatggggttgaggagagtggaaatttatgaattcagccgattgaatatggtttacactcttctaagcaagcgaaagcttctttggtttgtacaaaacaagaaggtcgaagattggacagacccacgttttcccactgtccaaggcatagtacgtcggggcttgaaggttgatgcattgatacagtttatactccaacagggtgcttcaaaaaatctgaatctcatggaatgggataaactctggacaatcaacaagaagataattgatccagtgtgcgcaaggcatactgctgtgctaaaagaccagcgtgtcatctttactcttacaaatggtccagaggagccatttgttcgaattttaccaagacataagaaatttgagggtgctggaaagaaggctacaacctttgccaacagaatttggctcgattatgctgatgcggcagctattagcaagggtgaggaagtaacccttatggattgggggaatgctattgttaaagagatcaaggtggagagtggagtaattactgaactagttggagaactgcatcttgaggggtctgtgaaaacaacaaaattgaagatcacatggctagcagatatagaggagctagttcccctttcattggttgaatttgattacctcatcagcaagaaaaagctagaggaagacgaggacttcctcgacaatctcaacccttgcactcgacgggaaatcccagcccttggagatgcgaacatgaggaacatcaagcgtggagaggtcatacagctcgagaggaaaggctactataggtgtgatgccccttttatcagatcgtccaaaccggtggtcctgtttgcgatcccagatggcaggcagcaggcctcgcttagctaggcatggtgaccaccttttgggcacatggaattcctgagttggcgatgagtattgttgcattgtacactttaatattgtactgtgattaggctttactcgcggtggatgtctttcaccgctagatggccagaggcatatcctgccaaccaagcagagcagccattttgattttggtctatgatacttttacctgcgcttgaatattcctatacttctctagcagggccttcgttattttgccgttagattatttttactgcgtcggctgctattttcttttgcccaggtattaatcaatcatggacgggcatggtatgtagctgtgatgagtaaatgcatgtggggaccctaaggttggg

SEQ ID NO: 12269 - DNA, 1447 bp, Zea Mays
ttctcgacggggttttgatccagcgcgggcaccatgtcattcatgtctccattcccggggatggatctaagtaaaatggatcccgggactctgaccctccttggggcagctggttgtgtaatgctgactatgcatttcactgtgcaattggtgtcacaacatctcttctattggaaaaaccccaaggagcagaaagccatacttattattgtgctgatggctccactatacgctatctcttccttcgtgggtcttcttgatatccagggtagcaagacatttttcacattcttagatgctgttaaagaatgctatgaggcactggtgattgctaagtttatggcattgatgtacagctacttgaatatatctatcagcaagaacatagtccctgatgaaatcaaagggagggtgcttcatcattccttccctgtttctcttttcctgccccgcaatgtccgattggagcacaaaacattgaagcttctgaagtattggacctggcaatttgttattgttaggccagtatgttccattctgattattgcactccagcttcttgggctgtaccccagctgggtcagctggacgtttagtattatactgaacttttcagtctccatggccttatatgcattggttctcttctaccacttgtttgctaaagagctggcacctcacaagcctcttgcaaagttcttgtgcatcaaagggattgtcttcttctctttctggcagggttttgcgctcgatgttttaacccaagcaggcgtgatcaaatcccaccatttctggctggacgtggagcacatccaggaggcgatccagaacgtcctggtgatccttgagatggtggtgttctccgtcatccagcagtacgcataccacgtcgccccctacagcggcgctgacagggccaagtttgagaagaagaacgaatgaaccaggtttccaaaaagaatgaaagaaggaaaaaaactctctgctttctggtcgctcggagatggagcaccagtatttcctcacggatggacgacatacacaagttcatcgagtctcgcgagtagcgtatttggtagcgagttgtcgcgctgtaaaattacactgtccttgcgcgctgaataattttgctggctttgtcgttttggttttttgaacgttgtcgccgaggctatatagccaggactgttcgtcttgtacgagcgcgcgctctctctctctctctctctctgcggacttggcgaatccttttatgaataaaagctactgtcctgttctacagaggccgcactgggctgatgccgatgaaggttgcgggttgcctgcaaccacctgctgttggggggatgatattgcaatctgcacgttcgtcctttctccgtggagtaatttttttttcaggaacgtgatctgatactacactagtactagtatgtgtttttgaggt

SEQ ID NO: 12270 - DNA, 1243 bp, Zea Mays
gcattcagctcggcagtgcccctgattttgcatgggagcagaacccaagcaactggccttctctgctgccctcggtgtcacgattgggatctttccgatatgtgggaccactgttattcttggtgctgttgttgtagcaatgttgggaagtcgttgcaatgctgttactcttatggttctaaatttggccgccactccaattgaactaagcttgatcgtccctttcttgcgtttgggtgaagccgtcactggcagcgggcacttccccttgacagccgacgcattgaagaatgttctcaccggtcatgcctcaaaggatgtgctaatgagcatcgtccatgcgatgctgggttggcttattgctgcaccaattgtactggtcgtgctgtacgccgtttcgttcccttgtttcaaggtcctggtcaacaggtttggtggtattccttcgagccccaggaccccaatcaaagcggtgtagccagtgcctggccggatcctctgcagttacatccgtggacatagctgcagatgtgtcgctgacatccggggccggccgtggcgtggccccaaacgtcagtgactcgacgtaattgcagaggaaacggtttcagccagtgaggcatgctgaatgcccctggaattgtgtgcaccaagttctttgtgatgccgtcggattgagatgggttccggcatcatgttgctcggccatcccaggcactggcgaataaatatgatgacttgagaggcatgtgtcctctgtgattgtgtatgctggtttcacaaccatatatagcgagatgcgtatttatgaatttatgaagtcttgataaataaagctaggaagcacaggggtcacggaccattgtgccattcttcccgatgtaggcgtgggttgtgttcagctaaattttctgtgggcgttgtacatgcttgcaggaattcagtgccagctgtttgaaatttgaatcataggttcagtggcaaggcaacttggtgcttaagaatcctactaaaatgcactcactacgtttcaattataagatttttctagatgtatgccaatatatcggtgatattagatgttttcatcttattcccatcgaggaatgttgtctttacaaccatccgatgtaactctaagttgtaatgagcagtaagcgtcatattattctagaggaattttttgttgaaacaggtgaggaagtttttattataaccaattccttctctgaagtttttggcc

SEQ ID NO: 12271 - DNA, 187 bp, Zea Mays
ctgtcttttttttcacatttctactgctgttgtctaatgtacgtgagtgtcttcaggtcaatctgtgccttacaaatcaaacggacaaaactgtgggcccttttgaagtatttctggctccaagcatgtcgggtgaagacagagctgttctagtcaatgggccacagaagttgcttctggaaaagag

SEQ ID NO: 12272 - DNA, 85 bp, Zea Mays
gttccgacggccgcaatgcgaacaatggcaataggtgatgtgcgaccataggaaccacaagaacaagatcaatcttcttcctcta

SEQ ID NO: 12273 - DNA, 506 bp, Zea Mays
acgttggtcttggaaagacaactgaactctcaaggcgtgaaagggaggagcttgagaaacaaaaagctcatgaacgttatatgaaacttcaggagcaaggaaaaacagaacaagcacggaaagatttggaacgtcttgctttaataagacagcaaagggctgatgctgcaaagaaacgcgatgaggagaaagctgccaaggagcagaggaagtcggaagcacggaagtaactgcaatatcatggacgatgagaccacgaaagcatgatctgcgttagttggatatttatttctaatgcatcagttatcttgttataaacctggtccctattctgtatccccataaaatatgcattgacaaaattagtaacagtcttgtgggcgtgtcttcctgtaaacttgagcttgacaaaattagaaagtagtattaaggtcagcttatgcgaaactggctcttttgtctgctgtccggttgatgctggtgaaattgatgggtattattgggac

SEQ ID NO: 12274 - DNA, 943 bp, Zea Mays
cgcctccacttgtacacgcctccgccacccgacaaactactcaataaccctagctaaacccccacgccgccgcggcgacctcctccgccggcgggatggacagcctcaggggagtcaagttgccgggcgtgccgaagggcgggagtgcgctcgtgaaggtggcgctgctcggcggcgcggggctctacgccgtcctcaacagcttctacaacgtcgagggcggacaccgcgccatcgtcttcaaccgcctcgaggggatcaaggacaagggtgaggctaagagcgctgagttgattggccaagccattgccaacaaccccgccttcctggctctgagacagattgaagctgccagggagatctcccacaccatggcggcctccagcaacaaggtgttccttgattccagggaccttttgcttggtcttcagcagctgaacgtggggggcaagcaaaagaagtgaagcggtcgtccccaggccatcgcggatgagagtagtttcaggcgatggttttatctgttacagaatgcgcatgcgcgggaatgaacaaagtggcaccatgttgcagtctgtatgtactgacaagtttgtctatcgatctttgattctctgctcttgtaagtcgtgactgatgaatctgttgttgcaattgccttcctggaggcttgctctgatgcgtgtaacagccattccattgctcgtagtcgcagacgtaattcagcgtgtgagttcaatcaggacccgtgtgactggttgtggcatggtggtagcctggcccgacttgtctagtatgtggagccagatttcatatatccaggctaggctcatgctcatatttatgtttggttgtttgcgttcaggtcggataaagatatgtgtttggctgtatgcatcaataccaagatcaaataaagtaaataaataaatcttcaaaattaaat

SEQ ID NO: 12275 - DNA, 357 bp, Zea Mays
ctcgaatgaaatgggagtttttagttttcatccgatgttaaattgaccaatatttacgagctgaggcattatgggtaaatcaagcaagaagtccagtgttaaggctgcacctgctgctgtctcagttccagaggggaaatctgcaaagaaggggaagagaaatgcagaagatgagattgagaaggccgtgagtgcaaagaagcaaaagaccgtacctgaaaaagctgtgccggttaagaagcagccccctccaaagaaagttgagagcagcagctctgaggaggattcttcagattccgaagtggaggtgatataacattcttctcttttggctcatgtttctcctttagttaaaaa

SEQ ID NO: 12276 - DNA, 762 bp, Zea Mays
cgggcgcgtagattcatccttctacgcgtctaggagggggattagggtttcgtttgctcgggtgctgaaactcgtgtactgttgatggatgatgactgttcccatggatagtgctagcgcagccccatcctccacgcgggaccttgccgagcgtctccttactaggggattgccaccatcttctgggacaaagagggagtggaggatgattgatctgtcggcagtctgatggggatgaattatacgaggtcttcaacgctgacacaaagggttaatgaaacaaactcgaatccagtgattataggcgctccgcacggaccatatgattcatctctcgttggacatgtagctacaagaatggtgtcagtgggcggttgctgccgcaactaaaagtccattcagtgtggatgtcagttgggctacgctatctaagaataaaaagtttgaggaacaacgagcatgttgccaagtagtttcttaagtataagttactgcgtctagttatattgttcctttcctttcggaaacaatgtgtcatgttgctgtcgcgctagttgcaagttgcaattaaacgtttggaacagtttgtcatgttatttgtgtggcttctatatggctatatgtttgctggaactgtatggaccaaccctcggtgctacctacaaaagtctatgatttgactgaatatcttgtatgtttctattatgctcattgattttggaacaatagtcaatttagcctaccccaacttgcaaattggca

SEQ ID NO: 12277 - DNA, 601 bp, Zea Mays
gctcaccattagggcggttctttgcctaccgacagcgaggaacggcggtggcctcacagtctcacacaggggcagtgagttattttacctctatctgccggaagctcaaaatcatgaggggctctgatgctgttggaatagctccacgaaccgtcgagcagacaggtcagaacaaataagctttggcctttgcctgcatccaaggaagacatctgagctagctgggagactatgttgaaggctgaagcctgaaatagttgccgggaatcgtcaaaacccgtcaagtgtttagtgtagttttcacgtgtccttgagacatgtgcatttgtatgtctgtgacgtgatccgttagatcgtgcaatcgtaggttgctgttcttgtgccctttgaaggccagacagatcagggagctctctgcttccttagtgcacttgctttgcagcattccttgttattctactctgaaatcatacatcatgccacaagaaccgatggttcgtgatgtcaagagagctgccctaattgttccattgtaacctcgtaattgtgttcttccgcaggagaaattggtgctgcactcagcttcctaccacatcaacac

SEQ ID NO: 12278 - DNA, 794 bp, Zea Mays
gtctcagtcaactgcaggggaggccatggtacatcccttggatgatattgagcataaaaaggacgctgaacaggaaaattgcccattctggtgggctcggtcaccagagaatatacttcagcaggatacttatctagcattggcgaccgtatttgtaattttgaggttgctgtatcgtatttttccaaagatagattcctttaccagatgggcatggaggaggcacaatatgtttgcaaaattgatgggagcacatgaatatttcctcacctaccttgagcaagcaagacagaagtttcataggctatacccttcaagttcaaagcgaggaaatctgcaggagggcgcaatgaacgctaccgcttgggcttccaaatcattagcatcagtttcaattggagaaccaagtgcaattggaaggacaaactctacaagtgagctaagatgaaatctgatcttttttgtccccagggattatatgtacagtacagtagagcgatcaggatatgaacacccagaaactgttgtaacggctatattactctttgtatcctccttagaataaatacgtccatgatttggctccttattttctgttgttgttacagcccaattctttggaggaataaagtttctggtgtattgagaggtgtctttctgaaatagggagcatatcagatgcacacgtgtctttcgtgtacatggtgctggtgcatatattgaatcaagcaacttaatatggtattaaaatcagggtctcaaatttgaatcctagttagcacaattcaatataa

SEQ ID NO: 12279 - DNA, 2293 bp, Zea Mays
aaaaagttaaataatattttaaaacggctggggaactagtagaaatgcaaacctgattgtggggaaataattgaaaaattctaaaaatggtaaaatgtgaacgaaggacccggcgagaaaagagcctgctacctgtctctcaaaaccatcgaccacgacagcgccattttcctccgtctctctcctccgatcctctcttgccctagggagagggagagggagaggaagagagagatatccgcgccgtccgcccagggagagaagcaaagatcggcaaccactgaaccgcgctacgcgtggtcgtcgtccggagccacgcgtggcgccgcggcgatgggcaactgctgcgtgacccggccgttttctggcaagcggcgaggcggctcccgcggtggcgctggcgggaaccgttgcgggcgcctcggcggcgccaacgtgcggtcctgctccacgctgtcctccatctccgacgcggcgcgcaccgccgcgacgcaggcgtggtcgccgctgaccgtgctggggaagggcctggccgcggaggccagcgccgaggagctgctccggcgttaccagctcggcgaggagctggggcgcggcgagttcggcgtgacgcggcggtgcacggacacgtccacgggcgaggtgctcgcgtgcaagtccatcagcaagcggaagctgcgcagcagcgtcgacatcgaggacgtccggcgtgaggtggccatcatgaggtcgctgcccgagcaccccaacgtcgtacgcttgcgagaggcgttcgaggacgccgacaccgtgcacctcgtcatggaggtctgcgagggcggcgagctttttgaccgcattgtctcccgcgggcactacaccgagcgtgcagcagcctgcgtcatgcgcaccatcatggaagtcgtcctgcattgccacaagcatggcgtcattcaccgggacctcaagcctgagaactttctgtatgccaacacatctgagaactcggctctcaaggtcatcgactttggtctctctgtgtgcttcaaaccaggtgacaggttcagtgagatcgttggatccccctactatatggctcctgaagtgctgaagaggaactatggacaagaaatagatatatggagtgcaggagtcatactctacatcttgctatgtggcgtcccaccgttctgggcagagactgatgagggcatagcacaggctatcatccggtccaacatcgacttccgcagagagccttggtcaaaggtgtcggaaaatgcaaaagatcttgtgaggaagatgcttgatccaagcccctactgtcggttgactgcccagcaggttctagaacatccctggatacagaatgccagtgcagctcccaacatcccacttggagaagcagtgaggtccaggctgaagcaattcactgttatgaacaagttcaagaagaaggccctgcttgtggtggcagagtacctaccagccgaagagctggaagcaatcagggagttgtttcagttgctggacacgaacaaggatgggcatcttacaatcgaagaactcaggaagggaatgcgattgataggccacaatgtccatgacactgacgtcgatatgctcatggaagctgccgacatcgacgggaacgggaccctggactgcaaggagttcgtgacagtctccattcacctgaagaaaatccgtagcgaggatcacctgcccaaggtgttcagctacttcgacaagaacgggagcgggtacatcgagatcgaagagctgaaggaggccctctctccaagaggtgaccagaaggcgatcgaggacataatcctagacgtcgatatagacagggacgggaagataagctacgaggagtttgagctgatgatgaaagctggagtggactggaggaatacgtcgcggcagtactcgagagcggtgtacaacaccctcagccgcaagatgttcaaggacgcgtcactgaagcttggtagtaacaatggtccacttgctgctgcagccgtcaaagaacaacaagatgttgattgagtgatgtgtctactgcctgcaaactcgactaaaacagagaacacgagaactgtacccagttttccatgttttgtgtataggtcgccacattttggcaaggaaatgtatcaggggcggtcaattgactcaggttcaggtgcattgtgcatatgtcaagacactcccaattacaccctttatttttctcataaaaaaaacaatgttgttatctaccaacatcagcaagctgtgttgtaaaacatatctttaatcgttatta

SEQ ID NO: 12280 - DNA, 2790 bp, Zea Mays
tttttctattagatattcagaaaattatcggatcagctcacccaacggtgatagcttggaaaactagatcgtacagtattttttttgtcttgtatagaagtattaaaaaaagattagcaacgtctatctcgcgttgcatctgccattgtgtcctactactgaccgttggctgcctcgccgaaaagccgccgaccactgaaaagaaaaacgaggcagcagcgcgacatggcgctcacgttgtctcccatccccacctaaccccgttgccggacggatcccggccgtcggttcctcgacgggcggcgggacgcgtcccccgattcgaacgttggggggtttattggtattctattcaacgagccgccctggcgcacactctgctctgctcagctgctcccgcttgtccgttgccgcggccgtccccggagccggagcccgcccgttccttcgtctccggctataaaatcactgcgtccgccatggcgtctcccaccaccacctgctgcagcgctctcctccccctccgcttcttcgtcttcctcggtcctccgtccgccattgttgcttgcgcaagcaggtccggaggcgcctcgtcccgctcctacgccgccacaggatggcgctgctcacggcgccggcggtggccgcgctgctgctcttcttctggtccgcggccgcgcagggcgtgccgccgtacaaggacgccagcaaggacgtggaggtccgcgtcagggacctcctggcccggatgacgctggccgagaaggtcggccagatgacgcagatcgagcggctcgttgcgtcgccgcaggtgctcagggactactacatcggcagcctgctgagcggcggcgggagcgtgccgcggaagcaggccacggcggcggagtgggtcgccatggtcggcgacttccagagggcctgcctgtccacgcgcctcggcatcccgatgatctacggcatagacgccgtgcacggccacaacaacgtgtacggcgccaccatcttcccccacaacgtcggcctcggagccaccagggatcctaatctggtgaagaggatcggcgccgccaccgcgcttgaagtgagggccaccggcatccagtacgcgttcgctccttgcattgctgtgtgccgtgatccgaggtggggccggtgctacgagagctacagcgaggaccgccgtctcgtgcagaacatgactgagctcatcccgggactgcagggcgacgtcccgcagaatttcaccagcggcatgcccttcgccgccggaaagaacaaggtggcggcgtgcgccaagcacttcgtcggcgacggtggcacccacgacggcatcaacgagaacaacaccatcatcgaccgcaagggcctgatgagcatccatatgccggcctacctggacgcgctccgcaagggcgtctccacggtcatgatctcctactccagctggaacgggctcaagatgcacgccaaccacaacctcatcacaggcttcctcaagggcgagcacaagttccagggcttcacgatctcggactgggaaggcatcgacaggatcaccagccctccaggggcgaactactcctactctgtgcaggcttcaattcttgctggcattgacatgatcatggtgccaaacaactaccaagacttcatcaccatcctgaccggtcacgtgaacagcggcctgatcccgatgagcaggatcgacgacgccgtgacgaggattctgcgcgtcaagttcaccatgggcctgttcgagaaccccatgccggaccctagcctcgccgaccagctggggaagcaggagcacagggacctggcgcgggaggcggtgaggaagtcgctggtgctcctcaagaacggcaagcctggcgacgcgccgctgctgcccctgcccaagaaggccgccaagatcctggtcgccgggagccacgccgacaacctggggtaccagtgcggcgggtggacgatcgagtggcagggcgacacgggccgcatcaccgtcggcaccacgctcctggacgccgtgaaggcggccgtggacccgtcgacggcggtggtgttcgcggagaaccccgacgcgggcttcgtcaggaacggcggcttctcgtacgccatcgtggccgtgggcgagcacccgtacacggagaccaagggcgatagcatgaacctgacgatcccggagcccgggccgagcaccatccagacggtgtgcggcgccgtgccctgcgcgaccgtgctcatcagcggccgccccgtggtgatacagccgttccttggcaccgtgcacgcgctcgtggcggcctggctgccgggaagcgaaggccagggcatcaccgacgtgctcttcggggactacggcttcacggggacgctgccgcggacgtggttcaagtcggtggaccagctgccgatgaactacggcgacgagcactacgacccgctgttcccgctcgggttcgggctcaccacacagggcaagaaggggtgctagaagaagacggggtggggggtggtacttggtagagataggaaattggattaaacagtgctctggcgaggggacatgaactggggagttcttgtttccttgttttatgtcgattaattttgttgtatgctcctcacttgcgctaataagttttttttttggttatataccggagttcaaattatttaccgccgtgttatccgaattagaaacatttcaatcctcttaaacatatcttgacaagtgtatgagcaaaagtcgagtttttgagcaaaagaacaaaaagtaaataaaaa

SEQ ID NO: 12281 - DNA, 1924 bp, Zea Mays
cgaagacgtagttctcgtccatccagtattgcaggtcaggacgctctggatcggggacctgcaatactggatggacgagaactacgtcttcgggtgcttttcgaacactggggaggttcaaaatgtgaagctcatccgtgacaagaattcagggcagcttcagggttatggttttgttgagtttacaagccgtgcagctgcagaacgagttcttcagacatacaatggacaaatgatgccaaatgttgacttgacatttcggctgaattgggccagtgctggtgaaaagcgcgatgatactcctgaatatactatttttgttggggatttggctgcagatgttacagattacttgttacaagagacattcagggttcattatccctctgtcaagggtgcaaaagttgtgactgataaattgacaatgcgcacaaagggttatggatttgtgaaatttggtgatcctacagagcaagctcgtgcaatgactgaaatgaatggaatgccttgttcttccaggcctatgcgtattggtcctgcagcaagtaggaaaaatacaggaggtgttgttcaagagagagtaccaaattctcaaggagctcagtctgagaatgatcctaacaataccactatatttgttggtgggcttgaccccaatgtcactgaagataccctaaaacaagttttttctccttacggtgaagtcgtccatgttaagatccctgttgggaagagatgtggttttgttcagttcgttaccagaccttctgctgaacaagcgctgctaatgctgcaaggggccttgattggtgcacagaatgttcgactttcatggggtagaagcctgtcgaacaagcaggctcagcctcagcaggaatccaatcaatggggtgcggctgctggtgctggtggctactatgggggctatggacaaggttatgaggcttatggcagtgggtatgcacaaccccaggatcctaacatgtatggttatggcgcttatggcggttatcccaattaccaacagcaaccagctgcacagcagcaacagcaacaacagtgatgcctgtttgctcgggtaggtcattgggttgtcgcgacggaattaattaaatattatttcaggacactctcatattgcattcttgtcaattgaggtggttttgaaaggctcctgattttgatggccccatggcacggtttcatctatttattagtatatgacatatatgcgctgtgaacaagtggcgctctactgtgattgctgtgttgagacatgctttcttagtttctttccatgtttctcggatctgttgtgttacctttattactgtgtatttgcatatctactgtgatgctatatatgcactgtgccgtttgtttcctattccatttttttctcgttactttattatagcgttggattctttcttctatcacaacgaacagccgtgggcacatgggcatgcacgatgtcatgacagaatgtgtcgatggcaacatgggctccatcttttatctgtttcgagtccttgacatcaggataatgtaatgtgggttttgttgccgctgtgactgatatggaagcatgagctgccatcgttttcatggccgtccgagtctgaaaaatacatttacagtacgatgaatccttttcattcggtctattattcggtctattaggttaattcggtttggtttatttgggtttgtgaaattttgggttttgaaaaatgagaatcgaaattttcaaaattattttagaaaccgaatctgaatagactcacaattttagtttggtctatttagtccaccgaatagacccaaatagtagagagactaatatcttttgttaaaatatataataaataattaattgaaagtactattattaaaaaaattataaaaatatcatacaaagata

SEQ ID NO: 12282 - DNA, 456 bp, Zea Mays
cacgcacccacgcacacgcacgccccccagagcgagaaccgagaaggacaatcgcgtcccaccgccgctgcacaagacgaggaagaggttcccggtcccggcgccgccactatgtcgtcgatgatgaacgcgctgtcaaactggctggtgaacccgcgccgcaacccgctcgcgcgcctccacatgcacaccgtctcctcgcgcctcaggaaatacgggctgaggtacgatgacctgtacgacccctacttcgacctggacatcaaggaggcgctcgggaggctgcctagggaggtggtcgacgcccgcatccagcgcctcaagcgcgccatggacctctccatgaagcatcagtacctccccgaggacctccaggcacagcaggtcccattcagaggatatttgagtgacatgttggctctgctcaagctgctgattagcactagagatggcaat

SEQ ID NO: 12283 - DNA, 73 bp, Zea Mays
tttattttaaatcttggatgttctataatagtaagtctgagtttagatgttatgctctagtcaagagagatat

SEQ ID NO: 12284 - DNA, 108 bp, Zea Mays
tcatgaaagcattatcatgagcatcatcaaccattcactacttacattaggatcttaaactgccactaattgttgtgaagtgaactcttgtttgaaccaataggatgc

SEQ ID NO: 12285 - DNA, 681 bp, Zea Mays
ccaaaacccaaaagatgagctcatcagcagatgagaattcctttgacatatgatgaggagaaaggagcttggtttcttgagaaagagttgcctgacggtatgaatacaaatacgtagtggatggcaaatggctatgcaacgagcatgagctgataacgaaaccgaatgctgacggccacgtgaacaactatgttcaggtctccagagacggcacgagcgatgaagagaaggagcttagggagcggttgactggtccggaccctgatctcacggaccaggagaggctgatgatcagagagtacttggaacagtacgcggatgccgccgagcgctaggaggtccaaagaatgatgatgactgaggaagagaagagacacaccatgagacgacggaccgaagccgacctgaccgcaccttcctttacggagaggtcgggcttcccctctcttgtcaatcaaatactcgtagcttaaccgtgcaaaagggcacgttctgctcgcatacttggagaatgatgatgaaggagcaaactgtacgtattgttgaacagcagctgtgcagaaataacaaaggtagtagcgtaaaactactgtactgaccataatgttactactgtatgctccttcttggctatgaataataataataataataaaagagtaaataaacctcatcgatccc

SEQ ID NO: 12286 - DNA, 79 bp, Zea Mays
gcccagctgtgtagaacacaagactctttaccttgtggtcttgggttcaaaccctatagtttgcgttccaatattttta

SEQ ID NO: 12287 - DNA, 961 bp, Zea Mays
agaaagctgctatgcctcagccactgatggtttagcttagttattgcacctgtttctgaatcgtgaaatgatggtaaatcagaaggtgttggctcttctgaagatgacatggacccgaatggtcgcgagaacgatccgccggagattgacccacgagcggaggacaaggagctcaagtaccagctgctgaagaagtacagtggctacctgagcagcctcaggcaggagttttccaagaagaagaagaaagggaagctcccaaaggaggccaggcagaaactcctccactggtgggagctgcactacaagtggccgtacccttcagagacggagaagattgcgctcgcagaatcaacgggcctagaccagaagcagatcaacaactggttcatcaaccagaggaaacggcactggaagccatcggaggacatgcctttcgtgatgatggaaggcttccacccgcagaacgccgctgctctgtacatggacgggccgttcatggccgacggcatgtatcgcctcggttcatgaactacacacttccatggacgactgtgggggcctatccaatcgtcggaccgtgggagtatatttcagtgttgcggtgcaaggacattgttgtggaatttttgttgctgattgccaaggggtgggtcggtcgatgtagcgtctatgcatggcttgtagttctcctgtaatgttgttgttaatttccgcttggcggcttgtaatctaggtgtatctctggaacttgaatcctgggtgattaatccggcaagcagctgcctgtttgtatgattgtatggttcgggttggtggaacatgatgcatgctaaggcgtggcctgtctggatcaaaaaaaaagaagatgtcttttgtaccagtggaatgattggaacttcagattgctgaacatttccgatctacattcacttgtttgtttgaagctctgaagatccag

SEQ ID NO: 12288 - DNA, 816 bp, Zea Mays
gttgaggtagatgttgttgaccatgcgccacagcacccgggtgcgggacgaggagggctacccggccttcgcgctcgtcaacaaggtcaccggcgaggcgctcaagcactccacggggcagggccaccccgtcaagctcgtgccctacaacccggactaccaggacgagtccgtgctctggaccgagagccgcgacgtcggcaacggcttccgctgcgtccgcatggtcaacaacatctacctcaacttcgacgccttccacggcgacaaggcccacggcggcgtccatgacggtaccgagatcgtgctctggaagtggtgcgagggcgacaaccagcgctggaagatcctcccttggtgtaagaacgaacgaaagaaactactagctggtaccctaataataattctgctggctgcggcgatcccaaaataaaagaggccgggtgcgatgcatctcggacttctcgagtggtgtttgcgtcagacagccagccactgtggggctagtgttccaacatttgtcagcctgcttgcgcgaggaaggggggtcactgactcaagagaagggcctggtcataggctgctgcattatgaatttctgatgatgtcttatgtctgtactctgaatcaactatgtatgagatctcatctcctttctcctactgaatgaatgaatcattattggctttgctttgcttcacctgcttgaaagcaatgcattgtatggattacaaagatatgaccttttcgttgagcgagaaaaataatgttggtgacgagcaaataataaaactatgtataaatggagattcgaac

SEQ ID NO: 12289 - DNA, 894 bp, Zea Mays
ggcattccgaccgatcccaccgaatggacagccgcctcgccatcgccgcgctcctcctgctcgcctccgcctcctccgctgccgctgccgcggacggcgggaaggtggccgtggcgctgtactacgagtcgctgtgcccctactcggcgcgcttcgtggtgaaccacctcgccaaggtcttcgcggacggcctccgcgaggtcgtggacctcacgctcgtcccctacggcaacgcccggatccaccccggcggagagatctcgtgccagcatggtccgtacgagtgtctgctcaacaccgtggaagcttgcgccatcgacgcctggccggatctggatgtgcatttcagcttcatctactgcgtggaggacctggtggtgaaacggcagtacaaggactgggagtcctgcttcgagaagctgggcctcgaccccaagcccgtaacagaatgctacaaaagcgagcatggccacaagctcgagctcaagtacgcgaaccagaccgacgctctcgagccgccgcaccggtacgtgccctgggtggtcgtcgacgggcagcccctgcttgaggattacgagaatttcgaggcttacatctgcaaggcttacaagggcactccaccgaaggcctgccagggcctgggacgtctgcagatggccctcgagacagcggcggaggcgcgcaacggcgtcagctacaactccggtgtcagcaagcttgcgactgctgaagatgagggtggggagcataaggtgggagaatactagtacataattgactagcgacgtgccccttttttgggtcatgtgaagttgaaggaccgttccatctcgttgtccggttttttattgtacagtaatagctaatatgataatgataataattacatttcta

SEQ ID NO: 12290 - DNA, 2826 bp, Zea Mays
catatttatatccaggttgctttccttatataccgcccagtgatgcggctttttaagagcactaatggaggtgacacttgttggcctcttgatgataacgaggaaggagaatctgtatcatctgatgatcttatcttacatcttgactcgtttcaggaaccaatcatgtggtcagatcttcttaacgcagtccagtcaattttgccagcaaaagcttggaacagtctttcaccagacctatatgctgctttctggggcttaacactctatgatcttcactttccaaaagaccgttatgatacagaaatcaagaagctgcacgagaatctcaaacaattggaggacaactcagataattctagcattgcaatttcaagacgtaagaaggacaaggagagaatccaagatttacttgacagactgaacagtgaatctcagaagcaccagcagcacgttgcatctgtggtccaaaggttagctcgtgaaaaggataagtggttgagctccagtccggatgcaatgaaaatcaacatggaattcttgcagcgctgcatattcccacgatgtgtttttagtatgcaagatgcagtgtattgtgctacatttgtccaaacactacactcccttgggactcccttctttaacacagtcaatcatatcgatgttcttgtctgtaaaaccctacagccaatgatatgctgttgcacagaatttgaagctggcaggcttggaagattttttcatgatacgttgaagatggcctactattggaagagtgatgaatctgtctatgagcgtgaatgtgcgaacaaacctggttttgcagtgtacttcagatacccaaacagccagcgtgtgtcctacagtcagtttgttcgggttcattggaagtggagttcaagaatcaccaaagcacttaatcaatgtatggaatcaaaagaatacatggaaattcgaaatgcccttattgtccttacgaagatttctagtgtcttcccggtgattcgtaaaagtggtgtcaatcttgagaaacgggtggctaaactaaaaggggatgaaagagaagatcttaaagttctagccactggtgtagctgctgctttagctgctcgcaagagttcttggctatctgaagaagagtttggcgggggtcacattgatctgaagccagcaacagcaagatctgtgcttggaaaccagtcagcagatctctcgatggcaaaagatcaaaatgcccgtgcaaagtctgtagagaataggcatgaaaggtcagagggtgctatgaagcctgacgttcagcaaaagaagagcactgtggcttcaaatggatctgatattctaatacaatcttcctccgtacaagggaaatcttcagtggttgcacgtgcaatggatgagcctccaaaacctgtgtctgatgagggggttaaagtttctacaaaatctacttcagaatttgagacaagggcaacacaaaagcgtgctggcaatgctgggaaggtaatgaagcatgatgttgcaaaggaagatgcaaaagctgggaaacctacaagctggaatgtaaatcaacaagtctccactgttgatagagaagtgtctcatgcagctgatgctgcccaagaaaccagtaccactattagcaatggtaacttgcatccagcgccgcataaggtttcatcatcttctcaaagaaatgcagttacacataatggagcagccaatccctctgttgagtctactgatatgattgactctcctgtgagacagcaaaaaagaccgccggttgaggagcaagatagatcaggtaaacggaggaagggagaaaatgaacccgatttgagtgaacaccatgtagacaaggaaaagagtttggactcacgtggtggagataagtttcgttcagtggatcatgagaagagtgctaatgaggaacaaaatttaagagcgggcaaaataaaagaaaaatctgatgataaatatgacagagatcctagggaaaaattagatcggggtgaaaggcgtcgtggggaagatgccattgagagatcaacagatagattgtcggacaggagagaacgttccattgaaaggatgcaagagagaggtacagataaagcccttgaaaaaggtagagaggatagaaataaggatgagaggaataaagttaaatatgctgaaccttcggtggaccggacacattcttctgatgaacgattccgagggcaaagtttgccaccgcccccacctcttcccgcaagttttgtaccccaatcagttggcgccaaccgacgtgaagaagatgctgaccgaaggggtgggagctccaggcatgttcaaaggtcatctcctaggcacgatgagaaagaaaggaggcagtcagaggagaatatttcgtcatttcaggatgatgggaagcacagaagagaggaagatattcgtgatagaaagcgtgaggacagggatactttatcaaacaaggtagatgacagggatagggaaaaggggacttctttgaaagaagacagtgatcctagtaatgtttctaaacggagaaagatcaagcgagaacagactttagaagctggggaatatgcaccttctgctccacagcctccctcccatggatctggcagctcacaattgtctgacatacgagaaagagaaaggaaaggggtaatttcacagcatcgtatttcacacgctgatgaccttcctaggacacatggcaaggacatgacaagcaagtcaagtcgtcgagagtctgaccagtgatgctcaactatacacgtgagacaaatccagcgaccaagtaccaactatgcacat

SEQ ID NO: 12291 - DNA, 1143 bp, Zea Mays
tgggcgtgaggtgcgcatggtatggccggcctgatcagcttgcgcgccggtccgaggagttcaccgtcacttgcccggtcgtcgtccgcctgggcatcaccaccggcttcacatgtggcggttcgtttgccaagcccactgtttcgctgtgccaaacttcgtaggagccgtagtctactggcagcagcactggagatctctaaggacggttccgccgcggttctggccaacagcctgccttcccaaggggctatcgagacgttgcggaatgccgatgcagtgtgtttcgacgttgatagcaccgtcatcctggacgagggcattgacgagcttgctgatttctgcggggcggggaaagctgttgctgaatggactgcaaaggccatgacagggactgttccgtttgaggaggcgctggcagccaggctgtctttaatcaagccatctctctcccaggtggaggagtgcctggagaagaggccaccaagaactctcttttggtttgcaggatttctcctggaatggctgatttggttaagaagctaaaatccaataatattgatgtgttccttgtgtcaggaggcttccgacacatgatcaaaccagtggcatttgagcttggcattcctcctgaaaacatcactgcaaaccaattgttatttggcacattgggggagtacgccggatttgatcccacagagcccacttcacgcagtgggggtaaagcaaaagcagtgcagcaaataaaacaggaccatggctacaagacagttgttatgattggtgatggcgcaactgatctggaggctcggcaacctggcggagcagacttgttcatctgttacgccggggttcagatgagagagccagtcgcagcacaagctgactgggtggtttttgattttcaagagctgatcactaagttgccatgaattcattacctaccgcaatttatgaacctttgcattgtcggctaaataattgcggccgcattttaaagctgtagatttcactagcaattcttggagataaactgaattattacccggctgtaaagtattttttttatttgttttcccgcattatttgtatgatcctgaaccatgaatgcggaggttgtgttccgacgttgtcaaaaaaaaa

SEQ ID NO: 12292 - DNA, 918 bp, Zea Mays
gagtaatggaaacttctgacctttttaaaggttctgggatatgaaccaacatctcacctcagtggaccacaagttttacctcgttggttttcctctctagcatccaatggatctcaggtgcagaagtcacagatctctgagacatacaagtcaggtggtgaaatgaaacagtctgagacacggaaatcaagtgaggaagccacaccaaaagttgtggcgttcagtccgctagaagcagctatcgctaaacctagaagtagtcccctgacaagtgagagttctaaagtaaggcgatcagagatagcaacccaagtcaccttttacatgatcccagccctgcttcttgcctccaagaacagcataagtacctcccttctggtcggcgccgtgttccatcaagtatacatgttccacaaggagattcttctggactacgtgcaccatgatatcaccagaaagtgggctttgatttacttcaagctgcttttgctggtgatggcgaaggacaccatcatgtacttcaatctgttctaagctcaccttctcagtttctcaaatatccagcaatgcatccgtctctgcactcgtagaataatgatgatggatgaattatgcagccttcgttcttgtattctccctaatgagcttgcttttttccagctgccagtttcactcttattaagtatatcagtctggatgggattgatagtgaccagtcagatgatatccctgattctgcacctcattaataatatgattaatgtcaattgtgcaattaaggatgtgtttggtttgaggtaaaagtaggatgaggcggcgtgacactgtccgctcgattttttgggaccatgctgtcaccaaaaaatactccggtgtttatcttgtctccgcgtctcatccaaacattatagaaaatat

SEQ ID NO: 12293 - DNA, 1228 bp, Zea Mays
caaaccacagctcaccttagctcggccgtggtgttcgcttttctcggttcgaggctgtcattcactttgctgggctcaaggctgttggggagagcgtgcacaagcccctactttactacgacaacaacctggtcggcaccatcaccctcctggaggtgatggctgcgaacggctgcaagaagctggtgttctcgtcatctgcaactgtctatgggtggcccaaggaagtaccctgcaccgaagaattcccgctctgcgccaccaatccctatgggcggacaaagcttgtgattgaagacatctgccgcgacgtccaccgctccgaccccgactggaagatcatactgctcaggtacttcaaccccgttggcgctcatccaagcgggtacatcggcgaagacccctgcggtgtcccgaacaacctgatgccctacgtgcagcaagtcgctgttgggaggttacctcacctcacggtctacgggacggactacagcaccaaggatgggactggggtgcgtgattacatccacgttgtcgacctggctgacggccacatagcagccctgaggaagctctacgaagactccgacaaaataggctgtgaagtgtacaacttggggactggaaaggggacgtcggtgttggaaatggtggctgcattcgagaaggcttctgggaagaaaatccctctggtgttcgctgggcgaagacccggagacgcagagatcgtctacgccgcaactgccaaggcagagaaggagctcaaatggaaggccaagtacgggatcgaggagatgtgcagagatctgtggaactgggcgagcaagaacccgtacgggtacgctgggtcacgcgacaacagcaaatgaaccacccatccatgcatcccatcctgcagtaggagcaagcagcagccttatagcctatgctaccataattagtaactcatcaatcatgcatacataatcagccagtcatctgattaggggtactgcgatgggcctcgcttcttcagtgtatagagggaggaggaggggggtcatcttgatattcttttttttatcattcccgaatgattattattagtagccagttcgatattactccatggttggttgctagagaaggaataagctccattcatatacctaactaaagatatatatatacatgcattcactgtgactgtctctgtctgctactaatatgatactgtacttgactgttg

SEQ ID NO: 12294 - DNA, 655 bp, Zea Mays
atcaatcctagccgtctgttacctcttcagagccaaccattaatacgccccaatcgccgccgccagagccgcggagctctccactcctctcttacccttcctctccccacccacgaagcctcactagggtttagcggcggcggcgagatggtgcagcgcctcacgtaccggaagcgtcacagctacgctacgaagtccaaccagacccgagtcgtcaagaccccaggcgggaagcttgtgtaccagtacaccaagaagagggcgagcgggcccaagtgccccgtcaccgggaagaaaatccaggggatccctcacttgaggcctgctgagtacaaaaggtccaggttgcctaggagccgcaggactgtgaaccgtccttatggtggagtactctctggaattgctgttagggagagaatcattcgtgctttcttggtcgaggagcagaagattgtcaagaaggtcctgaaaatacaaaaaaccaaggacaagacagctgcaaagtaaatctccaggaatggggaagcctagccctgttttgtacactgcgaaaattaattttggtggatggaaaatctaggtgccttgttgagcatttagcatgctgtgtacgtggctcccgtagccaaaactgaagaattcgcctaacagaaat

SEQ ID NO: 12295 - DNA, 1265 bp, Zea Mays
cttcctttcatctattgccactttatgtttttgatggcaagcctcctgatatgaagaaacaagagcttgctaaaagatactcaaaaagagatgatgcaaccaaagatctgactgaggcagtagaggtaggagataaagatgcgattgaaaaattgagcaagaggactgtaaaggtcacaaggcaacacaacgaagattgtaaacggctattaagacttatgggggttcctgttgtagaggcaccttctgaagcagaagcagaatgtgcagccctttgcataaacgataaggtgttcgctgttgcttcagaagatatggactcccttacttttggggctccacggttccttcgtcatttaatggatccaagttccaagaaaatacctgtgatggaatttgatgttgccaaggttttggaggagcttgaactcaccatggaccagttcattgatttgtgcatcctgtgtggatgtgactattgtgatagcatcaaaggtatcggggggcaaacagctctgaaacttattcgtcaacatgggtccatagaaagcatcttggagaatcttaataaagacagatatcaaattcctgaggactggccttaccaagaagctcgacgcttgttcaaggagcctaatgtcacattggatattcctgagctaaaatggactgcacctgatgaggagggtctcataagtttcctggtaaaagataatggtttcaacgaagatcgggtgacaaaggccatagagaagatcaaatctgccaagaataaatcgtcgcaaggaagactcgagtcctttttcaagccaactgccaccacatcagcaccgctaaaacggaaggagacttcggataaaacaagcaaggcagctgcgaacaagaaaacaaaggctggtggaaagaagaaataatcttggatgcttgatgtacaactacgactacgaaagcagcggtggcgtgatcacttcgcttagattatttaactccctgttttaactcagagctttggtaaaagtttgctcatgtttcaagctggggtaagttagttgtgtttgaagagattggtgtaccaagtaacaaaacttatcgctgttttttacttcttgtcctttgaagtatgtatgccagtcctcgtccttttaagtatctgtgttgcaacaaaaatttaaggccttgttttgatgcataggctcactttaagatttagtttaaatttcacaccaagctactttaacacgcatggattacgaagaatatatgag

SEQ ID NO: 12296 - DNA, 924 bp, Zea Mays
cccattcctcctcgcggctcatagaaacctcaaaacccaaccaggacagcgtccacagaaagaagaaagagcacagagagtggagtagtggacagaccatggagctctgcgtctctacacccccatcctccgtccgcgccaccgccgcgcccatatccttcgccccgccccgacgtggcgcgtctgcctccaccgccgttccgccccaccgccgcatcccaactcgagtctggcgctgcgccagcgcggccgtgcctggcccggtgccctccgaagagccggcatccgcctcctacgccgtcgtcgtcacggacaagcccgatacgcctgccgacgacaaggccgaggaggttagcgccgcgcctagtggctccgcggaggcgcctatggcagagctggtgccgtcagaggcgtcatcatccccagatgatggcggcctggatgagattctaagcaagttgaacattgaagtgactccgactttaatcctcactggatttggtgcttttattgctttatggatcctatcttctgttgttgctgcagttgattcagtccccctgctcccaaaattgctggaattaataggaactgcttacacaatttggttcatcgcacggtatctccttttcaaggaaagcagagatgaactgtttgcaaagttcgaagatctcaaacagaggattatttgatctatcgtcgaccttttgccacgtgtttaggctttacagccagcttattattaggttttctccctttcgtttgaaatatttctgaatgggtaaagaaggtcatgtatctaaattgtctcctcatggggtctgttaattgttatcagaccccaagttcggctagtgcgcttcttcaggtcaatatggattttttttttactcaatcctatgtgtatactgtcgagtaaaaaag

SEQ ID NO: 12297 - DNA, 1180 bp, Zea Mays
ttgttgagagctgccgattatattaattaagaagtggtccggaccggactaaacaacaaacaacatgcggttggattgagacatcaacacgccaacaccatacaactcaactcgtcggttggattaggacatcaacacgacaccacactcaccgtcgacatagagtgcccaaacaacacaggcagcggcaaccccacacgagagcacaaaactgctaaaggtcatcgttatcaagcaaagatgcagagcatccaacaactccgactttccaaagcagccaacaggcgaaccaaacaaaaagcagatagacaacccgaagcgaaaggtctcaacaagtcatcgttgccgggctcaggcacaaagcagcttcgacttccaatcttgaccctctgccctgcctccggtttttgcccgaccttcgaaacattctggaccacgaagaagggaggttcgcctcgtgttatcgttgccgagccacatccactgatgtagcagctccgacttcacgttgcaaaacccccacctccactcgcataccaggcaccgagaagcgaagcaacagccgaaggcaaagtcctggccgagacgaacttcagaagcgacgccttcaggaagggagtgacgtcactgtgacgccaccgtcacctgtccgtgatggaccgagctttcacccaaggaagatagcactggggtgtgacgcccttaacaggggaagcgacgcccatgggcgtcaccgtcgccgagactttcgcccaagagcccccagcacaacgtctggccgaaacctcgagacacagcaagctgcctccgccgtcgccggtaccccgacgtaccacacaaatgatgaagattttgggcctgccgccaccaccaccctgcgctagcccgatcgactagccgatgctgccccagacgagaggaggtcccgccactgcaattccggccgactgcgcaggcctgccggcgcaccaacgccgacctccaccccggctcatgcgctagcccgggaccagcctgccgccgcctccgacggatggcatgcggaggccgccaacctcgcgcgccagatccagccctccgcgcatcaggtacgcgagcacacagtccaggcacacctccaacccccgagcagcagcgattgccgtcgcggcacgcaggcgccgccaccgggctagcctcg

SEQ ID NO: 12298 - DNA, 3532 bp, Zea Mays
gccagatcgacactaaccacggtcagaccctcaaccagaccccgtggttcgtactccaatattccctgcacaggctccagcggtcgcctcgcgaccccgacccacctccccgcagcctcactcatctcccccgcccacttgccccacgcctccgggctgcgacctccatccatccatccatgtataaagccgccaacgcccgcctcctcctcagatccctctcccccaactcagctgcgctagcctccgtcaacccgggccgcgccgcctcctccgcccgcctcgcgctctcgctgccgtgcggcgcgtgggtcggccgaagcgggctcgtccgccgcgccgccgccttctccgggacacggccgcgtttcgcgggcgccagggcgcagatcggggccgccgtgcctgccgtcgagcagttccagcgcaggatggcaacccaagctactgtgcatgccttcaaggatattctgaccagcctccctaagcctggaggtggtgaatatggaaagttctacagccttcctgcactaaatgatccaaggattgataagctgccgtactccgtccgtattcttcttgagtcagctatccgtaactgtgataacttccaagttaccaagaatgatgttgagaaaataattgactgggaaaacacatctccaaagctggccgagataccattcaagccagctcgagttcttcttcaggacttcactggagttccagcagttgttgatcttgcagctatgcgtgatgcgatggccaagttgggcagtgatgcgaacaagattaacccattggtcccggtggatcttgttattgatcactcagtgcaggtggatgtagcaaggtcgcagaatgccgtacaagcaaacatggaactggaatttagtcgcaacaaggaaagatttggtttccttaaatggggctctagtgctttccaaaatatgctagttgttcctcctggttctggtattgtgcaccaggtcaatcttgagtatcttggcagagttgttttcaacacagatggcattctctatcctgacagcgtagttggtactgattcacacaccactatgattgatggtttgggtgttgctggctggggggttggtggtatagaagcggaggctacaatgcttggtcagccaatgagcatggttttgcctggtgttgttggcttcaagttaactgggaagttacggagtggtgtcacggccactgatcttgttcttacagtaacacaaatgctaaggaaacatggtgttgttggcaaatttgttgaattctatggtgaaggtatgggtaagctgtctttagctgacagggccacaattgcgaacatgtcaccagaatatggagctaccatgggcttctttcctgtggaccatgtgacattggattaccttaaactgacaggccgcagtgatgaaactgtgtcaatgattgaagcatacctgcgagccaataaaatgtttgtggactacaatgagcctccaacagagagaatatactcatcttatcttgagctgaaccttgatgaggtggagcctagcatgtctggcccaaagaggcctcatgatcgtgtccctttgaaggaaatgaaatcagattggcatgcttgcctggacaacaaagttgggttcaagggttttgcagtgccaaaggagcagcaggataaggttgtcaaatttgactttcatgggcagccagcagaaatgaagcatggtagtgttgttatagcagcaataactagctgcacaaacacctcaaatcctagtgttatgcttggtgctggtcttgtagctaagaaagcttgcgagttgggtcttgaggttaaaccatgggtgaagacaagccttgcccctggatcaggagttgtcacgaagtacttgcttcagagtggtcttcaagaatacctcaaccagcaaggattccatatcgttggctatggctgtaccacttgcattggaaactctggtgatctcgatgaatctgtatcaactgccattacagaaaatgatgttgttgctgctgctgttttgtcgggtaaccgtaacttcgagggtcgtgtgcaccctttaactcgggctaactatcttgcttcgccacctcttgttgttgcttatgcacttgccggaactgttgatattgattttgagaaagagcccattggatttggaaaggatggcaaggaagtctacttcagggatatatggccctcgacagaagaaattgcgcaggttgtccaatccagtgtgctgcctgacatgttcaagggcacctatgaggctatcacaaaaggcaacccaatgtggaaccagctaactgtcccagaagcatcactctactcatgggattccaaatccacttacattcatgagcccccttactttaaggacatgaccatgtccccacctggcccctctacagtgaaagatgcctactgcttgctgaacttcggggacagcattactacagatcacatttcacctgcaggaagcatacacaaagacagtcctgctgccaagtatttgatggagcgtggtgtggaccggaaggacttcaactcatatggtagccgtcgtggtaatgatgaagtaatggcaaggggaacgtttgcaaacattaggatcgtgaacaagtttttgaacggagaagttggacccaagaccattcatgttcctactggggagaagctttctgtttttgatgcggccatgagatacaaatctgagggccatgctactataatcctcgctggcgctgagtatggaagcggcagttctcgtgattgggctgctaaggggagttaaagctgtaattgccaagagctttgagcgtatccacagaagcaacttggtggggatgggaatcattcctctgtgcttcaaagctggtgaggatgctgattcacttggcctcactggacatgagcggtacagcatcgatctccctaccaacctcagtgagatccgtcccggccaggatgtgactgttactaccgacaatgggaaatctttcacttgcatcgttcgctttgacactgaggtggagctggcgtacttcaaccatggaggcatcctcccttatgtcatccgcaacttggcagctgcgcataactgaggcaagatcacacaccgtttgacccacaatggcagtggcaggctccatgttcccagggctagcgacctggttctcaatgtagtgacatttgtgatggatctaggggtctctttgtcgattcagcccataaataaagtgtgaaataaaagccgcaggtggaggcaggaacctgctgattgagggaacagttttgcctgtgtttggttacatgaaatatctgtttcacagatgtgtagagcatggtgtaaatgcttcctgtgctgttactttcgtttcgacaaattgattatgctgtagcccttcaggtttcatctagacatttcggtgtcttggagcacattcttttttctgataaaaaaagggaaacaaaggcaaaggagaaccgaaaaacgacgaaacgggg

SEQ ID NO: 12299 - DNA, 940 bp, Zea Mays
ccgatcttaaagtcctcagggaggggcagtatgttgtccacacatttgcggaagctgaagtcatccacagatccatcagtcctgcgcacaaagaagcagtgacttttccacaccgggtggttgcctatctcaaatgcttcgactcctgccccaatcttcttagcagggcaagaggtctcagttccactagaatggagtcagcttcgaccacagtgccatccattgtcgtgtatgtgacagttccaaacagggaagcagggaagaagctgtcacagagcatcatcagcgagaagcttgctgcttgtgtcaatatagtacctggcattgaatccgtgtactggtgggagggaaaggtacaatctgatgctgaagaattactcatcatcaagaccagggaatcacttctggatgccttgactgcacatgtcaaagccaatcatgaatatgatgttcctgaagttattgctctgcccataactggtggtaacaccaagtatttggaatggatcaagaacagcacccgggacaagtgatctctttttttttggagctcgacataatgcgatgatcgaagtgcccatggctccttagctcttccagtggcttgcacacaagggtgtatcctctcttgacctggacatctcaattacgttgctgtaccgaatccatatctaccatcttcaggtaacaagtgatttggtgtcccgtgtgggtaatccaaatgcatgcattgctctgagtattgacaggttggctagtgtaacgtgtaagtccaaaccagatcgtatccaaacatgcgtattgttggtctttgatcgatatttgggccgagttttctgctggtgtgcctgaaactgatgttgcgtcaccgactgttcaattactataacatgttcgctttttacgtgatgattttacccaatggtttgttgatattttc

SEQ ID NO: 12300 - DNA, 2771 bp, Zea Mays
cggtgtcatcctctcctctccgctctgctccctccgccgtgcgctcgaacgaactccacacgaaattatccgcgtaaagttggggagcagcgaacccgtagcgcgcgccccggatccctccacggggggcaatggcctcgtcggcgttcctgcccgagctgggcacgcaggtggtggtgcccgtcgcggccgtggtaggcatcgcgttcgcggtgctgcagtgggtgctggtctccaaggtgaagctctcccccgagccgcgccgcggagacggctccgccgggaagagcggcgccggcgccggcgccagcgagtacctcatcgaggaggaggaggggctcaacgagcacaacgtcgtcgtcaagtacgccgagatccagaacgccatctccgaaggagcaacttctttccttttcactgaatacaagtatgtgggactattcatgggcatttttgctgtcctgatcttcctcttccttggttctgttgagagcttcagtaccaagagtcagccatgccactacagcaagggcaagacgtgcaagcctgcccttgccaatgctatcttcagcaccattgcctttgtgcttggtgcagtcacctctcttgtttctggtttccttggaatgaagattgccacatatgcaaatgccaggacaactcttgaggctaggaagggtgttggaaaggcattcattaccgctttccgctctggtgctgtgatgggcttcctgcttgctgctagtggcctttttgttctttatattgcaatcaacttgtttggaatttattatggtgatgactgggagggcctttatgaggctatcactggttatggtcttggtggttcttctatggctctttttggtcgtgttggtggtgggatttacactaaagctgctgatgttggtgctgatcttgttgggaaagtcgaaaggaatatccctgaagatgatccgagaaacccagctgtcattgcggacaatgttggtgacaatgttggagatattgctggtatggggtcagatctctttggctcttatgctgagtcttcatgcgctgcgcttgtcgttgcctcaatctcttcattcgggatcaatcatgaattcacccctatgttgtacccactcctcattagctctgtgggtatcatagcttgcttgataaccactctttttgcaactgatttctttgagatcaaggctgtagatgaaattgagccggctctcaagaagcagcttataatttccactgctgtgatgactgttggcattgcacttgtcagttggttagggcttccatatacattcacaatcttcaactttggtgtgcagaagacggtgtataactggcaattattcctatgcgtggcagttggtctgtgggcaggactagttattggatttgttacggagtattacacaagcaatgcatacagtcctgtacaggatgttgctgattcctgcagaactggagctgctacgaatgtcatctttggccttgctctgggatataaatccgtcattatccctatttttgctattgcttttagtatttttctcagcttcagccttgctgccatgtacggtgttgctgtggctgctcttggaatgctcagcacaatcgctactggccttgccattgatgcctatggtcctatcagtgacaatgctggaggaattgctgaaatggctggcatgagccacagaatccgtgagagaactgatgctcttgatgctgctggaaatactactgctgccattgggaagggttttgcaataggttcagcagccttggtgtctcttgccctctttggtgcttttgtcagccgtgctgagatctcgactgttgatgttctgacacccaaagttttcattggactgattgttggtgccatgctcccatactggttctcagcgatgacaatgaagagtgttggaagtgcagcactcaagatggttgaggaagtccgcaggcagttcaacaccatccctgggctcatggagggcattaccaagcctgactatgcgacgtgtgttaagatctctactgatgcatctatcaaggagatgatcccacctggtgcacttgtcatgcttacacctcttattgtggggatcttctttggtgttgaaaccctctctggagttcttgctggtgctcttgtttctggtgtccagattgccatctctgcatccaacactggaggtgcctgggacaacgcaaagaaatacattgaggctggtgcatctgagcatgcaagaaccttgggcccgaaaggttcagacccacacaaggctgctgtcatcggtgacaccatcggtgatcccctcaaggacacctcaggcccctcgctgaacatcctcatcaagctcatggctgtcgagtcccttgtctttgctcccttcttcgccacccatggaggcatcctcttcaaatggctttagaggaagaatggaagatggatgggtagtttatttttgccgggggagagcactagatatatgtcatagagaagtttcagtttacccatatggtgcacttcatccttttttgtttcgcttgtactgtgtcgcagtcttgttgaacttgtcagccgtggtatcacctagtttttgggtctagatgcagtagccgagtggagcaaaaacgtctagcattctacaggattggaatttggacatggatgtgttgggaagtttgatactgcatgtagatatttcgatgatgatgatcaaggaatgcacaagtcagatttacctgtaaaacaa

SEQ ID NO: 12301 - DNA, 105 bp, Zea Mays
gatcgcaggattaagtaaacacaaatcacacaccaacatttgcagcggaaataaaattctttattgcaaaatgatttcatattacaataagtttacattatacaa

SEQ ID NO: 12302 - DNA, 210 bp, Zea Mays
gcaaggagtgtcatcacaacaaacaactgaagattgatgcagatgaaaatgatttaagattttgcttcagaataatctcacctgttaaggcatacacattacaggcagaatcaggggctgatcaaaaggactggatccagaaaattactggagttatcgcatcgctactaaattcaccattcccacagcagatggaatgtgaaccagaag

SEQ ID NO: 12303 - DNA, 125 bp, Zea Mays
ataaagctgtaccaacagggctgggtacatcaattgcttctgctatatcctctagagatgcaacatcaacccatcttcttaccacagtcgtgttccatgtctcaacacataaatgcaatggccta

SEQ ID NO: 12304 - DNA, 995 bp, Zea Mays
tgttatggattttgctttcagtgcttttagaacccatttgtaagaagtgcagttatctttcgcagaagtagccataattcttatcaacatgctgccgtgtgagatattcatttatttatatgttgctgttggcagttatcttgagtatctgcgggacctggaaactaagattgatcaagattgggacagcatatcatcttcactcgaggaaatgagaaaatcactcttttccaagaatggttgcttgatcaaccttactagtgacgggaaaaatcttgaaaaatcaaggcaacatattgccaaatttcttgattcactcccaagtagcccatccattggaagtgatccatggctttctcgtctaccttctgtgaatgaagccattgttgtcccaactcaggttaattatgttggaaaagctggaaacctttaccaaagtggataccagctcaatggaagcgcctatgtcatctcaaagcacataagcaatacatggttatgggatcgtgttcgagttagcggtggtgcatatggaggattttgtgattttgacacccattcaggagtgttctcatatttatcatatcgtgatccaaacttactgaaaacactagaggtctatgatgagacagcaagattcctcagagagctagaattggatgatgatgcactcacaaaagctattattggaaccataggcgatgttgacgcctaccagctaccagatgctaaaggttacagcagcctaatgagatatttgctgggcatcacggatgaggaacgccaacaaagacgtgaagagatactagcaacaagcccgaaggatttcaaggagttcgctgatgctgttgaaaccatcaaggacaatggggtcgtggttgccgttgcctcgatagatgatgttgaagctgcgaataaggaaaacccgctattccctgaagtaaagaagtgtctgtgaggtccaccaccacttgataaggattctagtcgggagg

SEQ ID NO: 12305 - DNA, 687 bp, Zea Mays
ttatcacccagccagaccaggcctgcaagagatccattgttgcaagggaagcccaacctaaggcctaacccgcacagggcatagtacccatcaattctttgctggcggcctaagaagaaggatgtgctccgccatactctcgatccaacaaccaggtcgttcagccgcagattagcaggccgcctgcgctcccaagctcctcctttcccctcagcctcccctcctctccggtgtacgtctccgtcgagatggccgccccgctccggcggagcctcccctcccttggccgcgcgcttctcacgccggcgccggcgcggatgctctccgcggaggcctctgatgccctcgttgagatcaagcccggggagatcgggatggtctccggcatccctgaggagcatctccgccgtaaggttctaatttattcaccagctaggactgcatcccagcaaggttcaggcaaagtcgggaggtggaaaattaattttttgtcaacccaaaagtgggagaacccgttgatgggatggacatctactggggatccatatgctaatgtcggtgaagcaggacttacgtttgacagtgcagagtcagcaaaggcgtttgccgaaaaacatggatggaattatgtggttcggaaacgccatgcacctcttctgaggttttctcgcggtgcatgcattctta

SEQ ID NO: 12306 - DNA, 1852 bp, Zea Mays
tatcttatcttaaggctatctgttcgtatgataaaaaaaagtattccttttgaaacaaaaaagaagacaaaatgaatggatcaaataaaaggagaaaaaataaataaaaatagcggttcctccgcgggtaacgggcatcccgccatcgctctgcacttctgcagtctgctctggcttataataaccggcaccttctccttcctccgatctcctcgcctccctcctctctcccagatccgtctcccggcgtcagacgcgcatctccagcaatggcggacgagaagcttgccaagctgcgcgaagccaccgccggcctcacgcagatcagcgagaacgagaagtccggcttcctcagcctcgtcggccgctacctcagcggcgacgaggagcacatcgagtgggccaagatccacacgcccaccgacgaggtggtggtgccgtacgacaccctggagtccccgccagaaggcactgaggcgaccaagaagctgctcgacaagctcgccgtgctcaagctcaacggcggcctggggaccaccatgggatgcaccggacccaaatcggtcatcgaagtgcgcaacggatttactttcctcgacctgattgtcatccagatcgagtcactcaacaagaagtacggcagcaatgtgccgctgcttctgatgaactccttcaacacccatgacgacaccttgaaaattgttgagaaatacacgaattcgagcattgaaatccacacattcaaccagagccagtaccctcgtgtggtagctgacgagttcttgccatggccgtccaagggaaagactgataaggatggctggtaccctcctggccatggtgatatcttcccatcattgatgaacagtggaaagctcgatttactactctcacagggaaaagagtatgtgttcattgcaaactcggataacttgggtgctattgttgacatgaagatactgaaccatttgatccacaagcagaatgaatattgcatggaggtcaccccaaaaactttggctgatgtaaaaggtggcacactgatctcctacgaaggaagggttcagcttctggagattgcacaagtgcctgatgcacatgtgaatgagttcaaatcaattgagaaattcaagatattcaacaccaacaatctgtgggtgaacttgaaggccatcaaacgccttgttgaagctgatgcactcaagatggagatcattccgaatcctaaggaagtcgatggtgtgaaagttcttcagctggaaacagcagctggtgcagcaattaggttctttgaccatgccattggtatcaacgttccaaggtcccgcttcctaccagttaaggcgacatcagatttgcagctagtacaggttgggagcttccttggtcgcttcaagtcgatacctagcattgttgagcttgacagcttgaaggtttccggtgatgtttggttcggttctggaattgtactgaaggggaaagtgaccatcactgcaaaacctggcgtcaagctagaaatcccagacggagcagtgattgggaataaggatatcagtggccctgaggacctttagataagaatcagcgaatcagcaaggaggctcacttcgccaagtggcggatcatttttcgtgtttttttcctgtatattcaaacaggttccatgatattatggagaatattaattgccagtataatccagaaattttacatgtattttactttgagggaaatgttttacacactccagttctgcttattgtccaaaaggaaatttctgtgtcttgaacagaaaaatatcttgccccagcaactaccatctcagcatgcatctaatcatagattattacaa

SEQ ID NO: 12307 - DNA, 3154 bp, Zea Mays
atctctggcaactcctagaacgttcacggccacaccgccacacccacaccacacagcagtgcagcacggcgccccgcccctcgtactcggtgagatatatccccgccttccctcgcgaaagctctcgtagagacgacgacgacgacgacgacgacgacgacgcgagaagtcgaggcgccgctgcttgctaggaccgagcttcaggaagtctccaacggccccggcgccggcacggcctgccccgcgccgccacagggattgattgtgatcagatctattctgtagtggtcagcggctgagggtgaaccgaagatgagcgttgtgggattcgatctcggcaatgagagctgcattgtggcagtcgcgcggcagcgcggcatcgacgtggtcctcaacgatgagtccaaacgcgagacacccgccatcgtctgcttcggggacaagcagcggttcatcggtacggcgggcgccgcgtcctcaaccatgaaccccaaaaactccatttctcagatcaagcgcctgctcggccgcaagttctccgaccccgagctccagagtgatctcgcgtccttcccgttccgtgtcacggagggccccgatggatttcccttggtacatgtgcggttcctgggcgaggagcggacgtttacccccacccagctgcttgccatggtgctgtccaatctgaagggcattgctgaggggaaccttaagactgcggttgttgattgctgcattggcatccctgtgtacttcagtgatttgcagcgcagggctgttcttgatgctgctactattgcaggcctcacgccgttgcagctatttcatgagacaactgccacggcattggcttatggcatttataagactgacctcccggagcatgaccagctaaacgttgcatttgttgatgtcggccatgctagcttgcaggtcagcattgtcggttacaagaagggacagctcaagatgctttcgcatgcatatgaccgttctcttggtgggagggacttcgatgaggccctcttcaagcacttcgcggcgaagttcaaagaagaatataagattgatgtttaccagaatgcccgtgcatgccttaggttgcgtgtggcgtgtgagaagcttaagaagatgctgagcgccaacccagaggccccactgaacattgagtgcttgatggatgagaaagatgtgagagggtttattaagagagaggagtttgaacacatcagtgcacctgtgctggtacgtgtcaaaggacccttggagaaggccttggctgaagctggcttgacaactgaaaatgtgcactttgttgaggttgtcggatctggttctcgtgttccagccataatcaagataatcactgatttttttgggaaggagccgagacgaaccatgaatgcaagcgagtgtgttgcgcggggctgtgctctccagtgtgctattctcagccccactttcaaagtgcgggaattccaggttaatgatgggtttcctttctcaattgcattgtcatggaaacaagactcgcagaacagtgcaccccaacagacccttgtatttccaaaggggaatgtaattcccagcattaaagctctaaccttctataaatccagtacatttgaagttgatgttttgtatgtggacacatgcgactcgcaaattccacagaagataagcacttacacaattggacctttccaaccctccaaaggtgagagggccaaactgaaagttaaagtgcgtctcaacatccacgggattgtcacagttgattcagctatgatgctggaggaggatgtggcagttccagtctcatctgctaatgaagctccaaaggatactacaaagatggacacagatgatgcaccaagtgatcctgtctctggaactgatgtgaatgtgcatgagcctgatactactgaggctgctcctgcagctgaaaatggaacacaaaatcccgaggaaaaatctgttccaatggaaactgatgcaaaggttgagccatcaaaaaggaaagttaagagaacttctgttccggtccatgcgttggtctatggtgccttggctgcagctgacctgcagaaggctgtagagaaagagtatgagatggctcttcaggacagagtaatggaagaaaccaaagagaagaaaaatgctgtggaagcttatgtctatgacatgcgtaacaagctctacgacaggtacaacgattttgtgacacctgaggagaaggaagggttgattggaaagcttcaggaggttgaagattggctatatgaagatggtgaggatgagacaaagggagtctatatttctaaactggaagatcttaagaagattggtgacccaattgaggcacggtacaaggagtcgacagaaaggggttcctctgtagatcaactggtctactgcatcaacagtttcagagaggctgctttgtccagtgaccaaaagtttggccatatcgacatatctgagaaacagaaggtcatcaatgagtgctctgaagtagagaactggttgagagagaggaagcagcagcaggacgccctacctaagcacaccgatcctgtgctgctcgtatcagatctgaagaagaaagctgaagcacttgacaggttctgcaaaccgatcatgactaaaccaaagccagctccgaagccacagactccgccaccacatactccacctccacagcctgaagcccaagcatctgaccctcaaacaccagaacaacaacaaagcgggactggtgcagctggtgagccgggtagtgagggaggtgtgcagcaggcctccggtgagcaaatggacatggacaggcccgatgattctgcggatgttgcggcataattgtggttgtggttgtcatctgtcttatgatcgatcaaaattttctgtttgtctggtaggtggatgagttaaggcaacagcatattctcccaagcgatttcgttttagggtttggaacattgagattgaggtaatgcgtcttgtccagcgttgttttggtctggactgtgaatcagaatagaaacgttgcatgatcgaattgcgccattagatctcataatcaaaaaacgtggatgattcgacaaaaggtatatttatctggatgtttcatgttaattcatgcaaaaaaaaaaaa

SEQ ID NO: 12308 - DNA, 1819 bp, Zea Mays
ccgtcattttctatatcctaaatcatataaactattttatctttcttcacactttatctacatgaaactgtattccctacaaccatatttttctggcagtcagattctaaaaaaaatcctcacaaaaaagttgaaccaaactcgcgagccacgggcccgcgtccggcgctgcacgagctgtgtcacgcctcccggcctcccggggtccagccaaatagggctctacatgtgcacagggccagatttcacgtccgccgacgtggttacggcgtcacatgatcacatctggctcctccgggcccaggcgccagtgacgccgtgcccgcctctaaatagcgcctctctcccgggctgccggcggaaccgaggcggtcaggctccctcctccttcctcctccctgcaaatcctgcaggcaccaccgctcgttttcctgtccgggggacaggagagaaggggagagaccgagagagggtgaggcgcggcgtccgcccgatctgctccgccccccgaagcagcctgtcacgtcgtcctcactctcagcaaccagcgaaaatgggtgccggaggcaggatgaccgagaaggagcgggagaagcatgagcaggagcaggtcgcccgtgctaccggcggtggcgcggcagtgcagcggtcgccggtggagaagccgccgttcacgttggggcagatcaagaaggcgatcccgccgcactgcttcgagcgctccgtgctgaggtccttctcgtacgtggcccacgacctgtcgctcgccgcggcgctcctctacctcgcggtggccgtgataccggcgctaccctgcccgctccgctacgcggcctggccgctgtactgggtggcccaggggtgcgtgtgcacgggcgtgtgggtgatcgcgcacgagtgcggccaccacgccttctccgaccacgcgctcctggacgacgccgtcggcctggcgctgcactcggcgctgctggtgccctacttctcgtggaagtacagccaccggcgccaccactccaacacggggtccctggagcgcgacgaggtgttcgtgccgaggaccaaggaggcgctgccgtggtacgccccgtacgtgcacggcagccccgcgggccggctggcgcacgtcgccgtgcagctcaccctgggctggccgctgtacctggccaccaacgcgtcggggcgcccgtacccgcgcttcgcctgccacttcgacccctacggcccgatctacggcgaccgggagcgcgcccagatcttcgtctcggacgccggcgtcgcggccgtggcgttcgggctgtacaagctggcggcggcgttcgggctctggtgggtggtgcgcgtgtacgccgtgccgctgctgatcgtcaacgcgtggctggtgctcatcacgtacctgcagcacacccacccggcgctgccccactacgactcgggcgagtgggactggctgcgcggcgcgctcgccaccgtcgaccgagactacggcgtcctcaaccgcgtgttccaccacatcacggacacgcacgtcgcgcaccacctcttctccaccatgccgcactaccacgccgtggaggccaccagggcgatcaggcccgtcctcggcgagtactaccagttcgacccgacccctgtcgccaaggccacctggcgcgaggccagggagtgcatctacgtcgagcctgagaaccgcaaccgcaagggcgtcttctggtacaacagcaagttctagccgccgcttgctttttccctaggaatgggaggagaaatcaggatgagaagatggctggcagctggtatgagcacggttggatgcaaa

SEQ ID NO: 12309 - DNA, 1522 bp, Zea Mays
tagaaagagcagcagcaggccatcgagctggagggccgccgcttcatggggctgcatctcctcgacctcaagatcaggggccaccacctcggctcctcccccgccacgaccgtcgtggggcaaggcgagggcggcaagggcagtggcaatggcaatgccgtccagctggaggatgtcatcgtccaagatactcctacgaagatgaacagtaacagccttgcaatgagtgcgcctgcagctgctgtatctgctgcagccgatgcaggaggcgagcacgaggagcagcaggaagcagggcacggggaggaaggcgacggcagtcccaagcaggcagtcaaccttggggaagacgagaagacggaatctggccccgtcacagctccacccattgttgctcgtggattccaagaaagtggtggcgtggccgtggagcacatcttgcctgacagccccttcgcatccaccaccaacaaggaggcctcagctccaacggctcagaacgggggcatcagcaatggcagccctcaccatgtggcttcttcgcccctcttcccacctgcacccgccattgagctgcccccgtacaactcctgcttctttcaggcgcccaggttttctcctgggcatgaagccattgggctgtgaatacagagcaaaaaggggtctccttttcctctaatctgggagggctatcgatgaccccatcaagtggaggaaaggagtagaaagctttgattaacaaatactaggtgtatcttcagagagggacaacaacagcagcaacaaaaaagagagagagagagagaaacaagtctaggttgttttagctctaggcctaagtatatgatagtagtcctataatataaataataatagtcttttagtagctcctgccggtatcaagattcaagtgattaaaaccgtagatggcgtagtactagtaaaaactagacagctagtcttggcagccagttgtagtgaagtgacatggctgcatacagacatccaaaggaaacagacttggtgctgctgcagctgcagtgctgctgcacaaggaaaagtgatgagaccgagacgagaggggtgtactctgctgggaccagagcactcacgggtgcagagagactccacttcacctcatgagcaattctgcagggaccccccctctgaatcgtaggagcatgcaccaagcactccttgtcctggtctttcaccttttgctcatcttttcacccttgtagaaaacagcaggaggtagcagacagacagaggaatgggaaaaaaagtatttattagtcgtttatcttgttggtccatgctttttatattttgcttggttcccaaattaaatgaatatatatgtagagttgtcttagctcactattttaagtttgactagcttaagtacataatgaacgtgctttgtttgctttagatgtactttaacagaactggtttttttggttctggactctaaatatgccttaagatatctatgatcacacacgtgcgtatattcttc

SEQ ID NO: 12310 - DNA, 2416 bp, Zea Mays
acgaactggcgtgccagtgccagtgccgagcgcccgagcccttactcctcttcttccgaccccccgctggcttggaaaaaaggggaagaaaactcgcgcagtcggtcaccgaagggaggagcgcggtcgaggtgccgcccacacggagctgcgaggtgtttgtaggatctcctaggtgagcccctgctgcttggagacagccatggccaccggcgtggctccagctcctctcccacatgtcagagtgcatcatgggggcgtcgggttcaccaggagcgtcgattttgcgaaggtcttgtctgctcccggtgccggcacgatgagggcaagctcctctagaggcagggcgctcgtggcgaagagctctagtactggctcggagaccatggagctcgagccatcttcagaaggaagcccacttttagtacccaggcagaagtactgtgaatcaacacaccagacaaggaggaggaaaactcgaactgtgatggtggggaatgtgccacttggcagtgatcatcccataaggattcaaaccatgacgacttcagataccaaggatgttgcaaaaacagtagaggaggtgatgaggatagcagataaaggagctgatcttgttagaataacagtccagggtaggaaggaagctgatgcctgctttgagatcaagaacactctggttcagaagaattacaacattccactagtggccgatattcattttgctcctacggtagccctaagggtggcagaatgttttgacaaaattcgtgtgaacccaggaaattttgctgatcgtcgtgctcaatttgaaaagctggaatatactgacgacgactaccaaaaagagctagagcatattgagaaggtgttttctccattagttgagaaatgcaagcagtatggaagagcaatgcgaataggaacaaatcatggtagtctttctgaccgcataatgagctactatggtgattctccacggggaatggttgagtctgctttggaatttgctagaatatgtcggaagttggacttccacaactttgtattttcgatgaaagctagtaaccctgttatcatggtccaagcatatcgcctgcttgtggcagaaatgtataacctaggatgggattatcccttgcacttgggtgttacagaagctggagagggtgaagatggaaggatgaaatctgctattggcattgggacactgctaatggatggtttgggtgatacaatccgtgtctccctcacagaaccaccagaagaagagattgatccttgccaaaggttggcaaatcttgggacgcaggccgcaaaccttcaaattggggtggccccatttgaagaaaagcacaggcgttattttgatttccagcgtaggagtggtcaattgcctttgcagaaggagggtgaggaagttgactacagaaatgtcctgcatcgtgatggttctgtactgatgtcagtttccctggatcagttgaaggctcctgatctcctttataggtctcttgcagcaaagcttgtggttggcatgcctttcaaggatctggctactgtagattccattcttttgagggagctcccccctgtagaagatgctgaagctaggcttgcactcaaaagattagttgacatcagcatgggcgtactggcccccttatcggagcagttgacaaagccactcccacatgcaattgtacttgtcaacctcgacgaattgtcaagtggtgcacacaaacttttgccagaaggcactagactagctgtcactcttcgtggtgatgaatcatacgagcagctagatattcttaaggatgttgatgatataacaatgttgttacataatgttccatatggtgaggagaagacaggcagggtgcatgctgctaggaggttatttgagtacttacaggccaatggcttgaacttccctgtaattcatcacataaatttccctgaaaccattgacagagatggtcttgtcattggtgctggggccaacgttggtgctctcttagtcgatggtcttggtgatggtgtattccttgaagctgctgaccaggaatttgagtttctgagggacacatctttcaacttgctccaaggttgcaggatgcgcaacacaaaaactgaatatgtgtcttgtccttcctgcggccgaacactctttgaccttcaggaaatcagcgctgagattagagaaaagacctctcatctgccaggtgtctcgatcgctatcatgggctgtattgtcaatggaccaggagagatggctgatgccgattttgggtacgttggaggcgctcccggaaagatcgacctttacgtcggcaaggctagtggcatattacgcagtcagtgtgtcactgtcgccaacctaccaaaggcgacgaacaatttggcctggtcc

SEQ ID NO: 12311 - DNA, 736 bp, Zea Mays
gcgtactgtccactggcaacaccttcgagaagattcctctcctctcctccccgcgcgctgcctccgctccgctcatgtcgtccgcgccgagcaccacggcgtccaccatcgcagcctctatccacacgccgttctcctcgggtccccgcggggcccgccttccggccgcgctccgcctctcgctcgctcagctccggtcggccggatgccgcgcggcgccaggtcgcctcgctcgccctcgcgcgcgcgttcggtgcggcgcggcggccaggttcattgggcagggcgagttccccgcggaggtgctggagtcggagctgcccgtgctcgtggacttcgtcgccgactggtgcgggccgtgccgcctcatcgcgcccgtcgtcgattgggcctccgaggatggccaagaggtgccaggcagccgacgagaaggggcaatgataaaagacaagttcaaggaatacctggaacctctgttgactacaattacaacagccgcttaaggtcgttgcctccagcttgagcactgaggatgccaacggcactgggaatgttgaaggtttttttccttacatgagcaccatgtttagtttgtaattaactacgttgcgggatcatgtttgactatgtatgattgtcatttgcgtatatttggtaaggtatacataaagggttgtgatgaggtatgcccccactaattttaatacaaagcaagttcgttttcgctatctttgtg

SEQ ID NO: 12312 - DNA, 890 bp, Zea Mays
aactaaaaggaactcttctcagaagttggggagctcaagcgttattcaatgaactatgacaaggatgggagatccaaggggactgcggaagttgtttttgcaaggaaagtggatgctttggatgctatcaagagatacaatggtgttctacttgatgggaagccaatgaatttagagctcattggaaacaatgtcgaaccacctcccttgccaccattaatacacaatcgtcctttgcagaactataacgatatccacagcagtgtgcttcaatcccaaagaaatggtcagcgaagagcacctcaagtcaacggtcggggtggacgcagtagtcaaaccagcggtggccgcggacaggggagaggccgagggcaggaccggaaccgcacgcccatttctgcttcagatcttgacgccgaactcgacaagtaccatgcagcggcagcgaaggaggaatgaggctctggcgttctcttctactaatctatttacacaggtggaaaggcgttctcttctgggggcgttcagaagcatgaagtttactatcttagccctagtgttctacgctagaattcttttcgaccaggattctgttttgtgtgtaggatgaacttgtggttctactttgcaggatcttatttgctgctttgtgggcacgaatattgagaacaactggaaaccgactttgttattgtgtccgccctggtcctgggtctgttctgttgtattttaagtagttttgggttgcctaccgaagacatcaggcaaacatattccggagcccaagagtctctgtgttctgtcttgatgttttacaattgtgcctttagtctttctgcggtcctctacttgctttatttttaaattgcaagtcttctacttgctttatt

SEQ ID NO: 12313 - DNA, 2008 bp, Zea Mays
cgcgctatagaattctcatcaggtcgccttcgtctcccctacggcttcacatccccatcaccgtcatcctctccggggggacggacgccgctgcccctccgccgccccgtcgccatgggcaactgctgcccgggctccggggatgcggagcccgcccccgctgcctccgccgatccctcctcccacctccactccggcagcttgtccctcaaggccggcgcctcggcaggctcggcgcccactcccacaaagccgcccgcgcctatcggcccggtcctgggacggcctatggaggacgtgcgcagcatctacactgtcggcaaggagctcgggcgtggccagttcggcgtcaccagcctgtgcacgcacaaggctaccggggagcgcttcgcgtgcaagaccattgccaagcggaagctctccaccaaggaggacgtggaggacgtgcggcgcgaggtgcagatcatgtaccaccttgccgggcagcccaacatcgtggagctcaaaggcgcctacgaggacaagcagtcggtgcacctcgtcatggagctctgcgccggcggggagctcttcgaccgaatcatcgccaagggcaagtacacggagcgcgccgccgcgtccctgctccgcaccatcgtggagatcgtgcacacctgccactccctgggcgtcatccaccgcgacctcaagcccgagaacttcctcctcctcaacaaggacgagaaagcgccgctcaaggcaactgacttcggcctgtccgtcttcttcaagcaaggggaggtgttcaaggacatcgtcggcagcgcgtactacatcgcgccggaggtgctcaagaggaactatggccccgaggcggacatctggagcatcggcgtcatcgtctacatcctcctctgcggagttccgcccttctgggccggcaagctcaagcagttcacggcaatgaaccagttcaagaaggccgcgctgagggtcattgccgggtgcctgtcagaggaggagatcaggggcctgaaggagatgttcaagggcatggactccgacaacagcggcaccatcaccgtggacgagctgcggcgagggctggccaagcagggcaccaagctcagcgaggccgaagtggagcagctgatggcggccgcagacgcggacgggaacgggacgatcgactacgaggagttcatcacggcgacgatgcacatgaacaggatggacagggaagaacacctctacaccgcgttccagtacttcgacaaggacggcagcgggtgcatctccaaggaggagctggagcaggcgctcaaggagaaggggctcctggacggcagggacatcaaggacatcatctcggaggtcgacgccgacaacgacgggaggatcgactacagcgagttcgtggcgatgatgaggaaagggaccgccgagccgaaccccaagaagcggcgcgacgtcgtgttgtagcctgtgtaggagcatgcgtagaggtagctgctgatatatggtatggtatatcggatggtaaaatggaacggcgtccagcagttgatgccattgccacgacggtggttgcttgcacgctggtcgagcagcacaaggcgcgcgcggtggtggcagggagatgcgcgcactcggctgcgaatacgtggagatgctggagcatggaggggacagagactctttgacaatgtacgtagctactatgggatgatggaatggaaggatgcacgcatacctgatcgaccgaccgaggacctgtgctggagcctctgaacacacagcagcagcagctgctgctgctgtgtcttggatccgtaggtatgcttactgatggttcgagaattcgtatgcgtaaaacgtgcaatggccatggactgtgtatatatcctcagatgtgtaagtgtaagtaacgtcgtaaagggaagaagaaaaatataatatgatgagacagttttttttttccttccctttgtagcataaccattggttcgcggtgatcacagaggtagag

SEQ ID NO: 12314 - DNA, 2270 bp, Zea Mays
cttgattgatgaaacggggaatccttcctgccaccaattcctgcctgtcatttgtctctcgcccgccccactgcgcgtcggattcagcaaagccatccttctccttcagtgacaaaggatccagctcgtagtcgcagcccatccatgccccatgcggccatgcctatatatactatactggacgcactccggcccggcgtgctcgtgctcgtcctctcccagcaccgtaaccaccgacagagcacgcaccatgacgaggaccaccaccagcagcacgctgctgacagcggcgctgctctgcctcgcgctgccgctgctccccggggccacggccaataaggcggcgcggcggcggcagggcgacaacctggcgcgcctgcgcgggtcgccgtggccggccgagtcgtcggtgtcgctggcggtcgcggcgacggatgacagagcgtcccggcacgcggcgtcgccgcccgcggggcgcagcaaggaggacgaccgcgtggacaagctgcccgggcagccgtcgggcgtggacttcgagcagtacgccgggtacgtgacggtggacgccgcggccgggcgcgcgctcttctactacctgaccgaggccgtcggcggcggggcggcggccaagccactcctcctctggctcaacggaggccccgggtgctcgtcgctggggtacggcgccatggaggagctgggccctttccgggtgaagagcgacggcaagacgctgtaccgcaacccgtacgcgtggaacaacgcggcgaacgtgctgttcctggagagccccgccggcgtgggcttctcctactccaacaggacggaggactacagccggagcggcgacaacaagacggccgaggacgcgctcctgttcctgctcaactggatggagaagttccccgagtacaagggccgcgacttgtacctcgccggcgagagctacgccggccactacgtcccgcagctggcccacgccatcctccgccacgccgccgccgccgccggcaagccgtcgtcgcccatcaacctcagaggcatcatgatcgggaacgcggtgatcaacgactggacggacaccaagggcatgtacgacttcttctggacgcacgcgctcatctccgacgcgacggccgacgccatcggcaggcactgcaacttcagcgccgccgccgccgccgccgcgggctccaacgacaagtgcgacgaggcgacgtcggaggccgacgaggccctggaggacatcgacatctacaacatctacgcgcccaactgccagtccgccgacctcgtctcgccgcccatcaccccctcgatggacaactttgacccgtgctcggattattacgtggacgcctacctcaacgacccggacgtgcagcgggcgctccacgccaacgtcacccgcctcgaccacccctggtccgcctgcagcgatgtcttgagacgctggactgacagcgccgcgaccgtcctgccgattctcgcggagctcctcaagaacgacctcagggtgtgggtgtacagtggagacaccgacgggagagtgccggtgacttccagcaggtactccgtcaaccagctccagctccccgtggctgcaaaatggagggcatggttcagcagcactcagggggccggggaggtgggtggctacgtggtgcagtacaagggcaaggagaagggcagcctcagcctggtcaccgtgaggggagctgggcacgaggtgcccagctaccagccaaagcgagcgctcgtgcttgtccagggcttcctcgcgggcaaggcgctccccgactgcgaaacatgcgagtcgggttaagcgtagctagcgtttggaagcagcacgcagcacgcagcacacaagagaagagagcgctgtgcaacagcatgtacccccatgcatccatttgatccagtacgacagacaaagtctgagatagaaacatacgcacgcacccaccgtaccttgcagaaaaccatgcaaaaatgcagtcatacacagagcaatctgtacacgaatgaagatggaatcaaacggatctttaagcaaatctttacagtgatgaaatgaatgagctatcactagagaagtgtgctataaaaaagaactgattttatatagagagaaccactgttgtgtaagcaaagtttaggtgcaaatatagtactgaacaccatcagttattttctaggcttacaggaacgctgacaaggcttgtattagaagcaacaggctctaagaaggatgtagagagaggccgacg

SEQ ID NO: 12315 - DNA, 200 bp, Zea Mays
cacaggcacagctgacaaacatatactgaacaaactgttcggctatgagccgtatcctgggttctgcaagaacgtggacaggaagatcgaagccgatctcagggcgagcgagagctcaagcagaggaaggacaacctgattgattgggaattcgggagtgatcctccggagcgcaaatcacagatcgccagaaatccttc

SEQ ID NO: 12316 - DNA, 631 bp, Zea Mays
gccaacatcgggaatccgatccatagctgggtatggatcagaaagtgaagcagacgatgaagcagcaatggtaagcttgccaagtgacattgacaaattaaaccgggcatccagaaaaagcgctgtcagactccaggagattggaccaaggatgactatgcgcctagttaaagttgaagctgggctatgttcaggagatgtcttatacccatggcctgtggaaaaggaagtggtgggaaagaaaggaacagaaactggggaagtagaagggcaagaagacgattctgaggccacagatgagtccgaggatgagatggtgtaggatttcagatgttttggacaggcagacgcaggtgttttgacagtcctggatgtttcatgctgaaaccaacgggccctgtgcccaataacgtggtgcattcatgccaattttgtcactgaaggtgcattgcattcgttgtaacgaagtgtaacattgttttgccgatggttacctcttttgtgttatgacaagtttggaggatagtttttggttcgcagtctaagatttctcattcttgtcggggtttcagagggatggacatggggcttttggttcagcttttttctgactagcttttctgaaaatttg

SEQ ID NO: 12317 - DNA, 659 bp, Zea Mays
atcatggtggtatggcggcattcgtgcaggaccgacccccacctccacctcgtatgctctctctctctctctctccttcccatggctgatgcctgacacggtgacacccccaacattctccctcactagctagctgtgtcctgcctacctagcggtatcaatacccggctgcagctcaccaccaccaccaaccaaccaacccacagttcccatataggcagccatcggctacacagcctcgcctccgtaagcagagtgtgtcgttggaagagagacgacggcggccatggcgacctccttccaggggacgaccaccaagtgcaccgcctgcgacaagacggtgtaccttgtggacaagctcaccgccgacaaccgcatctaccacaaggcctgcttccgctgccaccactgcaagggcaccctcaagctcgccaactacaactccttcgagggagtgctctactgcaggcctcacttcgaccagctgttcaagaggacagggagcttggacaagagcttcgaaggaactccgaaggttgtcaagccagaaagaaacgttgggaatgagaatgctactaaagtctcaagcgcctttgctggcaccagagagaaatgtgttggatgcagcaagacagtctatccaactgagaggcatccag

SEQ ID NO: 12318 - DNA, 836 bp, Zea Mays
aacggctttatacatctgtttgcccgtacctacgtaaactgatcgagcttggggcaacagacctcctggtgcctggcgttctcccaattggctgcttcccgttgtacctgacgctgtacaacaccagcagcaaagcagactacaacgcccggaccgggtgccttcggaggtacaaccgcctggccttccaccacaacagggagctgaagcagcagcttgacgagcttcagaagaagtaccccaagacgaagatcatgtatggagattacttcaaggctgcactgcagtttgtcgtcaaccctggaaaatttggttttagcacggccttgcaggcgtgctgcggcgcaggagggcagggcaactacaacttcaacctgaagaagaagtgtggcgagcagggcgcgagcgtgtgctccaacccgtcgtcgtacgtgagctgggacggcatccacatgaccgaagctgcgtacagaaaggtcgccaatggctggttgaatggcccgtatgctcagcccccaattctcaagtcatgatcgagattactaggctgtgcgtaataccgccgcagctgcatgctgcggctagagatatatatgaggagtgtttcaggcaatagatatgctaagttatggtaaagctatttggtctgttcattggaagatctgtataaactgcgccggtatagatatgttcccagctgaaatggctctagcacagatgtgcatggcatgttctctgattcttttcatttgttctaaaaaaatattgcggcagtaatatgagttgataaaagtaactaaatttctgcaattttatcaggcttcaaagctaccatt

SEQ ID NO: 12319 - DNA, 82 bp, Zea Mays
ttcctttctaatttgagactacacacataatagatttgaaaatgaagttagtctcaaagattcaaattatagactattctcc

SEQ ID NO: 12320 - DNA, 544 bp, Zea Mays
tggagcgtcaaagattgcaaaatgcaaaacttttgaaatagaatgaccgttaaaagtttaacgataacacatagacctgacaaaatatgagtcactcaatgctcaaccaaccactacgataccattacaccaattataggttttagacaatcagataagaaaaatttattctcggaagcacttccggggaagaaacacaactctctttgcatgctttcatcactctttgcatgctttcatcagtttgttcatttacttggtgctgttcatgtggcggatcagctccagtgctgctgggaatgatgttgaaactagcagcccttccacccctccagtccttagatgagggcccatcaacagtcttctgggtagctgcaaggatccacatttactacactgaagatcacaaacagattgctagacaaagtttccattcaaccaatttcgcaaagcataccagtgatggcatgaacagtggtcatcagaccctcaacaataccgaacttgtcattgatgacctgcagcaaaaaaaaaacaacataag

SEQ ID NO: 12321 - DNA, 1615 bp, Zea Mays
tgtttggagagcagatagcctaatgccaaaatagcaaatttctcagccgtgacaacacagcctgcgctccccttctttcccgttcggctcacagcgaagaaggaagccggttagggtttccacctcctttcccctcctctccttcagcgacgaccgcgggccacaccctcgatatccttcccctcggacccggaggcgagcagcagcctccagcgcctgccacgcctgcccgtctcgttattgggtgagtgcccgattttgctctcttcagtcacagatccagacattttccctcccatttattagtattcgggtagccccgtggtggggtagcgaaaccttgattagtttggtccatcgaggaggattcgccatgtctgacatggagtccgtcgcagctcttatgaactcgacaagctccaagatacagcagcttcaggaggcatttgctgagcttgagagccagagcacggtttccatgaacctcaagtggaagcagcttgaagaccactttcgtggtcttgaacagtccctcaagaaaaagtttgacgagctaaaagagcaggagaaggagttccaggagactgtcgcaaaatcagagcagattctggagcagcgggaggcagctgttgtggcaaaggaactgacctctttggagaagttgcaggagaagagggaagctgcattagctatgatctttagcaagtccaggctttccttacctgttcctaccatcaacccaatgaacaaggcgctgaataatcttggtgtcaagtggccaaaaccggcatctgaggagagtgtgcacttgcaagttgataatgctgtagtgacgcctcgttctgagcttgttgcactctgtgaggaaatgaatgtgaaggggcttcataagttcatatccgacaacaggaagaacttggctgccatccgcgaggaaattcccagtgcactgaagaaaacatctcatccgtatggcttggtgttggattccctggaagacttctattctggagataatcttgtattagatggcaaaaaggatggggaccttctgggtgttagaaggacgtgcctgatgttgttggagtcactcggacagttgcacactgctggtataacttgtttctctttggagggtcacatgcttacaactaatatcatagagcgagcaaagaagattgcatttgagtggaagtccaagttagataatcttgagattgatgctagtaatgggaactgtcttgaagctcatgcatttcttcaactcctggcaacctttggtatttctgctgaatataatgaagatgacctgtgcaaattgcttccatatgtcagtcgtcgtcgtcagacacctgaactttgtcgattgcttgggttgtcacagaaaatgccaggtgtcattgaagttctggtgaaaagtggaagaactattgatgcaattaatttagcttacgtgtttgagcttactgaacagtttgaaccagtgcaactgcttaaagcatatctgagggatgttaagaaactgtcacatgccaggaatgtcaaaatttctcctggagcacaggtacatctattcctacccagagtttgctttcagagtgccaagcataccaca

SEQ ID NO: 12322 - DNA, 88 bp, Zea Mays
ctcccatcccatcccatcccatctttgttcttcgactccctgcatgcatggatgctgctctagaattcttctcagacgctgcacgaag

SEQ ID NO: 12323 - DNA, 122 bp, Zea Mays
tcgtcttctacaggaggaacccaaagtggtacaccacgtgagcgattgattctcctagccttttgaactctctggtaaagcacttgtctagttccatcagtaggtaatccttgagcttcaag

SEQ ID NO: 12324 - DNA, 904 bp, Zea Mays
tacttgcctgaagagatgaggaacccagattcgttcaagtggatgctgcagaatccaatgtaccggcaacaactacaggatatgctaaagaacatgggtggatctcctgatcaatgggataaccgtatgcttgatcacctgaagaactttgaccttagcagtccagaagtgcggcagcagtttgcgcaagttggcatgactcccgaggaagtggtatcgaaaataatggcaaacccagatgtagctgtcgcattccagaacccaaaaatacagacagccatcatggactgctcgcagaaccctcttaacattgtaaagtaccaaaacgacaaggaggtcatggatgttttcatgaagatatcacagatctttccccaaatcaacggctagctggtcttcactgcgggattgcagtcttgattttttttgtcggcctatcatcccctgtgtctggagggcctgctgcggtaaccatctttgaaggaaaagggaacacctgttgctgttgggccgtgacgctctggatacaccctccctgtgtcgagctttttgagtttcatatgtagtagtacatcgtgtgatgtagcggccttggtctagctatgagtatgattgacccaccctcttcccgcttcataaagtcaggctagtgagcgtagcaggggcaaatatttgttatttacattgcatgggcagccagccggtctgcgctctgacgttgcatggtttatctcgtaggatgtgaaaggcgcagcagacagacatggttcgtatcagatcaattttgatatatactaattgctattgttagtgtgtaatacgtcagtgacacaatggcaatgcaagtaatctgtttcgagacttgctgaccatgtttgaccagggttgcgatgcaacgtattcc

SEQ ID NO: 12325 - DNA, 652 bp, Zea Mays
gtttggttctctgctaattgtgtcacaacttgcctaagacccgtataagtgcaaaagctcagcgtaagattgcaagagagatcaaaaccgcacgtgcgtttgggttaatgccttttacaacaatgggtagaagaccattcatttttggcagaagtgcggaggagcattattgggatgatggatatttcggctatgtgaagcagaaggatggtgagcctgttgagaatgaggatgctgagccaaatgtggaggctgtgtaaacattctgaagcatccttttgcaagcgctccgttcagtttcttctggtgccttcatgacacaagtcacacaatgcttgttttgcgtcttcagatcatagcgtagctcagcttgaataaaactgtaacatcacgcaagttttgtgaaactcgtgccttgctcaattgtgccactttagcagacatccccagctcacctcatcctggctggagatcatatgcagatatgaaatggaacgtgggatcagagttttagttgacgctcaaaattttgagatagcagcactgatttcagtttctgttggataatgattgtttggctgttcaacgagaaaaatattgtatgcacgtacaaaacgttagattttttaacaacgaaaatattttcttcaaa

SEQ ID NO: 12326 - DNA, 1151 bp, Zea Mays
gaacttcgatctgatccagcatgaatcgatgtcttctgaaatttgttacattattgttgtgtaaccttgggggttggaagcaggcttgcctggagcaggaactatgctgcgaaggacatcaagtttggtgttgaggcccgtgctctgatgttgaggggtgttgaggagttggcagatgctgtcaaagtgacaatgggacctaaggggcgcaatgtggttattgagcaaagctttggtgcaccgaaagtcacaaaggatggtgtgactgtagcaaagagcattgaatttaaggatagagtaaagaatgttggtgcaagccttgtgaaacaggttgctaatgcaactaatgacactgctggcgatggtaccacatgtgccactgttttgacaaaagcaatatttactgaggggtgcaaatctgttgcggctggaatgaatgcaatggatttaaggcgcggaatctcaatggctgttgacgctgttgtgaccaatctgaaaggcatggccagaatgatcagcacttcagaagaaattgcacaggtgggtacaatatcagcaaatggggaaagggaaattggtgagcttattgccaaggctatggagaaggttggcaaagagggtgtcatcactattgcggacggtaacaccctttataatgagcttgaagttgtggagggtatgaaactagacagaggttacatctctccgtacttcattaccaactcaaaaacccagaaatgtgaattggaagacccattgatcttaattcatgacaagaaggttacgaacatgcatgctgtggttaaggttttagaaatggctctgaagaaacaaaagcctctactgattgttgcagaagatgtggaaagtgaagcattgggcactttgattattaacaagcttcgtgcaggcatcaaggtctgtgctgtcaaagctcctggttttggggaaaacaggaaggcaaacttacaggaccttgcaatccttactggaggagaggtaataactgaagaactaggaatgaaccttgagaattttgagcctcacatgctgggtacatgcaaaaaggtgactgtctctaaggttgcccctgttattcttgatggagccggagacaagaagtccatgaagagagacgaatctctagaaac

SEQ ID NO: 12327 - DNA, 979 bp, Zea Mays
cggaacggccgatctttccgccggccgcccagtcgggtcgttcggtcgccgattcggccccgatccgactacctcttcaagctgctcctcatcggggactccggtgttgggaagtcttgcctgctgctgaggtttgcggatgattcatatctggagagctatatcagtactattggagttgattttaaaatccgcaccgttgagcaagatgggaagacaataaagctacagatttgggatactgctggccaagaacgctttaggaccatcacaagcagctactaccgtggagctcatggcattattgttgtgtatgatgtaactgaccaggagagctttaacaatgtcaagcagtggctgaatgaaattgataggtatgccagtgaaaatgtgaacaagcttttggtggggaacaagtgtgacctggctgagaacagagtagtttcttacgaggctggcaaggcccttgctgatgacatcggaataccattccttgagactagtgccaaggatgcaacaaatgtggagaaggcattcatgaccatggcaggggagataaagaacaggatggcaagtcaaccagctgcaagtggtgctagtaggcctgcaactgtgcaaatgcggggtcagcctgtttctcagcaaagcagctgctgctcttgatcgtctgtctagatcacagtagtgtgattgtgcagcaagcgaaacttaaattggttgctccgtgtacattaagcctattactgtcccaaagaactcgatgttatctatcggatactggaagtctgtctatcgactgcaacgcttaagcagatatggcctgttttatctgcctgttcttattccagtgctaatgtgatgttggatcaaatcgtttgtcagttcagcagtacgctaatgatgcgtgtgcgctggagtcaggaggatattattttgatgatgagcactcgttaaactgtctatgttgtctcaacgtagc

SEQ ID NO: 12328 - DNA, 968 bp, Zea Mays
gaacttatcttgttggtagttcagttaacctgcatgttttgttcatataaaagaaaaatggaagagagttttgaagctttgaaccccagggcagttgctgttgtgatagaccccatccagagtgtgaaggggaaggtggttattgatgcattccgcctaattaatcctcagaccatgatgcttggccaggagccacgggcagacgacatcaaatgttgggcacctaaataagccatcgattcaggctcttatccatgggctgaacagacactactactcgattgcaatcaattaccgaaaaaatgaacttgaggagaaaatgttgctgaacttgcacaaaaagaaatggacagatgggctaattttgaagaggtttgacactcattcaaaaaccaacgagcagactgtccaggaaatgctaaacctagccatcaagtacaacaaggcggtgcaggaggaggacgaactgccacctgagaaacttgcgatagcaaatgtaggtcggcaagatgcaaaaaagcatttggaagagcatgtgtccaatttgatgtcatcaaacatagttcagaccctaggaaccatgctcgacacggttgtattttagtctctactaatattgttgttccaaactgaaacatagcccactctatcgaagcatgacacatgcaatgagctcgatgccggatacatttttggttctaagatttgtttacgaatggatttgtctacattctgttgttaaactccctaccttttctatcaaagcttcagtatgttctagttatatttaagccaatgtgggtccacattgtcaattgggatgtcattacccctgggagaaattgtgtaatgcgattatatgacttgttgcgtgggccgcgtgtgatggcttattttgtttgttccacatgcgttggcaccaagtttctcatgcaaatatttgagtgatcttgcaaactcatctattc

SEQ ID NO: 12329 - DNA, 439 bp, Zea Mays
gactcaggcaccttatggacctttcatttgtacatttggctactggagtttgacgagtcaaaaactgagtcagaggaaggcagtacagaagaggagcaagatgatgatagttccaaaggcaacaaaaaggtagagtagcaggatttagttccggaggtaaaaggacaggaaaacagttttcgtgtaatgtcgtctggcagctaaaaaaacgggcctgatgaccctctaataccggattcgctcgccttacttaagaacttagaagaaatggttcagcatgatacaagttttattttattttttgtttcgttttgcggattatttgccctgggctgttacttgcgatgtactccctgattcgttgaattcaccagaactgagacttgaccgacgcatatattcatcacgtatacacgcacatgtgtgtgttgttgccaaa

SEQ ID NO: 12330 - DNA, 1300 bp, Zea Mays
caaacttgtccttagtctctcttttaactttactctataaacatttttactgcgaactctacttttcttgcggagtaagaagagtggcggcggcgggccggcggcgtgtataggcgtgttcccgagcagaggcccccccaaacgcgcagcgcacacaaacacacaccagcccagctccgagagatcatccggcggccggcgagatgagccgcggcacgggcgcgggttatgaccgccacatcaccattttctcccctgagggacgcctgtaccaagtcgagtacgcgttcaaggcggtgaagtcggcgggtgtcacgtcgatcggcgtccgcggcgcggactccgtctgcgtcgtcacccagaagaaagtcccggacaagttgctggatcagacgagcgtgacacacttgttcccgatcaccaagtacgtcggattgcttgccactggcctcacagctgatgcaaggtcattggtttcccaagcaaggaacgaagcagctgagtttcgtttcaaatggggctatgagatgccagttgatgtgttagcaaaatggattgctgacaaagctcaagtttacacgcaacatgcatacatgagaccccttggagtagttgctatggtcttgggctacgacgaagagaaaaatgcacaactattcaaatgcgaccctgcgggtcacttctttggacataaggcaactagtgccgggctcaaggagcaggaagcaataaatttttggagaagaaaatgaaggatgacccgaaattctcctatgatgaatactgttcagattgcaatatctgcattgcaatcagttctccaggaagatttcaaggccactgagatcgaagttggtgttgtgagaaaagaagaacgtcttttcagagttctcacaacagaggagattgaccagcacctgacggcaattagtgaacgggactgagctgccatatgttggacatttgatccctccacactgcgccgtgccattgtgcttcagcactgccatttagtttgacatcaaatgaactgagtgtaccatttcatgtctaacactgaaaacaagctcgttgattgaatttggcacagtttggttttgcattgctaactatatttgcagggctgagcgattggtagttcatttcaccaatacgcgtaaccatttttaacggtgtttgttgtgagttgccataagatttagctccacctacccatagttaagattgggagcaagaatagcagcgtttagcatgttggaaatagagtgggttgggtgttgtgtattgatgctgaatgagg

SEQ ID NO: 12331 - DNA, 69 bp, Zea Mays
aaccgacttaaagatgaaaaggctattcagacctcgatgaatcgttatagagttattagcaaatgtaaa

SEQ ID NO: 12332 - DNA, 1278 bp, Zea Mays
gggctatttataaaaaaagctgtaactatttcacctgaaaggaattggtatatcttcttcagatctggtttcaaagtggatgggtgaaagcgagaaattagtcgcaaatcttttccaaatggctcgtgaaaatgccccttccattatctttattgatgaaattgattctttatgcggtcaacgtggagaaggtaatgaaagtgaagcatctaggaggattaagactgaacttcttgtgcaaatgcagggtgttggtcataatgatgataaagttcttgttcttgctgccacgaatacgccatatgctctggaccaggctgtgcggcgaagatttgacaagcgtatctacattccgctacctgacacgaaagcaaggcagcatatgtttaaggtccatctcggggatacaccacacagtttaactgaaagcgatttcgagagcttggcccgtcgaacagatggattttctggttctgatgttgctgtttgtgttaaggatgtcttatttgaacctgtgcgcaaaacacaggatgccatgttcttcttcaaggcagacggtgacatgtggatgccatgtggaccaaaacaaccggggtctgtacagaccacaatgcaggagcttgcatccaagggcctcgctgcaaagattcttccaccacctatctcaaggacggattttgagaaggtcttgtcgaggcagaggccgacagttagcaagaaggatctggaggtgcatgagaggttcactaaggagttcggcgaggagggctgatacaccgcgcgcggacacacacccatgcacagctgcaccacagaaatgtatattgtttatcacttcgattgttctgcttggaagttgcattcacaggattgtacatttggtagcccaactatgagtaatcatggcagctgctttaccgtgttgggctaccgatgggcctctgttgtcaacttatttcaatttttatttatgcacatgaaaattttccgcaggtgtattattgaataataattcttaacgtggagcccttgtggttgctagtttctttttctaacgttccttagttttcacgccgagtttcttttccttcagtttggtttacttgcagggccattttattagacgctacatactgaaggtgaacttcttgttctcaggcgttttatttgaggtatctagctctggtagaatctggccatgtcagtaatggtttacatttttatagtttgtatgtatctaccacaaacttcatcagttttgaatgatctgaatctaca

SEQ ID NO: 12333 - DNA, 85 bp, Zea Mays
tactcctcctggtcctctcctgcggaagcagtaacccactcgatcgtctatctcggtggcagggatgagggccaagtcacaccat

SEQ ID NO: 12334 - DNA, 610 bp, Zea Mays
ttttattttgaaggaactttcccattaaagaaaactcggtgccacttttagcaaggtaatgaacataacagacagacggtgccgaggtaaaataacatggtacctggtatctaagttatgatatatcgtttatacttattcatcaggtagttgagcaaaatatggaaaatgggagaacacagtatatcaaccacaatgaaagacagattcagcgataaaggctctcagatctcaagttctcagcaatctcagtttcccagcggtcaccattctcgagcaatttctccttgtcgtacagtagttcctgcatcgaagcatcaaactcaaagttaggcccctcaacaatagcatcgactgggcaagcctcttggcagaacccacagtaaatgcatttggtcatgtcaatatcatacctgtgaggagataaaagcaacagaaattcagattaaagtttaattgcagaacacagtgggtaaatcatagttctattgacaaaaaagagagaaaaaccttcattttgattaccttgtggttcggcgactgccgtcttcacgttcttcagcctcaattgtaattgcctgagctgggcatatctggacatcgtttatac

SEQ ID NO: 12335 - DNA, 2126 bp, Zea Mays
tttattgatacacaggtgctgaggtgcgtcgtttttttggtgtttattgacatatcccaaggcatctacaagtccagcttctgaagcagaacacttcaggtcatcaccagagtttgaagaatgaggtttcaagccccatatctgttctggagcggaagagtggagagctccacaaggtacaacttcacgctacctctgccatgcttcctgtcgctaccatggagaaggcaacgaaatgggagcctggggacataaagggaatggagtcacatgatgcgtatctgatagccagccagctaaatcttcttgatgaacagcaagacacagtgtatgttgctggcctccagatggagctccagcaagcacgtgataggataagtgagctggaaaccgagcggcggtcggctaggaagaagcttgatcacttgttcaagaaacttgcagaggagaaagcagcttggagaaacagagagcatgaaaaggtgcgtgctatcctcgaagatatgaaggcagaccttgaccatgagaagaaaaacaggaggcggctggagatgatcaacttgaaactcgtcaatgagctgaaggaggccaagatgtcagcaaaacagctgttacaagattatgagacagagaggaaggcgcgtgagctcaccgaggaggtatgcaacgagctagcaagagaggtgggggaagacaaagctgagattgaggccttgaaacgggactccctgaggttgcgagaggagctagacgaggaacggaagatgctccagatggctgaggtgtggcgtgaagaacgggtgcagatgaagctcgtcgatgcaaaacttactcttgacgccaaatacacacagctgagcagactgcaacatgttgttgaggcgtttattgccgcacgcagtactgcaaatggagacataacagtagtagaggaagcagagaacataattcaggcaatcaagtcagtcagagcccaaggcgctgaattcagatatgagccaccggcggcatcggaagacatattttccatctttgaagagctgcgtccaagtgaggagcctgtcattaaggagattgagccatgctacacgaatagctctgccaaatgtgaatcggaaattcaacaggttagcccaatgaccgatatattcctcgaaacgaaagccaaagtttactcaaacaaaagccctaaagatgaaagcgacgccgaagatggcagcagctgggagacaataagccatgaagacatgcggggttcgagcggttcgcctgatggaagcgaaccttcagtcagcaataagataagcatttcttggaacagcagaaatggtttcgagtacagggagaacgagaagctggaagatgacttagctgatgcctacctggcaagcatgaaccaacccaagaagaaagaatcggccatttcaaagctctggaagtcgtcccgcccaaagaacagtgaggtatgcaagaaagatgcagtcgttgaaacggtgaatgcaagaccgtctaatgcacggcactcagtggggacttattccactgttgaaagtggcatccaagaaactggactcagtccaccgagcgtcgagcagtggagctcgccggactcgatgaatatccaattcaaccggggcttcaagggctgtatagagtacccacggacgtcccagaagcacagtttgaaggcaaagctcatggaggcacggatggagagccagaagatccagctccgccaggtcctcaagcagaagatctagtgcaggccagaaccagaggacgaaatattgtaaacctagattttaatccaaggaataatggcaaggagtacctagatgcttcatttttttctcctgttttagagtaacctgtaatgcatgtacaacaagggctagagagaaaaaaaaggacagggatggccttggtgggctgtccggactccggagcctttgctgcttctgtatcttactttagttttggtgttatggtcggatctggtaggctatggtgagatctagcatgatgtataatacagacacaaacaagcagcaacgttgagacaaattgcatccctttgtaaacagttctccggtgttttccataaccattttttgtgtgtgaaactc

SEQ ID NO: 12336 - DNA, 996 bp, Zea Mays
gtctgaccattttatggtcctgaataataaccattctagatggagtatctgtcctcgttgaaccacgaggataccagactagctgtcacatgcgaaagagaattcttggcagttcttgatggcaactgccgaactccaattgcggcctatgcttaccgtgacaaggacgggaactgctcattccggggcctactgtcttcaccagacggatctaaagtatttgagacggcaagaagtggaccgtactctttcgacgacatggtcgagatgggcaaagacgctggccacgagctgaaggcgaaggctgggcctggcttcttcgatagccttcaatgaacagaatgtgcggccatgcgcgatttcagttggcaccctttcggttgaaaacgagggccaaagtaggttgttgaggggtttgtttttgtttcttctttttttctcctactactagttcctgctagagccttgtactaccactcatgttgagcagccccattcagcttttgttgtttctcatgttcttttagcactctgggttagagagagccggtatctgcacagctatgttgtgtcgaagttgatgtgactctgcagatagttgttgtttcaagaatatttgagcgagctcatgataaccatgggagtaagattcgatgttcctattcttcggaaaattagccttgttgattgattctcagatgaacctgatgaatgtcacatccctctttgggggaaatgagaatggagaaacctgcctctttcatgaatgtcacatacacccctaaatgttccagtttttttttttaaaaaaattaaacaaatatgattcctttttattattattttctgcaatcacatagaggcaagatgaacacaaaggcaacaccggcactctttcacaatattggagataactgatagtctgatacaggtcccaatctaaattacccagacattttcagatgctactgaacaaggatctcctgaagcatctta

SEQ ID NO: 12337 - DNA, 108 bp, Zea Mays
caatgtaggcaagggaagtcggcaaaatggatccgtaacttcgggaaaaggattggctctgagggttgggctcggggtcccagccccgaacccgtcggctgctggcgg

SEQ ID NO: 12338 - DNA, 1051 bp, Zea Mays
tcttcttgagaaacactccgctctctctttcctcctgcgattctccatctctttccctgctccgtctcgtcgttgtcttcccctttttttcctcagccacctctctccctcgctagagcaaaaaccttgccacgaatcgccgacactccaacccggaagaggcaacgaggtgactccgcgcctcggtcatgggtgacagccaatactccttctcgcttaccactttcagcccgtcgggaaagcttgtgcagatagagcacgcgctcacggctgtcggatccgggcagacctccctagggatcaaagctgccaacggtgtagtgattgccactgagaagaaactgccttctattttggtggatgaaacatctgtgcaaaagattcaggcactaacaccaaatattggagttgtctatagtgggatgggtccagattttcgtgttctggtgagaaaaagtcgaaagcaggcacagcagtattatcggttgtacaaggagcatatacctgtaacacagcttgtgcgagagactgctgctgtgatgcaggagttcacacagtcaggtggtgtaagaccatttggagtatcgctgttgattgctgggtatgatgacaatggcccacagttgtatcaggttgatccctcaggatcatacttctcctggaaggcatcagccatgggaaaaaatgtgtcaaatgcaaagacatttcttgaaaagagagttctaagcccatcagagatcaaggatttcttggaagaggtggagtaagttgtctgttgatgatttactgtttcaaacaagaatagcagcatcacttatgagcagccagcctgaagcttgtcttggttttatcactctgtaaactgatttgctccagcgacatgtcttggttttatcactctgtaaactgatttgctccagcgacatgtggttcttacatttgaaaccctcctgagcgcatactgtagacaaatgagatacgtaagatggatgttgtatttgacagtctctgcagtttgtttatgtgattcacgttcttgtgtgctgtatcg

SEQ ID NO: 12339 - DNA, 92 bp, Zea Mays
ccatcaagcaaagtcagattgatgctatgaaagggagatatttccgcgatatttcaattgtgagggctggaggagatagcactgcccctgcg

SEQ ID NO: 12340 - DNA, 1245 bp, Zea Mays
gaagataagggtgcccgtttctctcctcgacgacgacattctcaactctgaaacggcgatgtcacggctactcccgcccgtgctctctcctttaccggcgttctcgctgccgccgccgcttcttcctcgcatccacatccgcacgtcggcggtgagaggcggtgcggcggagaacgcgatggcgtccgggacgacggcgagggagcggcgcctggtcaaggtgcgggaggagcgccgccgccgcgagtacgaccgggagcacacctaccccggatgggccaaggtactggagaacgcctgcagggatgatgaagagctccgcgccattcttggtgatagcatcggcaacccggagctcatgaagcaacggatccaggaaagggtgcgcaagaaaggcagggcccaattcaataaatccaagacaggctccattgttgcttttaaagtcagctttcgagactttaacccattgaattctttcatttggtttgagctctttggagaaccaacagatcgagatgttgacctgcttggtggtgtagtccaagcttggtatgtcatgggaaggctaggagcttacaattcttcaaatttgcagctggccaactcaatgatggactacgacccttcatatgattctgaagaagcttccacagtaatgccatcatctttccatgatatcagtgatgttgagttccaagacaattgggccagggtttgggtggaccttggaacctcggattaccttggcttggatgtattactaaactgcttaacacagttgagctcagagcacttgggtatcaaacaagtggtttttggaggcaagaaaatgggtgactgggaagagggcatgacgagctctgattatggatacaagcacttcaagatatgataaatttacaggtgacaagcaacggtggtgatgcaaggctggccgagaaatttgatcaagactgcatgcatctcgatgtgcccttgtatgtaaataaataaattgtcatgggttttattttatcgtcgtgatagcagtgaattttaactaacagctcaaggcaggctagcagaatagaaaaatataatatggatgcatgtcttgtttcagacacgtctgtttcttgatgatgatgatgataatgatgatgattcttgcaacgtcaggaaaacttgacgagtcaatcagcacctatcaggacaaaggtgacatgatgcagaaaattgcagcaaagcacatggagatagagg

SEQ ID NO: 12341 - DNA, 101 bp, Zea Mays
atcttagagaaacatagccatctcttgaagtctcgacgacacttcattcaaattcattgtccatagcgagtcaacaatcatcctcatctctctagcgcagt

SEQ ID NO: 12342 - DNA, 1156 bp, Zea Mays
aattgcattcgtacaaccgcagccgagacggttgaccaacgctgccacgattccgtccacacgccgacgcggcgggctcctggccgacgagcactcccctccgaacgccgcgttggccggccccgccccacgaggccacgatgcagtagcagcgttcacaccatctgtctgtctcaagtgtcacggcgtccgtcattcgattcaacccccaaccccccatgggcctggccgtataaatcaaccgccggtgaagtctagtcgtctcgtcgctcggtccaccacctcagctccgccgcttgcccgcttttgctctctccctcccggctctcggcttcttctacacgctaccgtctcacagccgtaaacgcccctcccggatcccgctagttcgccaccgccgcccgcccgcccgccgttcgcctcatcatggccgcctcgtcgaccgccacctccgtccacgacttcatcgtcaaggatgcgagcggcaaagacgttgacctcagcacctacaaggggaaggttcttctcattgttaacgtcgcatcccagtgtggcttaaccaactccaactacactgagctggcccagctctatgagaagtacaaggaccaaggctttgaaatcctggctttcccatgcaaccagtttggtgggcaggagcctggtaccaatgaggagattgtccagtttgcctgcacacgcttcaaggctgagtaccccatcttcgacaaggttgatgtcaacggtagcaatgctgcgcccatctacaagttcttgaaatctagcaaaggtggccttttcggcgacagcatcaagtggaacttttccaagttcttggttgacaaggagggacgtgttgtggatcgctatgctccaaccacttcacccctgagcattgagaaggatatcaagaagctgcttgggagctcttaatcagtatctgggtgcaaagctgtagaaaaacatgtatcaacaatgccctgagcgataaaatatatgataagttgtattaataaagtattgtcgtacttgagaggttgcagtatctgctctatttcccttgcatacactccgtacttgtatatccccttcaatcctcccgggatccccttgtcaccaaatcagccctcgaatgaattccaatgctgtaaaaaat

SEQ ID NO: 12343 - DNA, 454 bp, Zea Mays
ctcgcaagaactagcggcgcgagtttgtgcattagccttaactttcgttatggggcaaagattcctcgagacttcgaagattatgccagctggtgtcgttgctggcctcagtgctgtgatgtccgcgttttatctgttcaaaattgcaagcggcggcaaccacatcccaccaaagaaagagtaaactggactctaacttgtaaagtatgttcgattgaactcggaagactacgagccactgcgttatctagttgcatggtaacttcaggtactagcatcttgttctccatttgtggtgtggctagagtgtaccatggtttgtgaacattgtaaaagaaataagtatgcggttcacggaaatgaatatgaacttccctgtggcggcaggcgcgaaagaattaagaggtctaaacgtggaatatgtctaaaagtgtgtgaattatgttaaaataaa

SEQ ID NO: 12344 - DNA, 2167 bp, Zea Mays
ggaaggtccgggttcgagcctcagcctctgcatattatgcggaattctggaagcaagttccgccaaatgaaccatatcgtgtcatacttggtgatgtcagggataaattgtactacacacgtgaacgttctcgtcacctattgacatctggaatttctgagattctagaggaggcaacttttactaatgttgaacagtttctggaacctcttgagctctgttatagatcattatgtgcttgtggtgacaaacctatagctgatggaagtcttcttgatttcttgcgtcaagtatcaacttttgggcttgcccttgtgaagctcgacatcaggcaggaatctgatcgacacactgatgtccttgattcgataacgacacatcttggaattggctcctatgctgaatggtctgaggagaaacgccaggattggctgttgtctgaactgaggggcaaacgtccattgtttggttcagatcttcctcagactgaagagactgctgatgttttaggcacatttcatgtccttgcagagcttcctgcagattgctttggcgcgtatatcatctctatggcaactgccccatccgatgtgcttgcggtcgagcttttgcagcgtgagtgccatgtaaaacatccactgagagttgttccactttttgagaaacttgcagatcttgaagcagctccagcagctgtagcacggctcttttcaattgactggtacatggataggattaatggcaagcaggaggtcatgattggatattcagactctggcaaagatgccgggcgtctctctgcagcatggcaaatgtataaagcacaagaagagctcatcaaagtggcaaagcattatggagtcaagttgacaatgtttcatgggaggggtggaacagttggcagaggaggtggtccaactcatctggccatattatctcagccaccagacacgatacatggatcacttcgtgtaacagttcaaggcgaagttattgagcactcctttggagaggagctcttgtgcttcagaactttgcaacgctacactgcagctactcttgagcatggcatgcatcctccgatttcccctaagccagaatggcgtgctctgatggatgaaatggctgttgtagcaactaaagaatatcgatcaattgtcttccaagaaccacgcttcgttgaatacttcagatcggctacacctgagactgaatatggtaggatgaatattggcagccgtccatcaaagaggaagcctagtgggggaatagaatcactccgtgcaattccatggatctttgcttggacacaaacaaggttccatctgcctgtctggcttggatttggtgcagcgataaagcacatcatgcagaaggacatcaggaacatccatatactgagagaaatgtacaatgagtggccattcttcagggtcacccttgatttgcttgagatggttttcgcgaagggagacccgggaatcgcagctgtgtacgacaaattgctagtggctgatgatttgcaatccttcggcgagcaactgaggaagaactatgaggagacaaaagagctactccttcaggttgctggtcacaaggacgtccttgaaggtgatccttatctgaagcagcgtctgcggctgcgtgagtcctacatcaccactctgaacgtgtgccaggcctacaccctgaagcggatacgcgacccgagcttccaggtgagcccgcagccgcccctgtccaaggagttcaccgacgagagtcagccggcggagctggtgcagctgaaccagcagagcgagtacgctccaggcctggaggacaccctcatcctgaccatgaagggcatcgccgccggcatgcagaacaccggctaggccaagatcttcggtgtgcaaataacctgtctcccatgagacggtggacgatatgtgtaggcctgtgagcagttagtacaccggcgccagtgtgttctggaggatttttcatgtcagagcctttctcttgtgtgcttgctgtagatgccaaggggagcttattggctgttgaagcctgatgcaaaataaagtacgaaactatgttttttgtttaactaataactagcaaacatgcttccgttgcattgaaactagcagcttcgtgcgtagtcatctgtggataataaaag

SEQ ID NO: 12345 - DNA, 1589 bp, Zea Mays
gacgcctgctcctggtcgttacagatagagacggataagcatgacagcgcaggccgcgcggcgtggactccatgcctgcaaggggacaatagagatgccgtctgcgtccgcggcggcatcggcgccggcgtcaccccccgctataaatccgtcgcacccgcccacccacctgccgtgccagtgctctcatctgcgtacacggtctccctcttcctgtcagtagtagagtgagagtgaggcagcgagtaggagacaaggggaaatggggaagggagcgcaagggagcgatgcggcggcggcgggcggcgaggtggaggagaacatggcggcgtggctggttgccaagaacaccctcaagatcatgcccttcaagctcccgcccgtcggcccttatgatgtccgcgtgcgcatgaaggcagtggggatttgcggcagcgatgtgcactacctcagggagatgcgcatcgcgcacttcgtggtgaaggagccgatggtgatcgggcacgagtgcgcgggcgtggtcgaggaggtgggcgccggcgtgatgcacctgtccgtgggcgaccgcgtggcgctggagccgggcgtcagctgctggcgctgccgccactgcaagggcgggcggtacaacctgtgcgaggacatgaagttcttcgccaccccgccggtgcacggctcgctggcgaaccaggtggtgcacccggccgacctgtgcttcaagctccccgacggtgtgagcctggaggagggcgccatgtgcgagccgctgagcgtgggcgtgcacgcgtgccgccgcgcgggggtggggcccgagacgggcgtgctcgtggtgggcgccggccccatcggcctggtgtcgctgctggcggcgcgggccttcggcgcgccgcgcgtggtggtcgtggacgtggacgaccaccgcctggccgtggccaggtcgctgggcgcggacgcggcggtgcgggtgtcgccccgcgtggaggacctggcggacgaggtggagcgcatccgcgcggccatgggctcggacatcgacgtcagcctggactgcgccgggttcagcaagaccatgtcgacggcgctggagtcgacgcggcccggcgggaaggtgtgcctggtcgggatgggccacaacgagatgacgctgcccctgacggcggcggcggcgcgggaggtggacgtggtgggcgtgttccggtacaaggacacctggccgctgtgcatcgacttcctgcgcagcggcaaggtggacgaggccttcgaggtcagcgcccgcggccgcgatgccatcaaagtcatgttcaacctctaggcgggcaagccgcctccctctcggtccagccgtctaggcgccgtcgccgtatgcccctgcccccacccaggccacaactcctggaataaaaatgacagaaaagaaactttatagttcgatgaatgggcagtttgccgtggttttggaataatttggacttcgtcttttttcgcttctgttgtcgtaccattgtcttaatcgatttgtggattttgaagtctccttttattgccaaaagttcgcgagaactaagtactcactccgttttaaaatcgta

SEQ ID NO: 12346 - DNA, 1138 bp, Zea Mays
ctttaagggaacgtttaaaggcgtctctttcgtaaggtgttgaagatgttattgcagatacgaaggcacacaaggtggtcgttaaggggaaaaaggcagctgctgacccaatgaaggtggtggaacgggtgcagaagaagacaggccgcaaggtagagcttctctcaccaatgccaccaccgaaagaagagaagaaggaagaggagaaaaaggaagaacctgagccaccaaaaaccgagaagaaagaggaggcaacggtgctcgctgtggtgctcaaggtgcatatgcattgtgaggcttgcacacaagtgatcaagaagagaatcctcaagatgaaaggcgtgcaatctgtagaggcagacctcaaggcttctcaagtcactgtgaagggtgtgttcgaggaggccaagctgtctgattatgtgtataggcgcactggcaagcacgctgctatcgtcaagtctgagccggttgcagctgagaatgttgatgatggaaatgccaaggatgacaagaaggcagccgaaggtggggaggagaagaaggatgatggcaaggaggaaaagaaagatgaagacaagaaagaagcggataatcagaaggatgatggcaatgctggtgatgaagggaaagacaaagaccctggcgccgttgctaacatgtatatgcactacccgaggtccaatcatctgagcgaatacggatatgcctaccagtaccctcctcagctcttcagcgacgagaacccgaatgcctgttctctgatgtaagaaagccagaaccaagtgaccttaagcgcgaaaataagaggggattgagttatcccctgattttggaggttcaggaagtttagaacttttctcttctatttctaaggttgaactttctgtctggtacaaagtaaactctgggctggtttgtggacttttcatattgtgtatgctactggttagtaggattttgtgttgcacctttcacctttggcttttatttctgtacaaagatgtattatatatgctagttttgaaatagcttgctgctagtactctgtagtctgttgtccggaatagacggagctttctcagttaacattgccagtgatgtcggaaaaatccatattcttggtgtccttttctaa

SEQ ID NO: 12347 - DNA, 1769 bp, Zea Mays
ccatctccgactccctcttacccttcccgttccccaattcgaaatcgagtcgggtactcgggtcggtcttgccgtgcgtgcgtggctgcgcgaaccagcccacgctcccactccccgcccgccaccgccgggtccctctagggttttgccgcgatgtcgctccggccgagcgagcgggagcagatgcggaagggcaactacaagcagacggtggacgccgaggagagccgccgccgccgcgagggccagatggtcgacatccgcaaggccaagcgagaggaaagcctccagaagaagcgccgcgatgggttccccgccgccggcgccgtgccgccgatgggccactccaccgcactccagcagaagctcgatggcttgccggcgatggtacaggccgttcactccaacgaccccactgtgcagcttgaggccaccacgcagttcaggaagctgctctccatagagcgtagtcccccaattgaagaggtgatcagcacaggagtcgtgccccgattcattgagttccttacacgtgaggaccatccacaactccagtttgaggctgcatgggcgctcaccaacattgcatcaggcacatcagagaacactaaggtggtggttgagagtggtgctgtgcccatctttgttaagctcctcaactccaatagcgaggatgttcgtgaacaggctgtatgggctttaggtaatgttgctggtgactccccaaagtgccgtgatctggtgctaggccatggtgggctattccccttgctgcaacagcttaatgagcatgctaagctctcgatgctgaggaatgccacatggacactatcaaacttctgccgtgggaagccacaaccgaactttgatcaggtcaaaccagcattgccagcacttcagcaacttatccactctcaggatgaggaggtcctaactgatgcctgttgggctctatcatacctatctgatgggactaatgacaaaatccaagctgttattgaatctggcgtgttccctcgccttgtggaacttctgatgcatccttcagcctctgtactgattccagctctgcgcacggtgggtaacatcgtaactggggacgacatgcagactcagtgtgtcattgacaatcaagcacttccatgccttttgaacctactgaccaccaaccacaagaaaagcatcaagaaagaagcatgctggacaatctcaaacatcacagctggtaacagggaacagattcaggccgtgattaatgcaaacataattgcacctctggtgcaacttctgcaaactgctgaatttgacatcaagaaagaagcagcctgggcaatttcaaatgccacttctggtggcacacatgatcagatcaagtaccttgttgcccagggttgcattaagccactctgtgatctgcttgtttgcccggatcccagaattgtaacagtttgcttggagggtcttgagaacatcctgaaagttggcgaggcagagaaaaatcttggtgcaggcgatgtcaatgtttacgcacagatgattgatgatgctgagggcctggacaagattgagaacctacagagccatgacaacactgagatatatgagaaggctgtcaagatgctcgaatcttactggctagaggaggaagatgatgccatgccctctggcgacaatccccagaatggcttcaactttgggaaccagccctctgttccatcaggtggattcaacttcggctgaagaccccgcggtgctttgttaagggcaag

SEQ ID NO: 12348 - DNA, 759 bp, Zea Mays
tctgttgaagaacatccgcctagcgtagataattaccagacaagctataatggctctgaatgggttgagctattagtcacagagatgagaaatgcttctgacataaacgatgcacgggctcgtgcgtcaagagctctggaggctttggagaaaacgattgtagagcgtgcaggagctgaagctacacaaaacctgcataaggaaaacatgatgctcaaggagcagttgactgttgttctgcgagagaactccgtgctgaagcgggcagtcgccattcagcacgagcgccaaaaggagttcgacgagaggtctcacgaggtccagaacttgaagcaacttgttctgcagtaccaggagcaagttaggactctagagatgaacaactacgccctcacaatgcatctcaagcaggctcaacagaacagctccatacctgggcgtttcaaccctgatgttttctaagcgtagtagctgctgaacggtccgccccagattaataagctatgtatgaatatatcttgttctaccaactgctcctgagatggggatatccgataggtggattcaccgcccaagggtccagaattttcaagtcactatggttttgatttcgatatactccgtatttatttaaacgtgttgctttcatgcaattggctatccgatatattgtgtgcgcccacttttccgggtatggtttatttgatccatggctacaatcaatattcgtcaacgtaatgtaggaactaatattactgt

SEQ ID NO: 12349 - DNA, 1085 bp, Zea Mays
ccaaagaaatcagatcgactggagctgaaccagtttcaaaaagataggatggcaacaaccattacacagttttatttcttatatattccatctgtggtatggatgcaggaacataataaatgatgtccaaaactcaacctgatcagagcactgccgaaaacagctattgcaaaacgttttcatagctgcacctggcagccggcacatacaacagacagaatcgtatagactgacaactccgataaccgttgcatctcatctcatgtgcttattcatcaagtggggggtgggggagggaggcatcccattttcacacgacaacaaattttgtgttgcgcctaaggtacttaacccaatcgactggacttggtgaagtatcctcacgtctagcttgcctttgactcaattaccctctttgcaaaagagggcaaacagaatgatgccgtgtggatctgaaaatatagaaatagaatagaatcaggaaacagcttgagttctaatgcaaaggcggtgaaatcagcaaaaatacacacctccgagttgtagaacttaaggggtccttttgatttcgtagaatgttcatcctcctcgatgttgaaaacagggtgctggaaatcaacagcaggcccttcggtggagcaaagcatgaacccaataactccgctgcaatggaagcatatcaacccagtggataaatagagaaactggcacaatatggtacactggattcgttgtgcatacctagggtatgtaggtactgttgtccaagcatagttaactgagcctttgaaaacttggcggcaattgacgaaaatatcttcaatgatgtgcatatgtagccatatgctctctgcctgggtgcatacaactccacctggacgcaaagctctggccaccgactggaagaaaggcttctcaaaaagctcctgagcaggacctggttatgcaggcagatgttgatcaaacattaacggcagagctaggtaacaaacacacgattaacaacagttacctatcggatcagaagaatccacaattactgcatcatatgtaccctctggagcatttttcaagaaggcaacccc

SEQ ID NO: 12350 - DNA, 449 bp, Zea Mays
gcgcttcgatgcatgctgtcgacctatttccttgagatccacttttgttttggcaacctgatgaactcttcgagactatatcccaagccctgaattcatcagtagaccgtgactgccttagcggatggggtggctatgtgttgattgtgacaccgactgaagtgagggagcatgtgattaagagcaggatggactaaataatggccactagaattattagctggtttccaatgcttaagaccaatgttgtgtttgtattctggagtaacattgtatcatcacagttggtatgagaaggaacgtttgttttctttatctctgttttacaacacttctgtttggtggaatactgagttggtaatatcctagattgcctgttttacaacacttctgcttggatttcaactgaatggtggaataatgagttggtaatattctagattgaggaa

SEQ ID NO: 12351 - DNA, 134 bp, Zea Mays
ggacgtaacccgggagcgggcggggcacagcaaagggattttttttaaccaagccagaaattcgtccccgagggggatcgaacccaggacctggaggtgctactcgaaagccttaaccattacgctagaggccc

SEQ ID NO: 12352 - DNA, 71 bp, Zea Mays
atagaagcgaggtgatgaggaatctgaagatcaacttggtgaagtacttggaatcacaagtaaaaggcaag

SEQ ID NO: 12353 - DNA, 3229 bp, Zea Mays
ctggtggtcgcccctcctggagctcgccgccaccatctcgattttgttttcccgaccacagcgccaccgcccaacgctaacctgccgctccacgagtctcgacaaattatcgacgcgactggcacccctccccctccactggtgattgtcgccgtcagcatcttcctccggtcctcccaagagcaagccttctagaagttaaagaagcagccagaaccatgacatcccgtttctggggacagggggacagtgagtctgaggaagaggaggaagaagttgagtcagaacagggcagcgataatgatgatgatggaggtcatggtggtgcgggacgcggtgcccaaaaccgatatttgaagaatcaagaagatgacagcgatgagtctgacacaggtcaccgtgagatccgctccctgagggacaagcacaatgaggagatgagatctattgttgatcagatgcgtaatgcaatgaagatcaatgactgggtgagcttgcaggagagttttgagaagcttaacaaaaatcttgagaaggttgttcgtgtcaatgaatctactaaggtaccaaaaatgtatatcaaagctcttgtgttgctggaggacttcaaggctgaagcccctgcaaacaaggaggccaaggagaagatgagcagcagcaattcaaaggcactcaataagatgagccaaaaactcacgaagaacaacaagcaatataaagagcagatccagaagtgcagggagcatccagagagttttgaagatgaagctgcggatgataaagatatggatgatgatgatgttgatgaaagtgatgcagagatcgaagatcctgataaaatagctatgtcagaatcagaagaggatcacgatgaagaggatggcgacaaggagggttgggaacagaaaaggagtaagaaggataagatgatggataagcagttcttgaaagatccaagtgaaatcacatgggatattgtcgataagaaactcagagagattatagcatcaaggggaaagaaaggtactggaaggatcgagcgtgttgagcagttaacgtttttaacccgtgtggccaaaacaccagctcagaagcttgaaaccctcttccatgtgatttctgcgcagtttgatgttaaccctagtctacttgggcatatgccagtcaatgtgtggaagaagtgtgtcaataatatgcttcttgtgcttgacatactccagcagtatcctaacattgtagtagacacctcatttgagcctgatgagaaagaaactcaaaagggtgcagactacaatggaacaatacatattgtcggtgacctggttgcattccttgagagactggactctgaatttttgaagaccttacagtgcacagatccgtacacaaaagattatgttcagaggcttagagaggaacccctgtttctggttgtcgcacagaatgtccaagattatcttgaaagggttggaaacctcaaagctgctgccaaggttgcactgcgtcgtgttgaactggtttactataaaccccaagaagtgtatgatgcaatgagaaaacttgcagagcagcctgaagactgtgtggatgatgatgatgcagaggctggtgatgaacatcaagcagtagatgacaatagaggaccatcaccatttgttgcaattccagaggttgtgcaccggaagcctacttttccagagagtggtagaactttgatggatggattgatgtccttaatttacaagtatggagatgaaaggaccaaagcccgtgcaatgctgtgtgacatatatcaccatgcgatctctgatgagttttcagtggctcgtgacttgcttttaatgagtcatttgcaagatggtgttcagctcatggacatatcatcacagattttattcaatagagtcatggcccagttagggctgtgtgctttcagggctggtttgataaatgaagcccatggttgcttgactgagctctactttacagggagggtgaaagaattgcttgcacaaggtgtgcaacaaagcagataccatgaaaaaactcctgaacaggaaagacttgagaggaggaggcaaatgccttaccatatgcatataaacctggagcttttggaagccacacacttgatctgtgcgatgctgattgaagtccccaatatggctgccagcacctatgacaagcggaggcctatgagcaaaacattccgaaggcttctcgaagtgagtgaaaggcagacatttgttgggccgcctgagaatgtgagggaccatgtaatggctgccacaagagccctcaaaaagggtgatcaccaaaaggctttcagtgtcataaattcgctggagatttggaagcttttgaggaacagagagcatgttcttgagatgttgaagcttaagatcaaggaggaagctcttagaacctatctttcatcatactcgtcttcctacaagtcgttgagccttaaccagctcaccaccatgtttgatctcagcgagcagcatgcccacagtattgttagcaaaatgatgatgcatgaagagcttcaggctagctggcaccagccaacaaagtgcaccgtgtttcacagcctggatcaaaccaggcttcaggagctactcttccaggttgcagaaaaaatatcggtcctggtggagacaaacgagagggcatacgagttaagaactggtggtactcttgaggggctaccgcccaggcgcaggggcgaggctcaggattcatccaagtggcaggagagctttgtcgcatcacaggggcggcagggtggtggcaaccggtttggatactccggtagaggtgcagcatctggtcaaagtggtggactccagaggggcaggggcaatcatgtttcccgcgggggatacggtggcaatacacgatttcaggatgcaagtgcacacatggtgaacctgaacagggttggtagggttgttagtgtttagaagtgcgtaaatttttgaagcacctgccctttccataattacaaacttcctgttctaagctcagtcatccaactattttctctatttcgttgtaagagtttggtactgtcggggtttgattagtgatagatccggctatcaaaattttggtcttttttcttcgactatgaacaaataatatatagaattttctatgtaaatttatattcttgtttttagcattgaggatattaatcttcataaaaataaattttaaatccgtt

SEQ ID NO: 12354 - DNA, 757 bp, Zea Mays
gcaaacgaagatgatgcatcaagttacatcaccctatggcaatactgtgcatcataatgaaaatgctacaacgggccagtttgcattcaccacttcagaagctggaaactaccttgcatgtttctggatagacagcgtggagaaaggatcaggaacatctctaaatcttgattggaagatagggattgctgcaaaggactgggatactattgctaagaaagagaaaattgagggcgtagaactagagcttaggaaacttgaagctgcagtcgagtccatccatcataacttgctgtatctcaaagcaagggaagctgacatgcgaacagtgagcgagagaacgaattctagagttgcctggttcagcatcctgtcattgggagtctgcgttgccgtctctgtgctgcagctgtggcaccttcaagggttcttccggaagaagaagctcatttaaattcacgttttatcagtgtgtacttcccgtgttaaataccttaggaggacaattgtcaaatttatttcaaaaggaaactcgtatgatggacaaaacatgtctttgatacatgacttgaaactagcaacctatattccgtggaattgaggtcgaccttccatcttgattgccttgcagctgccggtaaataatgagtgctacgttcaatttttctcattatctgccatacttcaaatcgagatttttactctttatccttgtatctgattgttattaataattaaataataattactgtagaaa

SEQ ID NO: 12355 - DNA, 1856 bp, Zea Mays
gttgaagtggcaaatccatatttctggttaattttgccagccagaacaggttcataagacacctatactatccgatcctttagttccaacattttcatttgatacacaaaatagtagttagatatcaactatcagtacaattaacttatcgcggacccagatgatagccgcagcacctcagctccgacctttacaaacacaggagcattggcgcatgcggcaactgcacatgacataagctcctccagctctgctgccctggcatagaagaactcaaaaggcatggctgaccacatcaagcaatatacatccaaagccatggctgccaatcttcgcttcacccactgactggtatattaacaaattggtggattttttttttactaggatgattgatacacatctctattgtgcccttgcaaaatactcctccgtaccagaattagtgggagtctgatctcaagcttgccttcacctcggccctgacagctgttcagcgtggaggttgtcggtggagtcgagaatccattccgaggttcgatgagggcctagctcaacctcttgccgtaccacttctaccttctgccactcctcccacctctcggcgagaccatcgccttcaagcatcctcacaacctccgacatcttaggacgttccatggggttgctctgagtgcagaggagcgccacctggatcagagattccacctcgacatcgatgtagttgtggtctagatcttcgtcgaccagactctccagtttcttctccttgagcaaccccttgacctaatcaagaagcatgacatcatcatcattagcaagacgagctagatcgaaggcacgttgtcctgtaataagctctaaaagagtaattccatagccaaatacatcagttttctcagaggattttcctgttgaaaggtattcaggtgcaatgtgcccaattgttcctcgaacagcagtagttacatgggtatccttgtaatccattagtttggccaaaccgaaatcccccaccacagcttcgaagtcttcatctaacaaaatatttgcagctttgacatcacgatgaataatctttggatcacaatgatcatgtaaataagacaggcccctagcagaacccaatgcaatcctttgtcttgtttgccaatctagcggaggttcagctggtggtcggtctacagaataaaaccaaagtaataaaaagttcagagtttgatgctgttgttagagaggtgtaacatgaaagatacaaattaaaatacgtgaacagcactatactaaaaaaatacctcttaaacgtgacgcaacacttccattagccatgtatggatacacaagcaacctttctgttggtgtcatacagaatccacgaagacgcaatagatttctgtgtacagccatactaatcatctcaacttctgtttgaaactgtaattctccaccaggcgtgcgctcctcctttagtctcttaacagcaactaaagatccatctgccagccgtcctttgtagactttgccaaatccacctcttccaagaatgttcttattgctgaagccatctgttgcaacttgtaattctcgtagtgaaaatcttttaagctggccaagatgcacctctggatcttcctcggctgccacattcgaagtctcacattaagttaattcaaattcaatgttgttccctaagttattctcctgttgaatacttaccaggtacatcaaagaaatgttcttgtggtttcctgcgccgccaataggcaaaactaattgcaggaatagcaaatagcaaggctgcaccagcagccactccaccagcaattgctccagtactggaagagctacttcctgat

SEQ ID NO: 12356 - DNA, 1559 bp, Zea Mays
gcacgaactaattagctttcaaaaacttagcatatctcaggcgcaatctgaagcagcagtcatatcagagatcagaatgagaaggtttcttccccctctcgataatgtacacgcatgggcatggcacgttcttcacttcagaccctcacacacagctctttccccggtaaaatcaaggacggcagcagcgcatgacttggcatcgctgccggcttgtggcgcgtcctcacaggctgggcgtcctctcggcggcgccggagatgacggtgagcaggttgttgccgaaggggtcgctgaggtgcttggcgaggttctcgacggggccttcgccggtgacgtaggcctggatgaagaaggcgaacatggagaacatggcgagccggccgttcttgatctccttcaccttgaggatggcggcctggtcggggtcgctggccaagcccagggggtcgaaggggccaccggggtgcagcttgtcctcgaggtccagtccgttgatgatccggtagtactcggcgccgccgacgaggacgacctccgcgatcacggcgaccaccaggttgatggggatgctgttgccgaaatagctgagggtgtttccgtcgaggagcagggctccggtctgcaaccagacggcctcggggccgcagttagcgccgaacttgttgcacgcctctgggatgacagcgccagcggcaccgagcatggcccatctggcatggatcagctcgtaggcctggtacctgcacggcgttgatggtagtaggataagtttggtgatgatgtgaaattgtatgtttgagaccgtgatcgatgtgagactcacttggcgaagtcctctggcttcttgcccaggccaaaagggtcgtagccatagctgccagttgtaggagcaagatagttcagttcagataccttaacttcgattcttctccagggacctctccggtgaggtactccggtacctccgagcggtccaagagcccatccggcaggtagatcctcctgtcaggacctaattggacatagaacaggagacagttactatacagggagcttctgaaggttttcatgggcaaagttctatatctcaaacatgaaacaccaaacaagatacaattagtgcagaggaagcttctgaagattttcatgccaaagttctatcaaacgcccaacacaagggagccctgaagcaaatctgggtcctagaagtcgtgcgctgccagcagttggggccaggtctactcaccgtaccacttggcgagctcgtcgctgatgtccggagaagaggacgacaccgcagagggcttgggcttctgggcaggcttcttgctgaagagggagacgatcttctgagcccccgcggtgggcgctgcggtggcgtagcgggaggagccggcgaagttgagcttggtgcccagaatcttggatggagcaagagccgccatcgccggagacccacaattcagagagacttgccgcgggaggggatggctgatgggggcttgtggaggaaaaggcgagctagtttaaatggatgaaaatgaggatcggaggat

SEQ ID NO: 12357 - DNA, 257 bp, Zea Mays
atcatactactcttccatagagagtaatatgatcttttgtggttttgttggtctaaggagaagaagtccacacggcaattgaagattgcagagctgctggaatacgtgttatggtgataacaggagataacaaagaaacagccgaggccatctgccatgagattggggtttttggccctcatgaagatatcagttcaaaaagcttcacagggaaggaattcatggcactttctgataaaaagatcttaagacaatag

SEQ ID NO: 12358 - DNA, 92 bp, Zea Mays
ccgggtttcttaagaccagaccgggttcacgccaaccgagagcacagttacaccaccgtccagcctcttaccacggatggtacacgctactc

SEQ ID NO: 12359 - DNA, 2078 bp, Zea Mays
aggacagcaattgaaaggtcatatgaggagctgaatgatgcagccccagagaaaataatgtacttcatcagtcttgtccttgaaaatcttgcgctttcaattgacgacaatgaagacatcctgtattgtttaaagggatggaaccaagccttggaaatggctaagcaaaaagacgaccaatgggcgctctatgctaaagcatttcttgacagaaacagacttgcccttgcgagcaagggagaacaataccataatatgatgcagccctctgctgagtatcttggctcgttactcagcatagaccaatgggcagtcaatatcttcacagaagaaattatacgcggtggatcagctgctactctgtctgctcttctgaaccgatttgatcctgttttaaggaatgttgctcacctcggaagttggcaggttataagcccggttgaagtatcaggttatgtggttgtggttgatgagttacttgctgtccagaacaaatcttatgataaaccaaccatccttgtggcaaagagtgtcaagggagaggaagaaataccagatggagtagttggtgtaattacacctgatatgccagatgttctgtctcatgtgtcagtccgagcaaggaatagcaaggtactgtttgcgacctgttttgaccacaccactctatctgaacttgaaggatatgatcagaaactgttttccttcaagcctacttctgcagatataacctatagggagatcacagagagtgaacttcagcaatcaagttctccaaatgcagaagttggccatgcagtaccatctatttcattggccaagaagaaatttcttggaaaatatgcaatatcagccgaagaattctctgaggaaatggttggggccaagtctcggaatatagcatacctcaaaggaaaagtaccttcatgggtcggtgtcccaacgtcagttgcgataccatttggcacttttgagaaggttttgtcagatgggcttaataaggaagtagcacagagcatagagaagcttaagatcagacttgcccaagaagattttagtgctctaggtgaaataagaaaagtcgtccttaatcttactgctcctatgcaattggttaatgagctgaaggagaggatgctaggctctggaatgccctggcctggtgatgaaggagacaagcgttgggagcaagcatggatggctattaaaaaggtttgggcatcaaaatggaacgaaagagcatattttagcacacgcaaggtgaaacttgatcatgagtacctttcgatggctgttctcgtgcaagaagttgtgaatgcagattatgcttttgtcattcataccacaaacccatcgtctggagattcttctgagatatatgctgaagtggtgaaagggcttggcgagaccctcgtgggagcctatcctggtcgtgctatgagctttgtttgcaaaaaagatgaccttgactctcccaagttacttggttacccaagcaagccaattggtctcttcataaggcaatcaatcatcttccgttccgactccaacggtgaggacctggaaggttatgctggagcaggattatatgatagtgtaccgatggatgaggaggatgaggttgtacttgattatacaactgaccctcttatagtagaccgtggattccgaagctcaatcctctcaagcatagcacgggctggccatgccatcgaggagctatatggttctcctcaggacgtcgagggagtagtgaaggatggaaaaatctatgtagtccagacaagaccacagatgtagtatgtatgcatctattagacagctcaataagcactgttgtacgcttgtatggttgggacatatgggcgttatggcatgtatagttgtatgcctagatgtacaacacgtgtactcgtatatatatatataaatgctgaaacaagcattggtcctgtactgtagtttctacatttcattgtcaccaataattaagtgtactcctatggctgggagtctatgaaaatggacgtgttgacttattgggtaataaataatttatatatatacttgtgcaagaa

SEQ ID NO: 12360 - DNA, 1840 bp, Zea Mays
cagaatgatgcttcgataacggggttatgttggtgaatctgaattcttcaccgagtatggtgaggcaagccggtatcaggtcagtgaagtcattggcaaagggagctatggtgttgtggctgctgccgtcgacacccagactggtgagcgtgtggctatcaagaagatcgttgatgtctttgatcacgtctccgatgcaactcgcatccttagggagatcaagttgctccggttgctgcgtcacccagacttagttgagatcaaacacattatgcttcctccttcgaggagggaatttagggatatctatgtgatctttgagttgatggagtcggatctccatcaagtaataaaagcaaacgatgatctcacagcagagcatcaccagttcttcttgtaccagctgctccgtgggatgaagtacatccatgcagcaagcgtcttccatcgggatcttaagcccaagaatattctagccaatgctgactgcaagctgaagatttgtgattttggccttgcccgcgtttcattcaatgacactccatcagccatattctggacggattacgtggccactagatggtatcgagctccagaattatgtggctcctttttttcaaagtacactcctgccattgatatttggagcgtagggtgtatatttgctgaattgctcacagggaagccactctttccagggaagaatgttgtgcatcagttggatcttatgactgatctacttggtacaccttcagcagagtctatctccaagataaggaatgagaaagctcgacgatacatgaacaatatgaggaaaaagcctcgggttccctttactaaaaagtttccagggataggccctggcagatccatactttaatggattagcaaataatgaacgtgaacccatagcacaacctatctcaaaacttgaatttgagtttgagaagcggaaactggccaaagatgatgtccgagaattgatttaccgagagattttggagtaccatcctcaaatgctacaagaatacctacaaggagcagaccacaatcagatgaccttcatgtatccaagtggggtggatcgcttcaggcgccaatttgctcatttggaagaaggtactgcaaagggtgaaaaacacagtccacagctgcgacagaatgtttctttgccaagggaaagagtaattggcaataaacatggagatggcaatacaggtgataagctagcgcatgcctcagtgacggatggcatcagccaaccgagcttgagtgagagaagctttctgaagagtgaaagcatcagtgcttccaagtgtataggtgaaaaaccgaagcatgtcaaagatggagaatctgttttagagagcgtggatgaaacagtcgatgatttgtcgaagaaaattcctcaactgaaaacctgatttttctcaagttcactggagcaatgaatagctcgtagtatggcacgttaggttctcaagacgatggacctacggcaaaggtctatagccaatgagaccacaagttctaatgccagtaattctgttgtgatgtaaatttcctcccatttgtgtttgtacttcgcgactgcaaacaacctgtttctgactaaatggctcgtgttttcctccgtggagccatcaccatattctgtaaattttcagttggaagtgaatcttcagctgcagaggcatatttgattttcccccagcaagtaggcctaggcattcagttaattctgtaaagttggttatggaaattttcagttttgacaaaatgttaactgaatttgctaccaaatactccattctaaattacaagacattttgattttgat

SEQ ID NO: 12361 - DNA, 1605 bp, Zea Mays
gagtcgacgatctcccgttcagccgtcccagttccggatcactctctcggctgccactggtccgctccccgcgtctgcggcttccactctccgctcttcgctcctcctcccgccaagatatttccggagaatttgagagccccctcctggtcatgtcgctgctcgccgtcgcctcctccacccgcgccgcggcagtgcggccgctgtgcgcctcggcggcctcggacgaggcggtgccggcgcctgctgtggcggataccgcagggcggaggccggtgaaggtgatcctaccaaagaagaaaccgcagaagtggtcgacggggatggcaccgggtgagtacggcggtgggccggccaccatcaagccgcgcaagtactggtgggggaaggaggaccgcgaccccgtggggaacaccgacgacttcatctggaacaaggacttcctcccccacatggaacgcgtcatcgccaacggcggcgccgatgcagaacccaccatcacccgccttgcgccggtggatgaggagggggagtccgggtttctgagcatcaaccgcgcaatgagccttgacagcgtggaggttgatctgagccaggagcttcaggcgccgaccaggccaatcttgcaaacccaggttgaggctgcctggagaggacgggcaattggtgctgaggctgtgaatggagccagcgctcctagatggaggctagtccctactcgcagggagcaggcaaagtgggacagagcggccaaggcagccactggtggaagtgatgttatactaagggagtcaaagtcaagagtgcagcaaggagaccctaaggtattggcagctcggtccagagaagactacttacagctgaaacaaagattacagtggttcactttaggcattggtggcgttggtgtaatctctgcttatatttcatacactcctgaaattgctgtcagctttggtgcagggttgattggatcattggtgtatctccgcatgcttggaaccagtatagattccctagcaggtggaactggagaaactgtcaagagtgctgctgcacaaccaaggttgcttattccagtggtacttgtgatgatgtataacagatggaatcagatattagttccggattatggtttcatgcagcttgagttaataccaatgcttgttgggttttttacctataagattgctacattcgctcaagcaatccaggattctatacctccagtcggaaatcgtgaaggttgaaaagtgtcatgttgtatataaacgaaggtggtagccatggtccctggtcagtggtcacccagatagtaaggtatgtatagaagaatctggtctggtgtcatcgccaagtagatgagatgctcgttgaggacgccatttgaaaatctcgagtgcttaactatgttctgcacaaatattttgacgaaaggtgatgttaccacattcattccatattacacgcagatcatcagtgtataaatttacggctccgaacttttaccacaacgattaattgacaaaacaattgtatgattgaattcacatttagcactggatgcaaattatgcagtctgcaagtacactcatttaaagcaaa

SEQ ID NO: 12362 - DNA, 417 bp, Zea Mays
gctctcctcggctcctcctcagcgttaagactgcttcgttgcgtcatcaattgcgccaaaactctctggcggccaaacccggcaaaagatcttccctgtaatcagcccataaggcacagctccaaattgcctcgaatcgttagaagcaaagatattgtcaccctgcacccagacatgatcttgcggtaccacgacggttctggaggagtcgcttttgccggggtcgacaaggtaggtgacggagtccccctgcatcccgacgacgcgcttgacgaccgatttgcgcgggtcctcaggggagatcatcagcacgatgtcccccggcgcgacccggccgagcctcacgctgaccctgtccaccgccaccgcgtcgcccgccaggttcagggacggcagcatgctggcgccccgcactaa

SEQ ID NO: 12363 - DNA, 75 bp, Zea Mays
taccttcgtaacctgatgagaagcctagcttcttctgatcttcggatccaagaaaggtacggtgtggcagtagaa

SEQ ID NO: 12364 - DNA, 456 bp, Zea Mays
ggaaagagctaaaaagatggaagaaaagaaagtgtatctgcaactatacgaagcaatggaggcgttggtcaagatcaatctggagaccaacaagatcatggacttcatcaagtttgacgtcggcaacgtggtcatggtgactggcgggaggaacaccggacgtgtaggagtcatcaagaacagggagaagcacaagggcagctttgagaccatccacgtgctgcttggagctttttgctatgtctagttttctcctatttgttgtacatgaaaacatagaatagaattcaaatttggtggtcgcaaaagtgtggagactttaattcatacaaagttaggcttaacattagtgcaaacagttgtattttagtttagatttagagtacacttatgtatgcattgtttgacaatgtttatttatgatatattgaatggtacttaattatattatattaa

SEQ ID NO: 12365 - DNA, 624 bp, Zea Mays
ataaaaaaaggtgagaactagaaggaaccgctgtgtcacacacacacacaccacacggcggccggagcggcggagccaccataaattggtgctctctccgtccgaagtgctctctgaaattccccccaaatatcccagccactgccgtcgtgcagtcaaagtgtcaaaccatgccggcagtagcgttcgcgtcggctcctgccatattcgcctccgcctccgcgcgtccctgccgcagcgcggctccgggcatcctttcctccgactccgggcggccccgccgcggcgcgcgtggcgccgtccagtgtgaggtcgcctcctcctcggcaccgtcggcggctggaccccaggccgcccggtgggcccagaggaccgtggtcatcccgccacagcgccgcgggtgccacctcatcaccaacaagatcgtaaatgagatagggaatgacctggccgacttcaagtgtggcatggcgcatctgttcttgcagcacacaagtgcgtcgttgactattaatgagaactacgactctgatgtccaggttgacactgaaacatttcttagtcgcattgttccagagggtccatctgctccatggaggcacaccatagaagtttcatttgcag

SEQ ID NO: 12366 - DNA, 76 bp, Zea Mays
tctctcttctccctcctacccgaactcgtctctctctctagctctcctcgctcatcgctagtgccgctcgtcgcca

SEQ ID NO: 12367 - DNA, 879 bp, Zea Mays
cagagtatgctatgtctgaagaaccaacgatcgagacgacgctgtggtcgatcgagtggggcatcgccgagctggtgaaccacccggccatccagcacaagctccgggaggagctcgcctcggtgctgggcgccggcgtgcctgtgacggagccggacctcgagcgcctcccctaccttcaggccatcgtcaaggagacgctccgcctgcgcatggccatcccgctgctggtcccccacatgaacctcaacgacggcaagctcgccggcttcgacatccccgccgagtccaagatcctcgtcaatgcctggttcctcgccaacgaccccaagaggtgggtgcgccccgacgagttccggcccgagcgcttcctggaggaggagaagtccgtggaggcccacggcaacgacttccgattcgtgccctttggggtcggccgccggagctgccctgggatcatcctcgcgctgcctatcatcggcatcaccctgggccggctggtgcagaacttccagctgctgccgccgccggggctggacaagatcgacaccacggagaagcccggccagttcagcaaccagatcgccaagcatgccaccatcgtctgcaagcccctcgaggcctagaaatcaatgcgtgtttcctgcacgcgcccccgcagatgaagcactatgtattttctcttttttttgtgtgttgtgttttttttactaagaggagatgtatttcttgttcgtaaaatgcacttagtcaaatggatcgagattatgttgatcattaaacaccaaaatcacttagtcaaacgggtcgggatccattttcctcacaatgtcaacctttgactgatgacaatataatcaaagcaagcaaatattaaat

SEQ ID NO: 12368 - DNA, 1707 bp, Zea Mays
gccacactgttcccgttttttttgttaagctctcgcttaacctaaacgccgggagcacaagtgctcggcgaaatgacgagcgccggagcggcgacaggcgccgcgctaggcgcgcggacggcgcggtcctgcgacggctgcatgaggcggcgggcgcggtggcactgccccgccgacgacgccttcttgtgccagacctgcgacgtctccgtgcactcggcgaacccgctcgcgcgccgccaccaccgcgtccgcctcccctctgcgtcctgctcctccccaccgcgcgacccggacgcgccaacgtggctccacggcctcaagcgacggccacgcacgccgcggtccaagccaggggggagcaagagcaacaagcatgaggcgactcccagctttatcgccgcggctgcgtcgtcggcagcggtccccgacctcgaggcggaggagtccggctccggtatcctgggcggtaacgacgaccaccacgggttcctgcaggatgacgacgaagaccttctgtaccgcgtgccggtgttcgaccctatgctcgccgagttctacaaccccgtggccgacgagggggagcagaagccggcctgcagcctgctgatgccgtctctcgcggaaacatcgccggagttcgcctccggcggctcggcggaggcggacgggctctccgtgtcgttccacgtcccggacatggagctcgctagcttcgccgcggacatggagagcctcctcatgggagtcgacgacgacgggtttgactgtttgggtttcttggacgaagagaaacctcaggtgaacgcggacttggacgccatagtagcgccggcgcctgaaccagaggacaagaaacggaagcggccggagatgatactcaagctcaactacgaaggcgtcatcgcctcatgggtccgtgacggcggctcgccgtggttccacggcgagcgtcctcacctcgactgtcacgagctatggtcggacgacttcacgacgggtagccgggaactcctcggcggagccgtgacaccggtgaccggtggcgagcgtgaggcgcgggtgtcgcgatacagggagaagcggcggacgcgactgttcgccaagaagatccggtacgaggtgcgcaagctcaacgccgagaagcggccgcggatgaagggtcggttcgtgaagcgcgccacgcttccgccgctgccaaggccgccgccgccgcagcagcagcagcagcagaagcagctgccacgcgcaccgccacacgtgggcatggtgctcccaccacctccggtatcgaacgggcgcttgtggttttgagaccatatgcatgcatggaagcatgcatgaagcaacgtatgtgcgtgatgcatcgatgcatctatctcgctcgtagcatgcgcatgttctttctactctacttttaattcgtgcgtgcgaattagggcaccccacaagataatgctccctgcttacgactgaaatatatttgtttgtacatgtgcagaatagttaagaaagtatatttatagcctaggtttgttgtttatcttttctagttgttgtaaagaaggatgcactaaatacaagggaagggtgtagattttgatagatgcagagccatgcgtgctacactatagcgtcctttgattcacatatttgtaacgtaatagttaaataataacgttaaattatgtttgttttaaaaaaaaa

SEQ ID NO: 12369 - DNA, 1276 bp, Zea Mays
accctcaatgctgcatggaagatgcctttatatcattgaggaactaattgctaagaggcagcagcttgatgctgtgaattttgcttacgaggctgggcttcaggagaagttccctccagttcctcttctgaagtcctacctggaggactctaagaagacgtcgaccgccgcttcagataattcaagcactagcagcagtgggcaatcagggagcaacgcgaacaagaaagagcagtctgcactgcgagctgtcatcaagtgtgtcgaggaccgtaatcttgaagccgagtttccactggagggtctccggaagcaactcgaagagctggagaaagccaagaccgagaagaagaaggcggcatcaagcgctaccagtggcggcagcagcagcggccctgcaaccaagcgcatccgcgcgagcaacggaggcccaatgcctcccgccaaggcaggtcgtctcgctaccaatgcctgcgcgtcttctttcccagccggagcccgccggtgatcaggggggagccatacgcttacccaccagccgaggaggtagtcggtttcaacgtcggcatcaccatgccatactccaccccacccatgagctacccccctgccccctatggcgggtacggcagcgggatggcagcttacgccaacggaatggcccctgctttccaccaggcttactaccggtaggttcagtcatgaaacaaaccaaaaacaaagtaaaacaacaaaaaaagtcgctgatgaatgacatgacaacaactgataatcgcgcaatggccctgttttgtagcgactgactacaacggtaggttgggtatgtcatcttctatgtcctttccatcaccaccactaggtttgtgtgttgtgtctagctcgtctcatcttagaccactgcctttcttttttcactggtaaggaacctggaacctgggtgtaaattatgtatggtatcagcgagactgtcgtcgcagccttgtgtaactctgttcggaactttgatctttttttttgttgttgttgaaaagatcagcatgtgatcgttaagtaccggatgtaccatgaactttaaccaaaagttttctcagtttagttgtgtgatttggtgtgtggcatggcctcggtgcctctcatttctcgtatgtgttttgtgtttggtgcctctcatcatcatgcatgttttattttgctcgtaaacatatttacgtttaacagatttgcctatggtgcctctcttcatcatgcatgtcctcatttatgatgaaaaaaaaaa

SEQ ID NO: 12370 - DNA, 1324 bp, Zea Mays
atcctcatcacaggcaacaaggcaccacacctcttcttcttcttcctcctcctcctagcacagctagcgcctgctccccttcgcctgtgatcatgtcttgcagcagcggcaagtgcgactgtggctccagctgctcctgcggcagctcaagcaagaaccacacctcctcccttcgcctgtgatcatgtcgtcttgctgcggcggcaagtgcgggtgcggctccagctgctcctgcggcagcggatgcaacggctgcggtatgtaccctgacgtggagaccgccgccaccagcagcgtcaagaccacggtcctcgccgcgccgaccaccaaggccagcgccggcggcttcgaggcggccaccgagggcggcggctgcgactgcaacacctgcaagtgcggcaccagctgcggctgctcctgctgcagctgcaactgagctggcccggcccggcgatggcgcacgagagtcgagaggaggaggacgacgacgaggcgtataaatataatagcggcgtccagtaaataagatcctgtcaactgcacccgccattatccatggtcgctcgctcctcgcctgcgtctcctggtcctggggttcgtctgaacgtcctcgcggcttcacgacggcgatgccgcctccgtcgatcctgtccgtctcgtgccggatttaatattagatctatatgcgtgtttttctgcgttattactacatctacatgtgtctgtctgtggtgtgtctctctgacggccccatgcgtcagcgtcactgcttgcttcagttctgcatctcactctgttgaggtgaaaaactgataacatctttgcagtgctagaaaacctgagaacctcatgatatctaagtaactgagccaagagagagagagagagagagagtatctaagtaccttgatccacttggacagcacagttagactctgaaacgatcgttgcataatgcagagtaccctgaaattcgaagcatcgacatgaccagctacagttccggctactgttatgggtttttctcttcgcccctttagataacagaatatcgatatctttataaaggaaataatggaatagtaatgggcaatgctacggcaatttccctactagaacgcaatttcttaaataaatttgaacagttattttttttagtttttaaattgattatttcattaacctacaaaataaaaaaaaacacagcaaagccctgtagtgatatctaactagcccaaaaagaacaaatgtatgagtatcttaatgtgcttggaaatatttttcggcgagagagagagtgagagagctcttaatgtgattttaa

SEQ ID NO: 12371 - DNA, 1290 bp, Zea Mays
gctcgagaggctagtctcgaacaaatggaagtgggaagtgtgatggccagcctcaccgacctcgtcaacctcgacctgagtgactgcaccgacaggatcatcgccgagtacatctggattggaggaaccggcatagacctcaggagcaaagcgaggacggtgaaaggccccatcaccgacccgagccagctgccgaaatggaactacgacggctccagcaccgggcaagctcccggagaggacagcgaagtcatcctctaccctcaagccattttcaaggacccgttcaggaagggtaaccacatccttgtgatgtgtgactgctacacgccacaaggcgagccaatccccaccaacaagaggtacagcgccgccaaggttttcagccaccccgacgtcgcagctgaggtgccgtggtacggtattgagcaggagtacaccctccttcagaaggacgtgagctggcccctcggctggcctgttggtggataccctggtccccagggaccatactactgcgccgccggtgccgacaaggcctttgggcgcgacgtggttgacgcccactacaaggcctgcctctacgccggcatcaacatcagcggcatcaacggcgaagtcatgcctggacagtgggagttccaagtggggccgtccgttgggatctctgccggcgacgagatatgggtcgcccgctacattctcgagaggatcaccgagatggccggaatcgtcctctccctcgacccgaagccgatcaagggcgactggaacggcgccggcgcccacaccaactacagcaccaagtcgatgagggaggccgggggatacgaggtgatcaaggcggcgatcgacaagctggggaagaggcacaaggagcacatcgccgcgtacggcgagggcaacgagcgccgcctcacgggccgccacgagaccgccgacatcaacaccttcaaatggggcgtggcgaaccgcggcgcatccatccgcgtcggccgcgacaccgagagggagggcaagggctacttcgaggaccgcaggccggcgtccaacatggacccctacgtcgtcaccggcatgatcgccgagaccaccatcctgtggaatggaaactgatcaagcatgtgcattctcgagggagcccactgtttttcttctgcacaacgcatccgccgtggtgtcgctttggttttgaaatttagattccgttgtcctaaaatttatcactacggtctccggtgtattgctcgggaacaatgaataacgactgcgatgtttttttgttaaaca

SEQ ID NO: 12372 - DNA, 1297 bp, Zea Mays
aaccagcgcagccctcaattcctcactctttttttatcccctcctctgccattccctccctctcccctcaacccagcgcccccctcccgccgccactagggtttctcctccccgcccacccccaaaccatccccgaagcttccagtgcgtcgcgccgcaaccatgagcgacggtaaggactccctcgacctctccgccctcggcgccgccatccccaactcggccgagctcagcgcggaagacaaggctaaccttgtggcgtcgatcaagaacacgctcgagggattggcatcgcggcataccgacgtgctcgagaacctcgagcccaaggtcaggaagcgcgttgagaagctcagggagatccagggcgaacacgatgaacttgaggcgaagtttttcgaagagagagctgctctagaagctaagtatcagaagttgtatgaaccactttactcaaagcgttatgaaattgtcaatggtgtggtcgagattgagggtatcacaaaagaaagtgcagctgaaaccccagaggagcaaaaaagtggagatgagacctctgctgagcaaaaagaagaaaaaggtgtaccagctttctggcttaatgcaatgaagaatcatgaaattttagctgaggagatccaggagagggatgaggaagctctcaagtacctcaaggacatcaagtggtacaggatcagcgagccgaagggttttaagcttgaatttcactttggtacgaatatgttcttcaagaattcggtgcttacaaaaacatatcacatgatcgatgaggatgaaccaattctggagaaagccattggtactgaaattgaatggtaccctgggaagtgcttgacacaaaaagtgctaaaaaagaagccacggaaggggtcaaagaacacgaaacctatcacaaaaaccgaagattgtgagagcttcttcaacttcttcagtccacctcaagtccctgatgacgacgaggaaattgatgaggacacagctgaacagttgcagaaccaaatggagcaagattatgatattggatctaccatagaaacaaaattatcccacatgctgtctcgtggttcactggagaggctgctcaagatgaggactttgaagttatggatggcgaggacgacgacgatgaagacgacgatgatgaagacgacgaggatgaagatgacgatgattatgatacaaagaagaccaagggaactgctggaggggaagggcagcagggtgaacgacctgcagagtgcaagcaacagtgagatggtctggatgaagtggcgga

SEQ ID NO: 12373 - DNA, 77 bp, Zea Mays
atacttgtccataaaccatacttggaagacattgttaaattaagtttttgaggaccttcggaggacgaaggccccca

SEQ ID NO: 12374 - DNA, 112 bp, Zea Mays
agaaggttaccagcttggaacagcccgataaataagaggagtacccgatcgccaacaaaatggataagagtgttcaatgctccctttactaacaagtcttcctttatcctgt

SEQ ID NO: 12375 - DNA, 2914 bp, Zea Mays
atcatgtggaacactgacacaacgtgtgaaaatgaacatgaggcgcatgcacgacgtattcaagaggaaaactggaggcttggtcatttggagatctgggagtaccatcatattgtacagaggaaccaactatacgtatccttacttccatcacagcgaaagggtggatagttttctcgacaaagaatcatcagatcagagcaattctggggacgaggatgagactagttcacagcatggtagcagtcatgagaagagtagtgagaatcctgttgtagcatgcgcagaacagattcatgttggagaggggaacagtcagactatagaatatttgaatcagagcttaagcagagagaaagatacaaatcacccggtatcatctatcaaacggcttgtttttgatgcagatgagggaaatttagacattagagctggaaatccaaacgagcagcatgtgagattgcaggaaaacactcatcctgatagtcctaataagtttggtcctagagatcgctcatccttagtggctggtgttggatctcaaaataagtttcgattacagttgcctggggaggtcaaacttgcagaggaagcggataaattactggatgggttgggtccaaggttttctggttggtggggatatgatcctgttccggtggatgctgatctgttgccagctattgtgccaggataccgtaggccttttcgcctgcttccttccggtgtgccgcctaagctaacagacagggaaatgactatccttaggagactagctcatgccttgcccttccactatgcactcggaagaagcagcaaccttcaaggattggctgcatccatgatcaagctatgggaaagatgcgaggtagcaaagattgcactcaagagagatgcacacaacactgacagtgagctcataactgaagaagtaaaggagttgacaggtggaaccctattatcaagggataaggagtcgattgtattctacagagggaaagatttcctccccccagctgtctctctggcaatagaaaaacgcagaaagctgggcagttctacaatctacaaggccaagcctggcattgaagaaagcatgcctactcaaaatgactctgtactgaaggtatcaagtgatgtctcggtacacgttcgtgaagagggaacttctgtcacagagaatagagctgaatctcttaatactgttgcgaaggatgttgaaaccagattatctcaggccatagcagagaaagcaaaagctgaaaaacttattgaagaactagaaaaggcatctccgctttcaaaggctgaagttagagagactatatcagaagatgagaggtcggaggggagtttttgacggaactattgaaaatatgcatcttcattggaagtatcgagaacttgtgaagattatatgcaaagaacaccgccttgaagatgtggaatacgctgctcgaactctagaggcagagagtggcggtattttggtggcagtggaaaaagtgagcaaagggcatgctataatagtatataggggaaagaactacaagagaccatcaaaactcaggccaaaaactttgttgagtaaaagggatgctttgaagcgttccctggaaaaccaacgttgtaagtcccttaaggttcatgtacttaagctgtcaaagaacattgactacttgagggatcagatgaattccagctactatcacaaggacatgcatgatcctagtgtcaactctgtaacactacagcagcaagacgaagaaatgcctgaagttgctcccatgagttcagagcctgaggttgagaagtggacatcagttgagattgatagagccttagatttaacaaagtctggagtccctgtggaagatatgcagagcaaagtctgtttcaacaagcttgaagatgattcttctgcgactgcaggtccatgtctgactgggagttcaattgcagcttcatcctataatctgatcagacatcaaaaccaacgtagctctactgtgacatccagtcctgatggtcgctacgaaggtgcaccttcaaaagtcgtggatgcgccaaaattggatgcggaatctctttctgtatcgcctttgagagccgcaccgctctcgaatcaagaaaggcttgtgctaaggaagcaagcccttcaaatgaagaaaagacctggaggaacaatgccatcaccggagttgcaaaaaccataaaaacgcacttcaagaagcaccctcttgctatcgtgaacatcaagaacagagcggacgggactccgattcagcagctgatatcggaactcgaggaggcgacaggatcggtgctagtgtcacgagaaaccaacaaagtgatcttgtacagaggctggggcgcagaagtggcccagaaaagctcaagggaaagtagcacagacgagggcgaaaaggaggtcatatcacctcagctccttgaagctatcaggttagagtgtggactgctccctgccgattcgggatagttggtccggataaccttcccccacagatcccgtgtttcgaaaggatcgtacaatgattgcccgcggatagatccgaagctgcataaacgcacgcaaggtgtgaaaccctccctgctcacgggcatagttgtaagagaagaacaggggcggcggcaggggtattcttaggtattccatgggatgcccttttttgtgaaagaaaagaatatgtattgtctatactaaaatatttagttctcctagtgttactggctctcgctgttctgggggaaattgttcttggaataccctggcacaggctcaccgctcacagcatcacgtctgcctccgccagtggagaagaaacgggcatagctgtagctttgtcggtgtccccacctcgtagatcttcaccctcgaacggcctgagtcgag

SEQ ID NO: 12376 - DNA, 57 bp, Zea Mays
tgctccctggttgatcctgccagtagtcatatgcttgtctcaaaaataaagccatgc

SEQ ID NO: 12377 - DNA, 1137 bp, Zea Mays
gtcgaggaagcggctacataacaatgacgacaagacgtagcaagcgcaacaatggccatctatgatgtaatgcagcttgtgagggcagacgtgtccactattggaatgggcatagctggatcaacagcttctataatccttggtggtggcacgaagggcaagcgatttgccatgcccaacaccaggattatgatccatcagcctgtcggaggtgcaagcgggcaggccctagatgtagaggtccaagcgaaggagatattgaccaacaagaggaatgtcattcggatcgtatcaggcttcacaggccgcactcctgagcaggtagagaaagacattgacagagatcgttacatgggccctctcgaggctgtcgattatggactcattgatggcgtgatcgatggagacagtattatcccacttgagcctgtcccggagagggtgaagcctaagtacaactacgaagagctgtacaaggatccacagaagtttcttacaccagatgtcccagatgatgagatatactagtcgaaaagttgtattttgtgcgaatgttaagtctgttcttcagcaagcagatgtttttcgtcgcttgtagctgtcaaaccaaccatagcactagtagcttattgatcttgtttactgactggatggtgattcgagcaggcaactagaacctgttggttgtgtttctggtgttacattgtggtgttagaatggtccggctgtttcgttttgagtcctgaccatttcaggtgtggtacgttgagatcagttaactgttcgtttttttttttttgaccaccagcaaaagcttctacatcccatttcaaaacattttctttatcatgataagtcttataaaatacaaagaatacataactgtaaagtcagtatggcatgcaattgtgactgctcgattgacgattggctggaaatccgtgtttccagagacagatttcaaaggagagtaaaaagttctcagctcaacgtgttctctaatttattcgctgtcatgtggccaccaaaacaggatgaagagtttgccgtgaagtatttctttcttaagctcaaaagtacagtaatggatacaacaatcagattatttagaataggagaaaaaaaagaatacaccaa

SEQ ID NO: 12378 - DNA, 693 bp, Zea Mays
tttttgtggggtcttgtgaaacatgaaccgtgctttgaagctccatcctgtgttgtgcaacaccttcaagaagaaagcccccaatgctataaaggaaatcaggaagtttgcacagaaggcaatgggcaccactgacatcaggattgatgtgaaactcaacaagcacatctggagcagtggtatccggagtgtgccgaggcgtgtccgtgtcaggatcgcacgcaagaggaacgatgaggaagacgccaaggaagagctttactctcttgttaccgttgctgagatccccccagaaggcctgaagggtctgggtaccaaggttgtggaggacgacgagtagatctgcctgggtactgatctgtgtcaactgtcaaatcattttttttggtgtttttgagtttgttagcactaagtcgatagccttgtgagaaatctttgagttttctgatggcgcgcttgttctcgtctggttttgaacttttgaagatacccgcaccaagtactgtagtctgtcgttccaaatcttttctgtaggcatcagatatgcagcatgtctgagtctgacgaattttgtttcattcgcatttgaacttggtaagtacgaattatttcaaagcaaattagttacaattagttacaaatggaatcctcttcgtagctgccaaaccgaaatggaaacctcttcgttgctgc

SEQ ID NO: 12379 - DNA, 70 bp, Zea Mays
agcaagtactcggtcgagggatactcgtcaaacggacatcgtctaacaacactaacctagtgttactcag

SEQ ID NO: 12380 - DNA, 395 bp, Zea Mays
gtttggctcagttccgggaagctgcaatgtccaaggatgatacggaattgctaagggtcatggccaactacggggaggatgtagttgaagctctgggatatgaagtggatcggctggagtctgagatccaaaagcttgtgcctgggattaaacatgttgacatcgaggcacacaatcccgaaggacttgctcttagagcagaagttttgtagattacctgtgtacattgcatttgattaacactgttgctggtcgctgccagtttgatttgggtccaccaccattcgataagattgtcttccattggcaatgtaagaatcagatggctgttgttgcgtagcgaggcggtttttttatttggaagaagacgtggtcgcgcctgacatggaaggctt

SEQ ID NO: 12381 - DNA, 95 bp, Zea Mays
gtggtgtctatattgttaagctgaggaggctgaaatgatttcaaggtacttctttgcaacctcacggtaagactccaagaacaaaccatcagcaa

SEQ ID NO: 12382 - DNA, 1395 bp, Zea Mays
ggttcttcaactctttggtgcataacagggaaacaagattgacaagacccgggccggtgtgcttgtgggcactggtatgggtggcctcacggtgttttcggatggtgtccagaatctcattgagaagggatacagaaagataactcctttcttcatcccatatgctatcacaaacatgggttctgccctgcttggaatggacattggtttcatgggtccaaattactccatctcaactgcctgtgctacctcgaactactgtttctatgctgcagcaaaccatatccgtagaggcgaagctgatataatgatagctggtggcactgaagctgcaattattccaattggtgttggtggctttgttgcatgtagagcactgtcacagaggaatgatgaccctaaaacagcatccaggccttgggacaaggatcgtgatggttttgtcatgggtgaaggagctggagtcctggtcatggagagcctagagcatgcaatgaaacgtgatgcaccaataattgcggagtatttaggaggtgctgtgaactgtgatgcttaccatatgactgatccgagatctgatggtcttggtgtttcatcttgcatcaagcaaagccttaaagatgctggtgtggcgcctgaggaggtcaactatattaatgctcatgcaacatcaacccttgctggtgatctggcagaggtgaatgccatcaagcaagtcttcaaggacccatctgggattaaaataaatgcaaccaagtccatgataggacattgccttggcgcagcaggcggtttggaagccattgctactattaaagcgataactactggatgggtgcatccaagcataaaccaatttaacccagaggaagcagttgaatttgacactgtacctaatgtaaaaaagcagcatgaagtgaatgttggtatctcaaattcctttggatttggaggtcacaattctgtcgtagtatttgcaccatttaagccataaggtgttccttgcctcacaaatcttggtcagaacagtgagatctgatttctgcgttcaattttcatgtgttctcttcgggggggaagtaatgtcagatttgaaccagcaacgttaaaaatgaactaaagatgagatacattgcgttttagatgactccatgttcacttagattgagcgcggctgtacaacattcctttgaaccatttgtaattgattgtactgtttttcatgtaatggaagaggagtcttgtagatgcacatctggaccttctagttaaatagcatacaaatgaatttggaaggcaggaattctgtccctattgctggatctggactcttttatgcatttttttttaaaatggctatatatacaaacgcgcgcttcaattaaacttgcacta

SEQ ID NO: 12383 - DNA, 1663 bp, Zea Mays
aagattgagatactaggccttggagggaatttccgtggagaatcaggatcggccccattgccgtctctagcaccactagtagcgaagccactggttgttggtaggtgcacgcaccccaccccctcctgccgtcctcgatctcgtctcctcctccctacccaatccctcgcggtgggcgagggtggaagcgagtgacgatggcggcgctggaggcggcgagggagtgggcgggctccgtcataccgccggagctcgccgccgccgcggggggagacccactcgccgcgctggcggccaccgccgcggccctcgtcgcggggctgcttattatcgctgtctggttccgatccggaggcgggacgccgtccaagccggtcgccacgccggtacggccaccgccggtcaaggtggacgccgacgccgacgttgatgacggccggaagcgcgtcaccatcttcttcggcacacagactggcaccgccgaggggttcgcaaagtccatggcggaggaggcgagggcgcggtacgagaaggccgtgttcaaagtggtggatctggatgactatgctcaggaggacgaggaatacgaggagaagctgaagaaggaaactgtggtgctgtttttcctagcaacatatggggatggggagccaactgataatgcagcacgattctacaaatggtttactgagggaaaagagaaggaagtttggttgaaggatcttaaatatggtatttttggccttggaaacaggcaatacgaacattttaataaggttgcaaaggtggtagatgagctagtagaggagcagggtgggaaacgtcttgttcctgttggccttggagacgatgatcagtgcattgaggatgatttcactgcatggaaagaactagtgtggccagaattagatcaattgctccgcgacgaggatgacacaactggtgcatcgactccatatactgctgctattcctgaatacagagttgttttcattgacaaatctgacctgtcattccaagatagatcatggacactagccaacggtactggtgtgattgatattcaacacccttgcaggtctaatgttgctgttcggaaggagctgcacaaaccagcttcagatcgctcttgtatccatctcgagtttgacatttctggcactggtcttgtgtatgaaaccggagaccatgttggtgtatatgcagaaaattctgttcagactgtggaggaggttgaaaggctacttgacctttctccagacacattcttctccatccatgcagatgcagaagatggatctcctcgtaaaggaggaggttccttggccccacctttcccatctccatgtaccttgcggactgcgcttctacgatatgctgatctactcaatccaccgaagaaggctgctttgcttgctttagcttctcacgcatctgatccagctgaagctgagcgacttagattcttggcttctccttctggaaaggatgagtattctcaatggataactgctagtcagaggagccttcttgaagttatggccgcattcccttcagctaagccaccactgggagtgttttttgcagcaatagctcctcgtctgcaaccacgatactactcaatttcatcatctccaaagaagatggttagcgggaagccatg

SEQ ID NO: 12384 - DNA, 1792 bp, Zea Mays
ccatttggtctcatatcttcttctcgtccgtctcgcttctctctctctctcctgaggcgcagcggtggggtggggtggggtagggggcggcattgcgagctcacaccacctgcggcgcggcgatcccgggccaccggctatcgggctatgtgatgatccgggccgtgatctcgacggctattcgcggctgaacgggcggcggcgatgaacggagcgagcgccggcgccggcggggaggcgccgctggtgtacaaggcctggaaggggaacaatgtgtttctactgaaggggaggttcatatttggccctgatgcaagatccctgtttatcaccatgttccttattgtcgcgccggtatcaattttctgcgcgttcgttgccaaggaattgatggataagttctcttatggtctgggattgccggttatgattgcagcagttctattcacagcatatgatctgagtcttctgcttctaacttctgggagagatccagggatcatacctcgcaatgcacatcctccagaacccgaagggtttgatggcaatgcagaggttggggctaaccagactccacccgtgcgtttgccccgagtgaaggatgttgttgtcaacggaatcactgtgaagacaaaatactgtgacacttgcatgttgtacaggcctcctcgttgctcccattgctctatctgcaacaactgcgtagaacgttttgaccatcactgcccctgggttggacaatgcataggacttaggaattacaggttcttctatatgtttgtattctcaacaactttgctctgcctgtatgtctttgggttctgctgggtgttcattattaagatcagaaatgccgagcagataacaatttggaaggcaatgacaaagacccctgcatctattgccttaatcatctacacattcattgcagtttggtttgttggtggcctctctgtgttccatctgtatctcatgagcacaaatcagacaacatatgagaacttcaggtatcgctatgatcagcgagacaacccatacaacaagggagtcatggaaaacatcaaagagatcttctttacaacgatccctccttccaagaacaacttctgtggtagggtcgaacaggagcatggtctgaggccccgtccaacgaatggtttcatgagtccaaacatggggagagctgttggcgacattgagatgggtagaaaaccagtggcttgggatgagcctaggatggcggctgaaattggtgatttaggagcaggtctgagcaacctgttggaggacaaggatggcaggtttcgtaccacatctccagatctcagccgcgacgcccttgcggttggaggaggcttagaagagcacggatcctcggcgatgaaccctgggcgctcaagctggggagttgaagcaggtcgatgatggcaatggcattgaccatgtaaggcggatgtagtgagatgctcagggttgttagtgccagttcgtcgctaatttgttgttttgttggagatttgaggtcactaatgttattagactttgacctgtatggttgtttctgaactttcttttcttcttcctcttaatttggggcgtcttccatgtccattgtttgaagcagtcggtttgtgacgtctccagcttggtagtgtcaggttttgtctgtatataatcggagcagtaagcctaaaataggtttcggttgcttgggtttggatggtaatggttgtgaacaatgtcgaaccttcgctttggagtaaatgaacatcgtttgatcggaaaaaataaa

SEQ ID NO: 12385 - DNA, 944 bp, Zea Mays
ggccaggccccgccgcgcctgccaaccctactcccgtcagcccacgccgagccgctcggaccggatcggccgtatttaaacgcacccccgtgtgacctcctcaaaacacgcgaatcgtaccggtacgaacactgagcacgcacgcacgcacgcaaactcaaaggagtgtgaccacggaactgaagccatggcggttacagttgagaagggctctatgggcgagccggcgctgctgctggagcgcagccgggcgatcaccctgcacggccgtgaccggaagggccgtgccgtcgtcaggatcgtcggcaactactttccagcgcgcgcgctgggcggccgggcggaggaggcgctgcggtcgtacctgcgggagcgcatcctcccggagatcggggaccgcgagttcgtggtcgtgtacatgcactcccgcgtggatcgcggccacaacttccccggcgtcggtgcgatccgcggcgcgtacgagacgctgccggccgcggccaaggagaggctgcgcgccgtctacttcgtgcacccggccctccagtccaggatcttcttcgccaccttcgggcgcttcctcttcagctcagggttgtatgagaagctgcgatacatgagccggcttgagtacgtttgggcccacatagacaaggagcagctggaggtccccgactgcgtgcgcgagcacgacgacgagctggagcgccgcccgctgatggactacggcatcgaggcgacggagacccgctgcatgtatgacgccgcgtccatggacacctcggcgtccctgcactcgctccgctgcgtctcctagtcgcctggacagtggcatcccgattcccgccgtattctcaacttcagctccaaccttgggctctgcaccagcagcaatactctcaacttcagcaccaggattgtgctcggcagtttccatgtaacgg

SEQ ID NO: 12386 - DNA, 944 bp, Zea Mays
agggcagcgtccagggggcactctgcaaagcgcgcgaccggacggcccgacttgggattgagggtatccatggagatgcttgtggatttgagcaatctaatttggggaaaaggggtagagatgaaccatgttcatctggcccaacatccaaagcttgccgtgaaaaaatgaggagggacaagctgaatgacaggttcctggaattaagttcaattatgaatcctggtaaggaagcaaagttagataaagcaaatatattgagtgatgcagcccgtatggtggcacaacttagaggtgaggcagaaaagcttaaggaatcaaatgagaagttgcgggagaatatcaaggatctgaaggaggagaagaacgagctccgtgaagagaaagtgagactaaaggtagaaaaggataggctggagcagcaagtcaaagctatgagtgtagctcctacaggatatgtcccccatctccctcatccagcttcataccatcctgctgcgttcactccatttgcgccgccacagcaagctccagccaacaaaagtgctccaatcccagcaccgttccctgggatggcgatgtggcagtggttgcctccgaccatcgtggacacaactcaagatccaaagctctggcccccaaatgcttaggggcagctaccttggaatgttgactcattgtgccttttcatgcatttggtgggcaaatcagtgtcagttaggtccctggagactggagaggaatcaagttcgcaactcgcgccatgtttatgctgtaacagctggtttccagcactacttatgaacttactttgttctactgaagggtggtgcctgtaattaatatatggatcttaaccctctagttggcatgtatatcatttgttctattcgagagctgaattttaaggaccattattgaagtcatgagtgcagtaaaaaaaa

SEQ ID NO: 12387 - DNA, 1254 bp, Zea Mays
aaaatttgaaactccctcctcctcctcctccggtccacgcgctcgcttccctctaatttgaaatgcaaatccaccccacccacccaacaacggaacggaagtacggaaccgtgtgatcccgcaacattctacttgccctacccgccccggcccatctcgcccgtgcatctgcgcaccgacggccgggtccctgctcttcctttcgatccatttaaatatatacgctccccatcccttcccatcgcccccacaccgtctcctccacaacacgctcctcacctcgcggcgactcttgccagggcactcctccgcgaaagccgcatccgctccaaggggagttgatcgagaagcgttggtggacatgggtcagatccagtactccgagaagtacttcgacgacacctacgagtacaggcacgtcgtcctcccgcccgaggtcgccaagctcctccccaagaaccgcctcctgtccgagaacgagtggcgcgcgatcggagtgcagcagagccgcgggtgggtgcactacgcgatccaccgcccggagccgcacatcatgctgttccgccgcccgatcaactaccagcagcagcaggaggcggctgccgcgcagatgctggccaagtgagcccccggtggccagggcggcgaccaggaacgtttaaaaccctaaccccctttccatctctaaaaggggcgtcgctgttctgttgatcaattcctctatgctgttagttggaaacttcgggtgtagttggtggatttgctggtgtgtgccttgtgttcgtggaaattcctgtgaaggaactgccatgtgttaggctgttaccatgcccattttcttaatactatgtgttgactgtgatcaagatggcactcatgcagggatgatatttaatctgtttgacgtgatctttgtaatggtgtgatctggttagtagcactgatatcatgtttaatctgttatgtgtgatggtcagtatggtcatggtgattttgcatgatgagaattgttacctagtgatctaagtttatgtcaagtgaacatgctgttagttggaaacatgggatctagttggtcgactttttggtgggtgccttatgttcgtggaaattctgtgaaggaactgccatgtgttaggctttgttacattgccattttcttaacactattcgttactgtgtgatcaagatgtcacctgtatcgatgatatttaatctgtgcatgtgatatttgtaatggtgtgatctggttag

SEQ ID NO: 12388 - DNA, 937 bp, Zea Mays
ccccccgccggccgctgcggcaggaccaagggaacaacgagtcgccttcttgcgcgcgcgctcaccattccgcttcccggcacccgccgccttcccgagccgccgcccggctcgcgtgcccgtcgccgccgcggcgccggagcgcaggccgccgggcgcggtggcgtccaccaccaactacgtcgtgccgctcgacgcggcgccgtccgggatcacgcgcccgctcgtcgagatcctccgcgacctcaacaagcgcgtcccggacgccatcgtgcggccctcctcccggcgcgcctccgcctccgaccccgtcatcccctggtaccatgccaataggatgctcagcttttatgctccaggttggtgtggggaagttcgtgatgttatttacactgacagtggaaaggtgacggtcatataccgcgtgactgtgcgcggaacagatggagaggttcacagggaggctgctggaacagcatcgctgagcgatgaacggttcgacgaccccgtgtctgcggcagaagaggcagcgttctgcaaagcctgcgcgaggttcggtttcggcctttacctgtaccatgaagacgagacaccatagaagaccaacaatttctccacatcgtctatgccggccctgttctgtttagatttgcgcttgaggggctgtgctctactgttgttgatcagtaagtctatcagatacccatcccattgctgctaggtccttgagctgttgtaacgctggtactatgttgtttgctcgttttggtagctttgtcttgcaaaaaaatgttgtcagctacaattggtatggattatggaactattagtatatatgcaatacttttttgttgcttacctctaatatacacatctcacactgttcaagtttatagaaaaaatcacgtagcatcgaatttgtttcaatgaatccgcc

SEQ ID NO: 12389 - DNA, 1017 bp, Zea Mays
aaaatgtccctgtcagaataaatcagcgtgtcctcagatttcaggcggctggaggcatacgatggcacttacatcagagggaaagctttacggatggggatggaacaagttcggacaagtcggagtcggcaacaacgacgaccacagctcccccggacaagtcagttttccagaggatcagaaaatctcccaggttgcatgcggatggaggcatactctggccctctccgagaagaaaaatgtcttctcctgggggaggggcactagcggacagctcggcaacggtgaaatagtcgacaggaacacgcctgtgctgatcgatgccctgagctcagacggttctgcctgcaagaagctggagtcatccacggcagccccattcgcagccaaagtttgggtgtcgccgtcagaacgatacgccatagtccctgacgagaacgtccgtaaagcaggcggaggcacggcacgaggcaacggcgccgacgcgaacgtgccggagaacgacgtgaagaggatgcgcgtgcagtcgtcgtagtaggtcttctactaccgtccactccaccacccccccgttaaccctactagtagtaagtactacgaagacgaaccggtgccccatctagcggcgcccgatttttgtgcgttacgttctgcctaaaagtgctttccgtcgacggacggacctcctggtgttgagatggtagcggtagcactgcctcgcggcgatggtgtgtgtcgtgacgtgattcacctcttagagtagagaggtggctagcccagtcgacctgtgttgtgtgtgttgttaagatgtgtcctggatcttttgtgacattgcatggagggtacaataagcgcttcgtttctcgtttcttcccacttgttgcatgatagccaactgaaaccaagtactccgtgagacgaaagcaacgagcacacaaagactattttgcctatcttcatcatcaatcttcgcatcgcatcgacggtcacaagatcagcaaccaattcattgatcga

SEQ ID NO: 12390 - DNA, 71 bp, Zea Mays
ccaaaagctgctgcggactgccaaacgctcagctttttagtcagcttttataaaattcgtttgagtaaaaa

SEQ ID NO: 12391 - DNA, 76 bp, Zea Mays
gtgaccacaaggtggcgtccacctgaccgaaggggatggcatcccgcgtcatcaatgcccgagcaattgagattac

SEQ ID NO: 12392 - DNA, 1385 bp, Zea Mays
tgaaaccttttctttttagaattaaggcacaactgaactcttcaccaaattgagagtacgagtgagcaggatgactatgaagttgtcagaaaagttggaagaggtaaatatagtgaggtctttgaaggcatcaatgttaacaattatgagaaatgcatcattaagatccttaagcctgtcaagaaaaagaagatcaaaagggagatcaaaatacttcagaatctctgtggaggtccaaacattgtgaagttgcttgatattgtcagagatcagcattcaaagactcccagtttgatatttgaattcgtcaacaacacagacttcaaagtcttgtaccccacattgacggattatgacatccgctactacatatatgagctactcaaggctctagattactgccattctcaaggcatcatgcatcgagatgtcaagccccataatgtcatgatagatcacgagcttcgcaaacttcggttgatagactggggcttagctgagttttaccatccaggcaaggaatataatgtccgcgttgcatcgaggtatttcaagggacctgaactccttgttgatttacaagactatgattattctttggacatgtggagtcttggttgcatgtttgctggaatgatatttcgcaaggaaccattcttttatggccatgacaaccatgaccaacttgtgaagattgcaaaggtccttggaacagatgggttgaatgcttatttgaacaagtatcacattgagctggaccctcaacttgaagctcttgttggaaggcatagtagaaaaccctggtcaaagttcatgaatgctgataaccaacatctagtatcacctgaggccatagattttctcgataagctcctgcgctatgatcaccaagataggctcactgcacgtgaagctatggcacatccctacttcctccaagtcagagctgtggagaacagtagaacgagaccacaataatcgttgtctacaccctcgaaatgaagttgttgctaatttctggaacatcataggctaaaaccgttcaataagcatctcgctccaggaatctgggccatgactccgtggcagtgaatcagatagtatgggtcgcatcatgtgggcaaccttggcagatgtttttattgttgtctttaatcttgggactactgtagctttaaacctacaggctgtgcttgaatgacatgatattcatatcatatcgtctcctgtggtgggatatgaaattgtatgttatctttaaacataaacatactggttgtattatggtgtgctattatgtatgtatgattcttatttattttgtgtgatattgtgatgaaatactcatggatctcatagatgacatgagtttccggatagatgtg

SEQ ID NO: 12393 - DNA, 139 bp, Zea Mays
aactggccgggtcgtgcctccggcgccgttacttttgaaaaaattagagtgctcaaagcaaagccatcgctctggatacattagcatgggataacatcataggattccggccctattgtgttggccttcgggatcggat

SEQ ID NO: 12394 - DNA, 627 bp, Zea Mays
actacaccccaccaaagggtttttgagttttgacaatcagaacaatagcctccaccgtccaccctcacgcaactgcctcttcgcggcggcgcaaaacaccaacacgtcttctctccggttgcgaggagggtataggatttcgccgcggcgagatgtcggcgtacgacgaggtggagatcgaggacatggagtggaacgcggagctgaaggcgtacacgtacccgtgcccctgcggcgacctcttccagatcacgctcgacgacctccgcatcggggaggagattgcgcgctgcccgtcgtgttctctcttcctcaccgtcgtttacaacgccgaggactttgctgacgccaaggagccgacccacaagccgtccccgagcccagtcgccgtcgcctgatgtggcccgtgcccggcgagatggacgcatggaaatggatctcagagcaggataacgaatgagtttttgtttggcacacaccactacgggagcatttgtactactcttagatgagtcaacccactgcatattttcagagctcaggttgttgaactatcttttttttgtgcttgacattgtaaggtgacatggacagaacatgctatgaaaaaaattgtttagtcaagaa

SEQ ID NO: 12395 - DNA, 1498 bp, Zea Mays
cccgaatcctccagaaaccgtgtgctccccgaagcagtttagatatcttcctcccaaccttccctgccaaatcgcggtcactgctccgaagtccgaaccttcatacacatcgtctcgtttccgatttccccaaattcaggccacaggcgctacaggacccaggcaccactcggtcggcggccaccgcgtcgccccgcctgctcgattggggtcgcgtgtgcgataggaagtattgtgttgtgtttgcaacgtgatagcttgtactgggaacaaaggtcaagatgggcgccttggacctacaccttgactttgcttctgctcaacatggacaagccaagttaaaggaatatgccaagagctctttgttgtctgatggaaactacaatacagacaagatcaatggttcaaaccctgatgactatgagaaatttgagaaagggataatgcactatgggtgtccacattatagaaggagatgccgcataagagctccttgctgcaatgaaatttttgattgccgacactgccacaatgaaactaagaattccattaaaattgataaaatgaagaggcatgaacttccacgccatgaagtgcagcaggttgtatgctcattgtgtggcactgaacaggaggtgcgacaagtatgtatcaattgcggtgtttgcatggggaaatacttctgtggtttgtgcaaactcttcgacgatgatgtctctaaacagcagtatcactgcaacggatgtggaatatgtagaatcggagggagggagaatttcttccactgttcaaaatgtggatgttgctattcaattgcgctgaagaatagtcatgcatgtgttgaaggggcgatgcatcatgactgtccaatctgcttcgagtacttgttcgattcgacaaatgatgtttccgtcctgccttgtggtcataccattcatgtaaagtgcctgaaagaaatggaagagcactgccagtttgcatgccccctttgctccaagtcggtttgtgacatgtcgaaggcatgggaaaggctcgacatggagctggcaactctgtctgactcctgtgatcacaaaatggtccgcatattatgcaacgactgcggggcaatatcagatgtgcagttccatttgattgcgcacaagtgccagaattgcaagtcatacaacacccgccagatttgaagtaagaatcgcaagtcacacaacaccgtcagatctgaaatagcaaatcctgtgggggtttctgcatttcttcaagaagcgtgatggactgatggccccttcccgtgagctgctgagcaccgggatatctggcaagacactcatcactgtatccactccactgggtcctgcggaggcaaacagctcgagattgtatatctgctgctagctgccgcccttcgttatgcataagcctactcttgccgttttactcctgtcgctccgtgattctagtgtaataatgtcatatttactgttgcttcaaaaaaaaatga

SEQ ID NO: 12396 - DNA, 764 bp, Zea Mays
atggtcaaatggagggattctgcaataacaccttaaaactagtgccagatcgacagaatcaagattgcattgtactttggagttgtcttccctcttggagtttggggagagcgttatactatacgctggggtttggggaaagggtgcattttcatggcagccttgtaaccatccatccatcatctatttgccgatttgctttagctgcagagagcaaggatcccgcaaaagttcctcggcctagtaaccgccttccactctcagaattcgtcggcgtggtcctcggcagctcacttcctcctgctggtggtgatggtgaggcgctcgaggctgcggaacgtcgtgttgtcccgcgaggcggagcctcccctcccggccgcgttccgggccacgggggagcgcggggacgacctgctgttctcggcgcctcccgagtggtggagcctctgcgcgggggacgggcgcccgctgccgccactgctgccggagacccaccggcggttctggtcactgcagtcccccgaagaggtcggccgggtggacggagctgcgggcattttcgacgagctccctccccgggacaagatgcgcgttttctctgatgagtcggcaacctggcgagaacaatggtcacattagcggggtcactcagaagaaagggagcgacaatagtggaaatatgagacgaactccggcgggattacaatgttcgtgttggcaaaaagaagtacctctgccgagggcagcgtaaggttgaatatgga

SEQ ID NO: 12397 - DNA, 169 bp, Zea Mays
cacgttagggcgttcgcgccgcaagggcccgtgccattggctcagcccgcccggtcgacgcgccgcggcggggccgcctcgaagctcccttcccaacgggcggcgtgctgaatcctttgcagacgacttaaaacgcgacggggcattgtaagtggcagagtggcaaggt

SEQ ID NO: 12398 - DNA, 285 bp, Zea Mays
gtacatccctcctactacctactaagattaaaagaattacatgctaaaaaaccatctgctgaaggtaagatgctgcgcttaagcgttgaagctggtggatgttctgggttccaatattctttcgctcttgatgacaagaaaaatgcagatgacaggttttttgagactgatggtgttagattggtcgtggatgacatctcatataatttcgtaaaaggtgccactgtggattacgaggaggaacttatacgttcaacatttgtggtcttatccatgaatatgtat

SEQ ID NO: 12399 - DNA, 786 bp, Zea Mays
gctgtttggagacggcaaaaagagttgaacaagctattaggaggaaggttgaggagagtctaaattgtgatgaaatcaaacatgaaatacatcgtcgaattgaggaaggacgaaagaggatacatgaggaggtagcaatccagattgagaaggaaaaggatgcagctttaaatgaagccaagctgaaagtggaacaagaaaaaaagaagcgggaggagctagagaaaaaacttgaagaagaacgaaagaaagctgaagaggcgttgatgaaagaagcgttggaacagcagcagaaagagctagagcggtaccaggagttggagaggcttcagaaagaaagagaggaggccatgaaacggaaaaaaatggaggaagagcagcagaggcaaaaccagatgaagctgctgggcaagaacaagtcgcggcctaagctgtcgtttgcttttgggatgaagtagcgttcgattcaccgaacgaaattagtgctttagtatactgtaaccgtgtagtgtagtacctctgtatgaaactgcccatttctaactctggcagacaaattgcgatgtcataaatgctcctgatctgcttcgtaagttgccggctcttggtggatgtggtttcatctgcttcttgctgttcagttggcgttgccttgcgagaagactgccagagaagaatccggttggtttgatcttgcatgtcaccaagatactatctccgtttgtgttgccccctagttcagcctgttcatatttgaactaaaacgtgataaataaaaaaaacgga

SEQ ID NO: 12400 - DNA, 102 bp, Zea Mays
gccgacaactagcccatcttcctccccaagccgggctcgcccagtctctcgctttctctgctccagcggcaaccctagggtctcaaggtattccagttcgtg

SEQ ID NO: 12401 - DNA, 652 bp, Zea Mays
  misc_feature (651)..(652): n is a, c, g, or t
agattatagaatgcaggcgagtgctgaaaatggacatatgcttatggctactatctggatgataaggtcaagagtgatttttttgagtatctgcaaggtgaggctgagtctggtttggaacgtctgcatcagtgcgctgagaaagacttgcacaattttttgactcctgtgaaatttgagagcactgaaacgacgacccctacagtggctgaatttggtgaattccgggtgaagcttgctgggctcacaagcgttactcggaattactttgagaaccttgttcaagctttggaagctgggttggaggatgtccacgccactgcccaggctgctggtacatccatcgccggcaccagctccaagaaaggaggaactaaatccaagaagaaacaacacactaagccatcgtctgaccacactgatgatggttggccctgcgagcgctgcacatttcttaaccctccctcagtggttgtgtgcagcgtctgcgaaaagagtaggtactagatgatggaatagctcaaagggaggcaccccaagaaaagctcaaagcttatgagaagaggggtgcacttcagatcctgcatcggatgctgagaagctgagcctccagcagctgccatgatggtgtacagtgagttattgaaggtnn

SEQ ID NO: 12402 - DNA, 1338 bp, Zea Mays
atctccgcctcctatcctaaaccccaccgaccggataacaggacactggcactgccattcccgtttcctcgctcgaacacacaccgaagagagagacagagcgagagaggatggcgtccctggcgcagcacgtcgcgggcctaccgtgcccccctctatccggcgcgtcgcggcgtcgccttctcccccgacgacctcgacaccgccgtcgagtccaccgacatagacacggagatcggctcgctcattaaaggaacagtatttatgactacctcaaatggtgcatatatcgacatccaatccaagtctactgcttttttgcccttagatgaggcatgtcttcttgatatcgataatgttgaagaggctggcattcgtcctgggttagtagaagaattcatgataattgatgagaacccaggtgatgaaactttgattctaagtttgcaagcaattcagcaagaacttgcatgggaaaggtgccggcaacttcaggccgaagatgtcgttgtcacgggtaaagtaattggtggaaacaaaggaggtgtagtagctcttgtggatgggcttaagggtttcgttccattttcgcaagtgtcatcgaaaacaaccgccgaagagctgcttgagaaagaattgcctctgaagtttgtagaggtcgatgaggaacaaggcaggcttgtcctcagtaatcgcaaggcaatggcagatagtcaggcccagctaggtattggatcagttgtcttgggaactgtagagagcctaaaaccttatggcgccttcattgacatcggtggaatcaacggccttctccatgtgagccagattagtcatgaccgtgttgcagatatctcaacagttctgcaaccaggagataccctcaaggttatgatactgagccatgaccgtgaaagaggccgagtcagcctttctactaagaagcttgagccaacacctggtgacatgatccgcaatcccaagcttgtgtttgagaaggctgatgagatggctcagatattcaggcagagaatagctcaggcagaggctatggctcgtgctgacatgttgagattccagccagagagtggattgaccctcagttcagagggcatcttaggaccattgtcgtcggatgcaccttcggaggattctgaagatcgcacagatgaatagaggcagttgacgaagtgcaccgggtttgagatatgggatggcagttcgtcaagctcattttcaatcgggtgggggaggcatgacgagatcattttctgttcagatcgtgaggtccgttccagttattatccatttggattaggaaatagaaaaagtaacagggtt

SEQ ID NO: 12403 - DNA, 416 bp, Zea Mays
cacaggagagaatcctgcaagcggcggccgcgcagcctaggccgaggtgaacttggtgacggccttggtgccctcggagacggcgtgcttggcgagctccccgggaaggacgaggcgcacggaggtctggatctcacgggagatgccaatgtccgggtgcacctgcttcagcaccttgaagatgtagatcttgtaggtctccacgctcttcttgcccttcttcttgcccctcttgccctcgccgccttcggcttcttcccggcgggcgccttctcggccgcgggctcctcctccgccggcttcttcgccgcgggtttcttctcggccttgggcgccatcgatgcggggcgagttggggttttggttgcgaaggggggatcggatgggaagaaatgcgaggagatgtgttcgctgtt

SEQ ID NO: 12404 - DNA, 848 bp, Zea Mays
ggataaatggaatgccgtataaaattccctcttcttcaagcaagagatggagctttcattggtagggctccaaaatgctgggaaaacatcacttgtgaactccattgctactggaggttttagtgaggatatgatccctactgtaggattcaatatgagaaaggttaccaaagggaatgtgacgataaaattgtgggatattggaggccaacctagattccggagcatgtgggagagatactgccgtgcggtttctgcaattgtgtatgttgttgacgcggcagatcgtgaaaacatggccattgcaaaaggggagctccatgatctcttgagcaagccatctttgaccggaataccattactagtaattggcaacaaaattgacaagcctgaagctttccctaaacaaaccttcacagaaataatgggcctaaagacgatcactgaccgagaagtggcatgcttcatgacatcatgcaagaactcgaccaacattgattctgtcattgactggctggtgaagaactcgaaaaagaagaattgaacttaaatctgtactagctattaaagcgcacgccaatctctctatttttgcatgtcgcatagcattggagctgtaaattatgcaagaggtattaatcagggatgttgtgttcataattttgttaacctggtttagcagtatgttggtggacagcgtctggtattgtgcacgcccgtgctctgaggctgcctcctgtgttccactcaattttagctgtgcgatttgttctcttgtgttccactcaattttatctgcttgatttgtttcacattctttacgttaaatcaaacaaaactagaacgaa

SEQ ID NO: 12405 - DNA, 1686 bp, Zea Mays
aaggccgcataacttgagcccaattaccaaaatgacaccaaccgattaaactcacagcccaactcctcttctcgccctcgtctgacttcgtttcggacctccccagtttttcccctccggccgccgccggagaagcagaagccatgcaggtcgccgccgcgcgcgcccgccgcctcctcgccttaccggcggcctcggggatccccggaatactctccggaccgatcccagggcgcgcatcatgcgccgagggcgttctcctttaccgtctcaatggcgctcccgcttcgccgtcttctccgcagcataccaggggcttctcctcctcctgcttcgcctcccgatcacactgtaacctcccatcgcctaccatagcttctcaatggttgaatgagaaatcagtacactgtcacatgacgacagcacacttctcaacggaagcaagtgacatggaccaccctacagaagctgtagaggagatgtaccagaaaatgttgaaatctgttgaagctgagaccatgcctccaaatgcctggttgtggtcaatgattgatagctgctccaataaggaggacatcaaacttctttttcaaattttgcagaaactcagggtatttagactatcaaatcttcgcatcagtgcaaacttcaatgagcatctctgcagaaaagtaactgaggcttgtgctcgtgtaggcgccgttgactatgggttgaaggctttatggaaacataatgtttatggaataacaccaacgattggttctgctcattatctactgcaacatgctaaagagcaaaatgacaacaaactaatggaaaacgtaattcatgtcctatcaaaaaatttcttaccgctgcaaccaggcacagctgatatagtcttcagtatctgttataatgctgatagatgggatttactctcaaaatacgcggagagatttgttaaggcaggtgtcaaactgcatcgagctgcatttgacatttggatggactttgctgccaaagttggggattctcaatctatttggcacattaatagtctaagaggcaggtctgtcaaacattatacacttgcaacagggtttgcatgtgcaaaggggtctctgcttgatcggaagccagaaaatgccgctgacaagattaagcttctttatgagcatttgcctgatcagaagaaaccatttgtgaaagatgaactcgagaaacttattgctggatggcctacggaggtggtaaagaggcagaagaaagataagaggaaggagttggaggaagctttgatgaaggacatccctacgatggtggactgcctgacaaagtccggcctcgacatccctgtggaactggacaagcttgccaccccacagctccaagtggcgtagcaaaagaaggcgcgcggctcgccatacaaccggaacagacttgagtctcgaggaacagcatgcattttggtttggcactgatgcaggcagcgcagcgcagcgcaggacgcagattgaaaatctgtgatagatgaaatcatgtttttatttctgtttctaatgttgtagtgcaggcccgtgcgtggtgcgccctttctgttgtgcgttgaccgttgaaaatctgtgatagatgaaatcatgtttttatttctgtttctaagaagcaaattgccgtcgtatcttggcacgtgttgtaaaaaaa

SEQ ID NO: 12406 - DNA, 2057 bp, Zea Mays
tcgttactgaaacctgaaatggtgctgccaaatcatcagttgctgatgcaaggctttcaaaagattaacagtctcaattgatgcaaaagcaacacaatcacactaaaggtttggattagacatttcagagcatgggttcgcggtttccatcccaccagctaagcaatggcttgtatgtctcgggccgacctgagcaacctaaagagaagtctccagtcatttgctcctcggctatgccgtacactggtggggacataaagaaatctggggagcttggaaagatgtttgatctccatagaaaatctggtccattgggtaatcaaacttcaaggaatacttcctttggtggtgctgcctccaactctggaccagtttctaatgctgtcggtcgctccaactactctggttctatttcgtctgcaattcctaacactggaggatcttctaggacaaaaactaattctggacctctcaataagcatggagaaccaacaaagaggtcatctggcccccaatctggtggagtaaccccgatggcccgtcagaactctggccctctgcctcctgtacttcctacaactgggctaatcacatcaggtcctatcacctctggtcagttaaattcatctggtgctcaacgcaaagtatcagggcctcttgattctagtgtatcaatgaagatgcgtaccacatcttttgcacacaacccagctgtcacaaatctcaatgtgggagatggttactcgattaagggcagcattccgaccacaataatctggttggtcgcgttgctctttttggttgggtttgtagctggtggcttcattctcgctgctattcataatcctatcttgcttatagtcgtggtggtgatatttggctttgttgctgcacttgtgacctggaacatctgctggggaacaagaggtgtgattgattttatcggtcgctattctgatgtagaccttagaactgcaaaagatggagagtatgttaaggttactggggttgttacttgtggaaatttgccccttgagtcctcattccaacgggtgccacgatgtgtgtacacttcaacttgcttgtacgagtacaggggttgggactcgaaagccgcaaacgccacacaccgacggtttacttggggtctcaggtcaatggaacggcacgcggtggacttctacatctccgatttccagtccgggctgcgagcactggtcagggcaggatccggcgcgcgcgtgaccccatacgtggacgagtccgtcgctatcgacgtaaacccagacaacaaggacatgtcgcctgagttcctccggtggctccgcggaaggaatctgtcgagcgacgaccggactatgcgcctcaaagaaggatacatcaaggagggcagcaccgtgagcgtgatgggcgtcgttcagaggaacgagaacgtgctgatgatcgttcctccagccgagcccatctccactggctgccagtggggcaagtgtgtcctcccgaccagcctcgagggccttgtcctgagatgcgaggacacgtctggcctggacgtgataccggtctagctagagaggttggttctggcgaatcctctggcgcggaaagggagtagaaaaaaaaagatgccttgacgtttggtttggtctccgtgggttgttagggttggaaggatgtgcaaatgcagggtgtgattattgggctaagtaagtaagtacaatatgagtggtcggtcggttacctggagcttgatcgtgatagtatatggtatgtaatttcctcttctcttcttttggctgagccatggatggtgtgcttgtaacaaggatggcttgatgtcagtatactaccctaccataccatggagcatgtttggagattcagtgggttccagtccgtattatgctcctgtttttttttgttgtagggttccaacaatgccttgaagcctgcaatttccttgtgtacccagatctccatagaaatctatttgcctaaacatggactatagcaggtgtattttcgatggtgagaaatcgatgtgattgattcctcct

SEQ ID NO: 12407 - DNA, 82 bp, Zea Mays
gctagacattagtgcaaaggacaaactctatccacaagatttacctctaggcagggctaagcaatttttgtaaagaatattt

SEQ ID NO: 12408 - DNA, 1170 bp, Zea Mays
aaaaaacgtgtcttgtttcaccaagtgatgtgcgattgctacaccccagccggcgagccaatccccaccaacaagaggtacaacgccgccaagatcttcagcagccctgaggtcgccgccgaggagccgtggtatggtattgagcaggagtacaccctcctccagaaggacaccaactggccccttgggtggcccatcggtggcttccccggccctcagggtccttactactgtggaatcggcgccgaaaagtcgttcggccgcgacatcgtggacgcccactacaaggcctgcttgtatgcgggcatcaacatcagtggcatcaacggggaggtgatgccagggcagtgggagttccaagtcgggccttccgtgggtatttcttcaggcgaccaggtctgggtcgctcgctacattcttgagaggatcacggagatcgccggtgtggtggtgacgttcgacccgaagccgatcccgggcgactggaacggcgccggcgcgcacaccaactacagcacggagtcgatgaggaaggagggcgggtacgaggtgatcaaggcggccatcgagaagctgaagctgcggcacagggagcacatcgcggcctacggcgagggcaacgagcgccggctcaccggcaggcacgagaccgccgacatcaacacgttcagctggggcgtggccaaccgcggcgcgtcggtgcgcgtgggccgggagacggagcagaacggcaagggctacttcgaggaccgccgcccggcgtccaacatggacccctacgtggtcacctccatgatcgccgagaccaccatcatctggaagccctgagcgccgcggccgttgcgttgcagggtccccgaagcgattgcaaagccattgttccttccgttccgtttgcttattattgttattatctagctagatcatctgggggtcaggtcgtcgtggtgtgccaaaacagaacacagaaagaggaagaagaaaaaaaaaacaagacgtgtggcgtttatgttatatcatccaataatggccgtaccacacttgtggtacctttcagtacgtatgcttgcattgtatgaggggtcgctttcctacgccctaccatgtctgtggctttccttgcttggtgatgcgatatggagggaatcgttcgtcagtgccagtgggcgg

SEQ ID NO: 12409 - DNA, 484 bp, Zea Mays
cgacaagcaacagtgcccaactgaatacatttaaagacatgactgacctcaaaacttcaaaatataatctttttctccctcccaccaaacaaacagtatcaacaacgaaagaaaagactaatgatagaatctagtaacaaaggtaaatcagatgtgaaacccagaaagaaacatatgcaaaattaaaacacgttaggcgcaatttttcacaaaggaaaatgagtggtagaacagggcaaaaatgaaaaaagatggtggtttgcttagtgaggttctgggcctgtgttgggttcaaagtgcagcggctcttgttatcctcccaccgttggaagtggacagtgttcgctgctctgtgaagccagcctcacgccattcctgccactccaggtctgcagagacgctagagccccgccagacactaccaacttgggatgggcaagccggccagtgtcacaacgagcccagacccagaaaccatcgcaaa

SEQ ID NO: 12410 - DNA, 2408 bp, Zea Mays
ctccttcccactccaggatcatcccaatatacaaaggatcggagcagcagatgcaggaagggcttagcccaggcatcacgatagaccaagtagacaaagattacggcctcaactagacagacttgagaacctgagttggatgctctgatattccagcaacgagctcaggtctgtacaagtacaacacttcagagtgctccttagcctatgtttgtcaggcgttagctgccaaatgctaacatcacgttcgaggcgtacgagaccattccagagttgtgcagctgcagctaactgctggcgcgcccctgctccgttacttacgagggagtggaaaaaagcaattataaaatgtacggtttcagctggctgaagcctggatccgatctgaatctgccgggcgttcgttcagttggaaaacagcaggaatcctacacacgtgagtcccgtgcgggacggtctgctagatcgcggagtgcatcaaacggtgctgccggcaatggaatatcccgtcccagccagcctgcgtgcttccaccaactttggaagcgatttccttgcgtaccatgccgtctcgtcgttgccaagaagctttcaagtacgggcagtatagatctgtcaactgtcgtacccaaatctgtcgatcgaacgtgtcgacaaatcttctgttgcttaacctcaaagcaaaattgcgaaggttgccatgccagcagcttcctgccaacggtcgtacctaaaactgtcgatgacatctcgtatgtatgcagtctcatcaaaattgtgctgcattcccacccgaaatttctagaacctggtttcgacgctcgacatcatcgtttatggcccaccagcggcagtgccctccaatttgaaccactagcacacagatcgatccgcgctattcgagaaaaaaagagacacaggccggttacgccgttggcgacgtgcccatcacggagcggctacgtgtcggtcccgctccagagtgttcttgcacagcctggacgtttccttctcctcttcccgcagcccggtttgccgaccaggttccaccgttccagagtagccaagcgaatcccgtgtctggttcgcgcgatggcggaggagcagtccaacccccagcaccagcaagcggaggagagggaggttatggtggagcagcagcagccgaggagggccccgaagctgaggtacctggacttcgtccaggtggcggctgcccaggccgcggtgtgcctcgctgggctctacggcctcgccaaggaccacgccggcccgctccgccccagcgttgacgccgtcgagtctgccgtcaagggcgtcgttagccccgtctacgaccgcttcggcggcctgccgctcgacgtcctcgccttcgtcgaccgcaaggtggacgacacggtgcacgaggtggacaagcacctcccgggcgcgctgaaggcggcgtcggcgcatgtctacgcggtggttcggggcgtgccggaggtggcgcgcgagctggcggccgaggcgcagcggtcgggcgtgaggggcgcagcccgtgcggcgctcgcgatgacggagccggtggcgcgggacgtgtacggccgcgtggagcccgtggccaaggacctctacgtgcggtacgagcccgcggcggagcacctggccgtctccgcctggcgctcgctgaacggcctgccggtgttcccgcacgtcgcggagatcgtcgtgcccaccgccgcgcactgggccgacaagtacaacagggcggtcgcagccgccgcggagcacggctacgcgggggccaagtacctccccgccatccccaccgaacgcatcgccaaggtgttttcgtcggcgccagaggccgagccgctggcagagggccagtagtgtgtgtgtgtgtgcgcgcgcgcgcgagctcgtctttgccggtggtgactctggatttggatcaccttccgaactgaactgaaaataaggaagcgtgaatccgggggccagttaaagatggtggtatggtatggtagcggcgttgtactagatgcgtgatgggacgatggttacggaccatgatgatgacgctgtgttccatttagctctctgctgcgtgcttttgtataaaagaagtggttcgatgtcgcaatccctgtgtttatctgacgatgcggttttttggctgttttagtttttgtttggtcagttcaggttagggcgaaaacgataagcttgcgtcaatgctatgcttttagagcatcttttgaagactctttatttttgaccctatttaactctttatttgtcattctaaatgttaaaactttaaatataacatctcatttcaaccgactctctaacaggtaaattagcttggctagcgagatctgctagctaaatttggctagtgagagagtcaatttagagagccg

SEQ ID NO: 12411 - DNA, 1244 bp, Zea Mays
gccgaagccctgggtgcgctatccgcgaccgcgacgatgggtctgcgcgtggccgccaccgcgccagctccggccggcgtgcgcgtgctcggcagagtcatcggcaaagaggtgcaggcatcagcatctgttgtttgccaattgatggcagccgggcatctgattttggcctaatgaagatagacgacactggaagggtaatttcattcagtgagaaaccaaaaggagacgaattaaaggcaatgcaagttgacaccacagtgcttggcttatcaaaggaggaagcagaaaacaaaccttatatagcttcaatggggatctatatttttaagaaagacatactcctaaaccttctaagatggcgttttcccactgcaaatgattttggttctgaaataattcctgcttcagcaaaagaaatcgatgtaaaggcttatcttttcaatgattactgggaagatattggaactattaagtccttctttgaggcaaaccttgctcttgctgaacagcctccaaggttcagtttctacgatgctgacaaaccaatgtatacatcacggagaaacctaccaccatctatggtcaacaatagtaagatcactgattcaatcatttcccacggatgtttcttggataactgcaggatagaacatagtgttgttggagttcgttctcggataggctccaatgtgcacctcaaggatactgtaatgcttggcgctgattattatgaaactgccgtggaaagaggagagctgcttgcagaaggaaaagttcctattgggattggagagaatacaacgattcaaaagtgtatcatagacaagaatgcgaggatagggaagaaagtggtaatctccaactctgaaggtgtagatgaagctgatagaacttccgaaggcttctacattcgatctggcatcactgtcgtactgaagaacgcgataattgctgatggattggtcatatgagctgaaaaggtctcacaggacgggtatttgccgcacaaaatatcaataggagttctttgttagttttacaataagatgctgtatagcagtcaacaggttattcttgtctatacaagatacctttgtctacaaatcttgtctcaccatgttgtattcgactcaaacaatgttgcagtcatggacattgtccgtttcaaattttcttccttgcacatttacacaaaccttttcaatttttatttcttgctaaacaataaaagctgttgttct

SEQ ID NO: 12412 - DNA, 907 bp, Zea Mays
gaacggcaccgccgcggtgctcgtggacgccgccccggccggctgctgcacccccgcctcgccggcctcagcgtccatctccgaccaggacgagagcactgcagcacagcagggcggcgggtccgcacacgcgatggcgcgaagacgacggggtttccttccctcctcgagctcgaggtcgaggaccgaccgagaggctcggacggcgcggcgccgtgcgcaggggcagggctcgtcacgggcgcgctggtacttgctcagatggtgccgttcagcaccgcggaagacattttcgccctagctggtataggctttgccgcagtagctgcattatgggcttcggtcaacctcattgagatcatcgacaagctcccggtccttcctcttctctttgaactagtcgggatattggttgcatggcttttcatctacaacaatctcctcttcaagccaaaaaggaaagaatttctagagaacatcaaaagctcaggatctcgaatcctggggcagtaacctttgtaggcgacagttgacagcaaccactctgtcatgggttctctgcaagcatgccgaatgtaattatgcaatgtaactgtatgcgagctatgggtgttaacattttttattgtataagcatcaccaattttctgtacaggttagtgtgattaaaatcgttctcctagtaccaggacttggacttgtacgagcctaataagaacatacgcccgaatccttcctgaactgaatgcttcggctattgaatttcacgttcaagggcgaagggggtattttacatctaaaattatggaaaacaacgcaacaaagacgaaaaaggtgccaaagagattcagtaatcgccagcggttgtgaatgtggagatagttacgattatcttgtgggttagcaa

SEQ ID NO: 12413 - DNA, 76 bp, Zea Mays
ttggcacaggatttggtggccagccactggctagagctggcagtggcagatggtgctatcggctagagaagaagac

SEQ ID NO: 12414 - DNA, 2580 bp, Zea Mays
gtaccaccacacacagccccctgtgccctcctgccgtccgtgacgtgacgcagccgagccgcgcgcgcgctccgggccggacgcctccgctcgaatcgatggacgccgaggccggcgtcgccggcgccgaccagcttccgcggaggcagtactacctgaatctactgcttttagcttaccagagctttggtgttgtttacggggacctgagcacatcgcctctctacgtgtataaaagtacgttctctggaaagctcagacactaccaagacgaggagacagtgttcggcgtactttcgctcatcttttggaccttcactctgattcctttgcttaagtatgtcatcatcgtcttgagtgctgatgataacggcgaaggtggaccattcgctctctattcgctcctttgcaggcatgcaaaactcagcttgctgccaaatcaacaagcagctgatgaggagctatcttcatactatagaaatgggttcgcgcctcgcaatggatcttcaccttggtcaagaaggtttctggagaagcacaaaaaaatgaggactctgtttcttctcatagttctctgtggcgctagcatggtgattggtgatggtgtccttaccccagcaatctcagtactctcgtctatgtctggattacacgttcgagctactggtctacatcatagttctgtagttctcctttcatgcattgtgttggttggtctatttgcattgcaacaccgaggtactcagaaggttgcattcatgtttgcaccaattgtcatcatctggctgctttccattggaggaattggtttatacaacattcttcattggaacccaaatgtatatcaagctctctctccatattatatggttaagttctttagaaagacaggcagtgaggcaatgtttgctgaccttggtcactttacgagtgcatctgtcagggtggcttttattaccgtcatatacccatgccttatgctacaatatatgggtcatgctgcatttctgtcgaagaacacatttcacatgccgacaggtttttatgatactatcccagaaccagtgttttggcctgtctttgtggtggccacacttgctgctgttgttggtagccaagctgttatttcagcaacattctccattgtgaaacaatgccatgctttgggatgtttcccgcgagtgaaggttgtccacacatcgaggtggatctatgggcagatatatattccagaaataaattggattcttatggttctttgcgtcgctgtcactattgcatttcgtgatactactcttattggcaatgcctacggttcctcagggaggatgggtgcctcttgtgcttgcattcatattcatgtcagtcatgtacatctggcactatgggtcaaggaggaagtaccagtttgacctacagaacaaagtatcaatgagatccatcctatctctcggtccaagccttggcatagttcgggttcctggtgttggattgatttacacagagctggtcactggtgtaccctccatcttctcccattttgtcacgaatctccctgccttccatgaagttctagtctttctctgtgtgaagtcagtgccagtgccatatgtttcaccagatgagcgataccttgtgggtaggattggacctaaagaatatcggatgtaccgttgcattgttagatatggttacaaagatgtgcagagagatgatgacaattttgagaacatgttagttatgagcatcgcaaagtttattatgatggaagcagaagatgcttcttcagcaagttatgatatcgctaacgaaggaaggatggcggtcataacaaccactgatgcctctggcagcccattggccatgagggatttcgacggcctagctgactccatgtctacgaggagcagtaaatcagaaagccttcgaagtttgcaatcctcctacgagcaagaatccccgagtgtaaaccggcgccgccgtgtccgctttgaggtcccagaggaggatggcatgggtcagcaagtgaaagaagaactcacggcactagttgaagcgaaacatgctgggatcgcatacatcatgggggcattcttatatcaaagccaggaggaactcaaatttcctgaagaagtttgctattgatgttggttactctttcctccggaagaactgcagaggcccatcagtcacgctgcacattccacacattagtctgatagaagtcggcatgatctactatgtttagcttaaggcccattgccgaagctcacatgtggatacccggtcggggcaatgcttgtgctgtctgcggattgtggtgtggaaggagttcaggcttgttcgttctgggccaagtttcagcttgtagagaagaaggcagacttctttgttaatattatttttagcctaaataaaccagcacaatgttagacggtgatgtttctcatttggcatatttgcatgcatgctctgtaattttttctgcgagctatgtgatggaaatatatgcatcatctttataaactggtcagggttctactccttccgtttcaaaataatagttgttttacctcttga

SEQ ID NO: 12415 - DNA, 763 bp, Zea Mays
gcctgctcggtccctggtgtcagcgacggagacgtctcccgggctcggttatacacggcccggcggcccgcgggaaggcccagattaaaataaaaagagcagcggagcggagcatgctcttcattccttcactgccagtcttgcatcccgtccccgtccgcgccggccgacgccgccttttcgtccccgcgtcagcgtcgcggctccactgagcgtgcgtgtcaccggcgggaggcaagggcaggcggtggtggcgatggcgtccgctgacgcgcgcttggcggggatcgcctcctccatccgcgtcatccccgacttccccaagccagggatcatgttccaggacatcacgacgttgctgctcgatcccaaggcgttccgtgacaccatcgacctctttgtcgagcggtacaaggaccaagggatcaccgtggttgctggtgttgaagctagagggttcatttttggtcctcctatcgctttagccattggcgcaaaatttgtgcctttgaggaagccgaagaagttgccaggcgaggtgatctccgaagagtattctttggaatatggaactgacaagatagaaatgcatgtcggagctgtacaggccaacgaccgggctcttgtagtcgatgatcttattgctaccggtggaacactatgtgcagctgtcaaacttattgaacgtgttggagcaaaggttgttgagtgtgcttgtgtcattgaattgccagaactgaaggcccatggcaacttcaattgt

SEQ ID NO: 12416 - DNA, 1713 bp, Zea Mays
ggccaatggcgggccgccgagatcgttttgattcccccttcaccaaaagcggtgaataatgcaagttgagcggggacgccgtggaggggcgagggggagccagattgagccatggcctcctcctgggttcttgccctggttcttgcgctgtcggcaggcgcaagcctggcgcgtggctcagagccgtggtggaacgagacacaggtgtacgccaccaccgccaactccggtggcggcaacggcgtcttcgtcggcctcacgctcatccagtcggcggcggccaagggagcggtgtgcttggatggaagcttaccaggttaccacctccacagagggtttggatcaggagcaaacagttggctcgtcaatctcgagggtggaggctggtgcaatgatcgcagcagctgtgtgttccgcaagggcagtcgtcgtggatcatcaaatcacatggagaggcaactccagtttacagggatattgagtaacaaacctgaagagaatcccgatttctacaactggaatagagtgaaggtccggtactgtgatggtggatctttcactggtgatggctctgatgcggctgcaggcctttatttccgaggtcagcgcatttggcaggccgctatggatgacctaatggcccaaggaatgcgttatgctaatcaggcccttctttctggatgctctgccggtggtgtttctaccatacttcactgtgatgaattccatggattgtttccctcgaataccagagtcaaatgcctagctgatgctggaatgtttcttgacactgttgatgtttctggccgtcgggaaatgagatcctttttcaatggcattgtgagattgcagggttctggaagaagcttgcctaggtcttgcacctcacacatggacaaaacctcgtgctttttcccccagaatgtgttgccaaccatccgaaccccaacttttgttttgaacactgcctatgacgtgtggcagcttcaacaaagtgtggcccctagaacagctgatccccaaggtctttggtcaaagtgtaggacgaaccatgccttctgtaatagcaaccagctccagtttttgcaagggttcaggaaccagatgcttgatgccgtgaggggtttctctgcatcaaggcaaaatggtctgttcatcaactcatgttttgctcattgccagagcgagagacaggatacttggtacgcgaacaactcgccacgtcttggtaacaagaaaatcgctgacgctgttggggactggttcttcgagagggggaacgccaagtacacagactgcccatacccttgcgatggcacttgccatcaccttgtgttcaggggagaccactaagatcattcttcagcaccaacaaattcatcagatggtacaaggatcaaaccccaatgggtacagaatggaaaacaggatatagatacagataaggtgcaagtggtcggcttgcccatgtttgttcatcagtgagtcatatgattgatagtgcgaggacctcacccgcgaacgcgcggaggaggcctctgcattagattcacataccgtcatgatatcgattattttcattggaaaagcgtccatgattacgtaccagaacaattgagttacatactcatttcgtgtactgtattaataacactagaacgttacatattcatttgtcctgaagatcgtactacttggcatgagtactcactt

SEQ ID NO: 12417 - DNA, 2074 bp, Zea Mays
agtaaggattccgcaaaagtatggctcccttttcccttgattgatgcggggatttgtcaggaactaggtgtgcttcagctatgcagttcagcagcgtgcttcccctagagggaaaagcgtgtatgagcccagtgaggagaggcagtggaggttatgggagtgagaggatgaggatcaactgctgcagcatcaggcgcaacaaggcactgaggaggatgtgtttcagtgcaaggggtgctgtgagcagcacgcagtgtgtgctcacatcagatgctggcccagacactcttgtcgtccgaacatcctttcggaggaattatgctgatcctaatgaagtcgctgccgtcattttgggtggtggtaccgggactcagcttttccctctcacaagcacaagggccacccctgctgttcctattggaggatgttacaggcttattgatatccccatgagcaactgtttcaacagtggcataaacaagatatttgttatgactcagttcaactcagcttctcttaaccgtcacattcatcgtacctatcttggtggggggatcaacttcactgatggatctgttgaggtgctggctgcaacacaaatgcctggggaggctgctggttggttccagggcacagcagacgccgttagaaaatttatctgggtacttgaggattattacaagcataaagctatagaacacattttgattttgtcaggagatcaactctatcgtatggattacatggagcttgtgcagaaacatgtcgatgacaatgcagacataactttatcatgcgctcctgttggagagagtcgagcatctgactatggattagttaagttcgatagttcaggccgtgtaattcagttctctgagaaaccaaagggtgctgccttggaagaaatgaaagtggataccagcttcctcaatttcgccattgattccccagctgaatatccctatatcgcttcaatgggagtttacgtttttaagagagatgttttgttagaccttctaaagtcacggtatgctgaactgcatgactttggttctgaaattctgcccaaggctttgcatgagcacaatgtacaggcatatgttttcactgactactgggaggacattggaacaatcagatctttctttgatgcaaacatggccctctgcgagcagcctccaaagttcgagttttacgatccgaaaacaccattcttcacttcccctcggtacttgccaccaacgaagtcggataagtgcaggattaaagacgcgatcatttcacacggctgcttcttgcgtgagtgtgccatcgagcactctattgttggtgttcgctcacgcctaaactctggatgcgagctcaagaataccatgatgatgggtgcggatttgtatgagaccgaagacgagatctcaaggctactggcagagggcaaggtgcccattggcgtaggggagaacacgaagataagcaactgcatcatcgacatgaatgccagggttggaaggaacgtctccataacaaacaaagagggcgtccaagaagccgaccggccggacgaaggatactacatccggtctgggatcgtggtagtcctgaagaacgcaaccatcaaggacggcaccgtcatatagagactaactttggccttacgcatggcgtgcaaggttacaggttagtcatcgtcttgagagttgagacttagtttgaggcgcgcgcccgaccttgacttgagccgtcggagggacaagaacatgaggaagaagggctggtggtgccggatgttgccatggacgacgagaaatggtttggtgcggtcgcatcggttccagtagctagctcttccgatgttattaatatatgtatctagtggagtagtgcgaacagtgcaataagctgggcgagcaaagccgcggcaactcttggcttggggattgttggtgcatcttgtaaataataaactcggacgcagcaaatgaaacatgcccctcatcttcttccatatcttcgcaccgtatgccttgccctgtctttatatgagacgatggtgtaggcatgatgacacgtctgg

SEQ ID NO: 12418 - DNA, 96 bp, Zea Mays
gttattactcgatcacatagacatgcttcttttattgaacatcacttttttgtttcttgtgttgagcctacttgtatagatgaggcgctacaggat

SEQ ID NO: 12419 - DNA, 3044 bp, Zea Mays
agcagcagcaagcaggccagcagcagcagcagcaagcagcagagcgcgccctgttcttgtgccgaggaattatttattgccaccgcatcgagatttatatagttcgatttggttctgatagcgaatggccggaaggagaagtttgcatctggtttgctgaaaccgttcgtcgctcacttgaaggccgcccaggatcagattgccaagggagggtactcgatcacacttgaaccaagctcagggttcgatgtgccatggtttacgagaggcaccgtggagagatttgtgcgtttcgtgagtactccggaggtccttgagcgagtcagaacactggagtctgagatcctgcagctcgaggatgccattgctatccagagcaacgatagtcttggattaaaatctgtcgaagaccatggaagaaagttgactgaaagcaatggaggtggacgtgcaaattatgatcctgattcagccacagcaattgttgtctacaagcctggatcaaatccaacgccacaaattcagaatgaaacagcagcacatgaggagaattcaaaagttcaattgctcagagtgcttgaaacccgcaaaactatgttaagaaaagagcaggctatggctttcgctcgtgctgtagctgctgggtttgacattgacaacttgggttacttgatcgcatttgcagagcgctttggtgctgcacgtctgatgaaggcatgttcacatttcatcgaactgtggaagcagaagcatgaaactggacaatggattgaagttgaacctgaagcaatgtctacacgctctgaatttcctccatttaacgcatctggcattgtgttcatgggagacaacatgaagccaaacttggaatcaggctccattaatggagaggcaaatggcgaggatggagctaaagctgatcagaagtccagccagcagatgggatctcatgctgcatatcctccatgggcaatgcatcctccatctggtgcagttgtttacccaccttatcctatgcaaggcatgcctttttatcctggggtgaatccatactaccctccatatcctccagtggatgatcccaggtaccactactcaggaaggaaatcttcgaggaagcactcctcggatagtaaggactcagaaactcttgacgttgaaagtgaccattgcagttcagatagaggaagttctcatggtcgcaagtcacatagaaaggggaagaggtccggaaagaaaaaacctagtgtggttgttatcaagaatgtgaatgtaacatctaaaaagcatggctcatcagagagcgaatcacaatcaagttctgaagttgagtctgcggacagtgacaattcacactccaaatcaagtgaaaggaagcataaaagctcaagttcaaagaaaaaggagggtaggagaactacttttgcctccggagatgaatatagcaaggatgaaatgtcaaatggccacgatgctgagcaaggaaactggagcgcattccaaaatttcttgttgagagcagaagaaaaaacaagatctagtgatgcagacctgtttgctggtgagaaagaacccccatcaaggagaaaacagaatgtaaacacagcagatcctattcttttagctgagagagatggtggcattgtccatgagcggaacatagtaggttttgattcagccaatgggaggactagagctatccgggtcatgtccaatgatgaacttgttatgtctggagaagggaggaactatatgcatagtgaaataaaggagattgaagctggtggaggaaggtacaggagagggacaggtgatgactacatggtttatggtcagggaagtcagatagccagacatagtttgttggatcctcttgcagaggcccagtacaagaatcctgttcagcaggacaagaataggaatggtgtggcggacgagtcctttatgatccctcttaggtccagcttacatgataatatcggagcagaaagcagaactactattgacatagatgttgagcttccttctagaattcataaagcatcagatgaaaaggctggacatcagcttttttacgaacctgacgaattggtgccagagcgtggatctgaagatgtttcatttggatatgatccagcaatggattatgatagccacatgcagactactgtgaaggtggaagatgaaaaaacagaggatgacttgccagttgctgacaatgatgtacagaaggtagagaaagagaagctaaggaatgcaaaggatggttcagataaacgaaggaaagatgccttattgaggaggttatcggcgccaaggaccccactgaatgatgcacaaaaacgtgcacagaacctgcgtgcatataaggcagaccttcagaaactgaagaaagaacaggaagaagagcaaataaagcgattggagaggctcaaattggagcggcaaaagaggatcgccgcaagaggtaatggaaagggtccagggaatggttctcctaaagcgaatggtacgaatggactcagtaaatcagttccaaccttcactgggttgaaaaaggagaaaaatggaacaactgaatcactcagcgatcgactgaagaggctttctgaacccaaaagcattgctggggcagagcattccttgaatccaaagtcaactggcgcagaccattcacgaagaagaagcatggcgtgagacggagaaccgagcatcttgaatccatcgtaccactcgctagctcagcaaccatgaatggcatatcaaaaggcttcttgtacagaaagaggaaatggctggcgctgtagcactgcctgcttccaagatttgtgatggaaaatcaagttaccttttcaatggcatggcgttgtacttccaattttaacataattatttcattcttttattgaggatggcttgtaatagctgtaaacctggatttttcggcgacgcggagctatattttggtttttggctgtatttatggaatggattgatcgttgtttgagatatattgtggtatttatacagtgtataaatgtcaa

SEQ ID NO: 12420 - DNA, 1721 bp, Zea Mays
agctgaccttgtagagctgactatcggattcacggaccaatcctcgtcttctcccaattctcattgcatcgaatcgggctcgatgctgcccctctccctcttcgtttccctcttggtgctccatctcccccacgcatccgccgacggcgacatctgcatcatcggcggtggcatctccggcgcctccaccgccttcttcctcaccagctacaccagcaccctcggtggagcgcagctgcgcgtttttgagcgccgtcagaaggtgggcggccgcctgggcaccgtcactctcgcgggcgacagcttcgaggccgggggctccatcatccacccccgcaacctccacgcgcgccgcttcgccgacctcctgggactcgccgtgaagaccggcggcgacgactggctagggatctgggacggcaaaagcttcgtcttccagacggcccgcccacctcctgtcggcagctcctggtggcggcgcaagctgcacagtctcgtcaactcgctgctgctgctcaggcgatatggtctgtccctgctaaagatggacaagtttgtccaggaaatgttgcggcggtttatgctcttctacaatggcatggagtctcgccctgtgtttgccacggttgaggagatgctccaatggacgggtctctatggcctcacccgcaggacccttgaggaggagctgctggatgccggcctcaacacccgaacgatagcagagcttgtcactgttatcacaaggatcaactatgggcaaagcacacacataagtggcctggcaggcgccgtgtccttagctggatctgagtcaggattatgggctgtcaaagggggcaactggcagctagctgccggattgctcaagacctctaatgctaccttgcatcttcaagaaggcatagactccatcactgatgccggggatcactacgttctgagatccaatagtgggagcgaatacgagtgtatggtgacggtggtggcaaccccactcgacgagctgaacattacgtttagccctccaatctccattccgccgaggaagatgcagcacacacatgcgacctttgtgagaggcatattgaacccgggatattttggtctgaactcggcatcagatattccagagctgattggtaccctagagctccctgatatccctttctcctgcatctctgttctgaagaggtacagcgaaggcgacatggcggcgtacaagatgttttcacgggcaaagctggatgatggtttgctggatcagatcttcagggctcggatagagacgatccggatcaactgggctgcttacccgcactaccaagccccagaggagtttgctccgatagtgttggacgggaagcagctgtactacgtgaacacctttgagagcgccgcgagcgccatagagacgggtgctgtagcagcagagaacgtggcgcggctcatcatctccaggctctctctactaccgcaggcacagcagcagcagcctcatatcatcaagtcattcgccgaacaagaatcccagcgtcgccatgtagacctgtgaaatgttgtaatggcattgtagccagttttatcccagctagcattttggtacatttatttatgtatttgaccaatggtttggtttgtaaatggatgatatagttagtaattgttagcgccgatctagatgtctagacgtcgatcattgcgatgagtatcggcgatgg

SEQ ID NO: 12421 - DNA, 1537 bp, Zea Mays
cgcgtctccgcccttccctcctccccaccatcttcagcacgaggcagcacgcgcggacgtccctcccgacacggagaaccccgctccgcgcgctcgcattcgtcgcgccgccacccaggtcccagccggccgcgcgcccgcgcccccccgccgccggccgtgccatgccgcggcggggcgagacggcggtggtccccattgacgtggcgtccgccggcggcgggcgaggcgatgagcggcccaagagagagcgccaccggagtcacggccccggccgccacggtccgcaccggagtcgcccgccgcccccgcccccgccggcgttccggccgttccggcggtggttcccgttccttgtgccgctattcatcgtcgccaacatcgtcctcttcgtgctcaccatgtacgtcaacgactgccccgcgcacgcgcgggccaccggcgccgcgataggcggatcggtcggcgagagcgccaccgcgcagggctgctggctcgcgcccgagctcgggaggttcgcgttccagtcgttcaaggagaacccgctcatcggcccttcctccgccacgctgttggaaatgggggcactggaaaccagtaaagttaccaaagatcacgaagggtggcgcctcattacatgcatttggttgcatgctggagtcgtccacatactcgccaacatgttgagcctcttaatgatcggaatcaggctcgagaaggaatttggtttcataaggattggtacactgtatgtgatctctggtgttggtggcagcttgctgtcttctctatttatggtgtcaaatatatcagtcggtgcttcaggtgcattatttggactattgggctcaatgctgtcagagctcataacaaattggacgatatatgagaacaagtttgcagcactcttgactctagttatgatcattctcatcaacttagctgttgggatccttccacatgttgacaacttcgctcaccttggaggatttatgtcagggttctgtcttggttttgtgctgctaatgcgaccacagtttggatatattaaccaaaagaactctcctcttggatttcccatgggcgtaactaaacggaagttcaagacatatcaagtcatacttttggttatttctacaatgatactagtttctgggttcaccattggattggtgttgctatttcaagggttcaatgctagtgagcactgttcttggtgccattatatgagctgtgtgcctacttcaaagtggagttgcaacgcaccaaataactactgtatgtcttcacagctcggaaaccaactaaatctgacatgtgaaagcactggaaagaccgcatcatatgttctcagcgatccaaacaactcggaggcgattaaaaatctttgtgtcggtctttgcagttaatagtaatgtctgcattttctaacaggaaattaatgctagcatatctatggattatatgactagaagcctatgcttacattatgattctctgtcaagggatgtaaatgctacaggagctgacggaatga

SEQ ID NO: 12422 - DNA, 2731 bp, Zea Mays
cggaaggcagggcagggcgctattcgtctgtctttctcttttttcagctcagatacttttcatgaagtcagaagaaagcgggataggaaaaaggagactaaagttaatcacgaaacaaggcctcgacctttccagaaatatacataccgaggatataaggctgtttcagatcgaagtgggcgagaccctacaggcggtttcaaaggccctgtaaaaaaggaaccagagatgcaagctccactaaactcatcagccttggatgtcaagacaagtgacactacagaaatattttctgctactatcaatgttgcccagactgatgctaagaacaccacttctcagcctttatctaaagtgcagcatggttggggtggtattccaggtcgcccttccatggctgaaatagtgaagatgggcaggcctcaagctaaagttgggagcagatctgttgcaagtagcactgcgttgccaaccgttggtgattcagtcatttccaatacaccaaatcttgtgcctgaggaatataacagaactgtttttgcatcagaagcaggccatgtcgcagcagataaattgccaaacggtgctgttgaggtgcactctctacctaaagatgcttccgcatttgatatgttaccttcagctgagggaacagatgttgaagccccttccatgagtgctaatgcacaagggtcatcaacgccagatgccaatgaagatgacattgaaaaatatgcaaatttggaagagggcaatacagaaagcttgatatctcctggacaagtttctgcttctggtaaagatatacaatcagaatatactgaagttgtcagccatgtggatgaaggctcgatagagaaaacaaatgactttcagctcaatggccttccatttgagcacaaccaaaatctgaatggagacgtgtctacagcgacaacacaatttgatcatttgactctgcatgagggaccaaaattgtccgatgataatccggctgtaataattcctgatcatcttcaggtttcgaatgctgattgtgcgcatttgacgtttggtagttttgtgtctggaacacttgattcatccttgacaacaaaacctcttgaaagtcatggggatgctgcggcagttcctgatgatgattcaattgaccaatcagatggcaggatccatgacgatgaaggcaaggtgactttagctactgatgttaatgaatatgttacttctgcggcaaacagcaacgaggagaatcttgatattacatcagtacagcaatctgaagtcactagagctgatttcttggatgtcacaagcaatactgaatacaacctaacatcaactccagattatgcaacttcaagtgcaccgttgcaagattctgcttcacagagtttacaggaaaaccgacaattccagaacatctctcctttctcaagcttcatgcaaatgcaaaatggtctcctgccaccagcaattccaccattgcgtgaatttgatccagcattttcactattgctcacccatcctcctatgatgcatggtacaatgtcatcatccatgagcaatacaactgtttctacgcagccccaagagaatgccaatccagttggtttacccaaccctcaattgactcaatctcagcaaagcaccagcattgcttcagggcctccactccctcagcatcttcttcatccctatgctcaaccaacccttcctcttggctacgcaagcatgattggctatccatctcttccaccaagctatgcatatctcccgcctgccgcttttcagcaaccatacatgaacagtggcttgttccaccaggcagcagcggcagttcccacctcaagtgtgaaataccctctaccgcagtacaaaagcaacattgcccttgctagcttaccacagccaggctctttgctctcaagctacgttgggggctttggaactgcaagcaacatgcctggaaatttccctctgaatcaaagcacagcagcagcaacaacaactcttgggtttgatgggacggtcccttcacatttcaaagatggaaatcaatttatttctcttcagcagaatgagaaccctgcaatgtggatgcatggtgctagttcacgagggatgcccccacttgcagccagtaccatgtatggctatcaagggcagagtcatcaggccggccttcggcagggccaactaccttcacaatttggctctgcgcttgggcagtcacagccaggcctgggccctgaacaccgaaaccctagcgatagtaacctaagtggcgctgctcaggctaaccaaatgtggccaaatacctactgatccatcccccttgtcgacttctgtggaaggcggtcctgttgtgtgtgcaacgccggtgaggccatgcagtgcttgtgttctgatccaggcacgcggataccagctgtgcctgtgcgcatgagtcgctgtcgtgacattttgaggcacaagagacatatgttcgagcatgctctacctgtagggtttctaggatatggcaaaagaaaatgtagctcgatctatttattcaaattctgatagagaaaggacttcctcttttctattttattctcttttgtcattcacatatcatgtgacaaataaaaccgaaatatctaacagcagcgccattagttcccgaggaagtgaaactttacatcacaggtattgcgtgcctcttggcttcaattttatgattgaggtgatt

SEQ ID NO: 12423 - DNA, 604 bp, Zea Mays
atgacacacgcgcactcgaccacatcggctccagcacgttctagaagcctgatcgcagcacagagtgtccctccggtcgcaaccaggtcgtcgatgaccagcacccgctcgccggatcgctcgatggccccgacacgcatctccaggcaatcagtcccgtactcgagaacgtacttctcggagatcacctcacctgggagcttccttggcttgcgcagaggtatgaacttagcgccaatagccagcgcgatcgccgggccgaacacgaagcccctggcctcaatcccttgcttggggaagtgcggcacgacgcggatggcgtcggaaatgccctgcagccgggggtcggccgcggcggcgggggctgcagccggctcgcggccgacctccttgcccaccggcttggcgttggtgccggcctccgtcaggctgacggcgtcgcagctggcctcctcgcccatcaattaattcctctttctctctctcccacgctcggctggctcgcttgctcggtccaaaacaagcttcctcctacgcctttgttgttgcttgctagactggtgactggtgagtggtgagcgagctagtattgaagcaagtgccg

SEQ ID NO: 12424 - DNA, 2379 bp, Zea Mays
ggtttgggtcggggccgtgctgtagcgatagagggtgtcgtccccactccccagcatctggttccacggagagttgttgatcttggatacctgatccgcaatttggggctgattgagtcacttgaccttttcaacatctgccccgttcctgctgccttgctcactataagaggctggcctggttccagagatgattctattgtgagtggagatggattctgtgagaagttggttccagaagttccagccgagagacaaatcgaagaggccagtggtggctgccagacatggaaaagatccaggaaagcccccgatggacgatgccccttctagtgcgacgaaacagagggttgccgctgcaaaacagtacattgagaaccactacaagacccagatgaagtccctgcaagataggaaagagaggcgctggatgttggagagaaaattacaagatgccgaagttcctgtagaagagcaaaataacattcttaagcatttggagaaaaaagagactgaatatatgcgcttgcagagacacaagatgggagttgaagattttgaacttttgactattattgggagaggtgcattcggagaggtgcgtcttgtagagagaaggtctctaagaatgtttatgcaatgaaaaagctcaagaaatctgaaatgcttcgtaggggccaggtagaacatgtcaaagctgaaaggaaccttcttgctgaagttgatagtgcttacatagttaagctctattattctttccaagacgaagagttcttatatctcatcatggaataccttcctggtggagacatgatgactttacttatgcgcaaagacacactaacagaagatgaagctagattttatattgcagaaactgtgcttgccatcgagtctattcacaagcacaactatgttcatcgggatatcaaaccagataatcttttgttagatcacagtggtcacctgaagctttctgacttcggtttgtgtaaacctttggacagcagtaatttccctaatttgaatgaaccagattatatgtctggaaaagttaccacacctttgcctgataccactcggttaagcaacccttctgcaccgaggcgtacacagcaggagcaattgtcacactggcaaaagaaccgtcggatgttggcatactcaacagtcggtacacctgattatattgctccagaagtgctactgaagaaaggatatggaacggagtgtgactggtggtcccttggtgctattatgtatgaaatgctagttggttaccctccattttattcagaggacccaatgtctacttgcagaaagattgtgaactggagaagtcacttgaaattccctgaagaggcaaagcttcctcctgaagctaaggctctcatcagcaagcttttgtgtaatgttgagcatcgacttggtacaaaaggagcccatgaaataaaagcgcatccatggttcggaggtgttcagtgggagaagttgtatcagatgaaagctgctttcataccagaagttaatggagagttggatactcagaattttgagaatttcgaggagattggaactcaaattcaaagttcatccaagtcaggcccttggagaaagatgcttccatccaaagatgcaaactttgttgggtatacgtacaagaactttgaaattgtgaatgatgatgaagtggcaggaattgcagagttgaagaaaaagagttccaaaccaaagcgaccaaccatcaagacaatgtttgagaggatggacgaagaggagcctgttcaagggagtttcttaagtatgttgcccccggagggccaaccttcgtcccactccagcgttccacaggaaaaataccaacctcgccgtaaataggatatggaggtttggaaagtaaagcataggaaagtaaaacaagaaaaaaaatcgtctgctgccttttgatctgttccctgtctaggttttgtaaatcctaaccaatgcgttctttagtcaaatgcttaaaaaaatctctccggcaaaatagtgtattgcatttgatgtgaacatcagtgttcggctgtatattgtgtcaccgttctaacttcgaagtgatgcttctcagccatattggcaaaaacttgccataccaggagcaggcaagttgtgctgctgtgggcctgtggcaagcatgggctatgtgtatgacctttagatgtttctttggggtcatggttcataggagcttgatcaacttgcacttgtagcatactccctctatacccaaaagctcctatgaattgagggactgcattcttttcggacagattttgacttacctgggattaaaacccactcaatccctctcaattcatatggattggagttgaatcgaac

SEQ ID NO: 12425 - DNA, 2049 bp, Zea Mays
ttgggaggtgaaaccatgatttagattttagcatgtggatgatggcaagctctctgaaaggactatttctgatgaattgcctcaggaatcttcaaaggcagagcaagatgttagccgtcctgaacaagacggtacttgtatgaatggtaatacaggtactgctattagcagtggtgctaccctaccagatactagcgaatctgatcaaggaccaccaaaagagaagactgaacaaccttgctatgctgatgacataacagatactgatcagttgaaatctgaccacaatgaaggtgcggagttcgatactgcaaagcccgaaaagaaagctgccgttgattcagacaaaagtgctaagcttaaactgtccgataaatgtgaagcacctgtgcattctgatgctgacactaaaaaggaagcatctgcagagggtaccgatggagccgctgatgatacatcaacggctgctgattgtacacctaaaccaaagcgaggccgtcctcctggcccaaagtcatcgcagaagaaggctgctggaaaggatcaatcttcaggttcagatttgaaaaaggtcaatgaggcaggtgattcagccggaaagttggcgaaacgatcagcgaaggatgagaagtccacaaagaaggctggtgaaggagaatcatctaagaagacccaaaagtacaattcaaagcaacagaaggatgaaaacctatctgaggatcctgccaaggatctgagtttaaaggaaatgataacaccaaaatcttcgactaaggtcccaggtagaaccaaagggcaaagcacagagaatagcacacctaaaatgaagcaagaacaagaaactgaagagcctcctcgttcaaggaaaagcaaaggacttgataaaagtctagttggtgcaaggatcaaagtttggtggccagatgataagatgttctacaatggtgttgtggagtcatttgattctgtttctaagaggcacaaggtcgcatatgatgatggggacgtagaggtactactgttgagggatgaaaagtgggaattcatcagtgaggtatgcacatttttactcatgataattttataatttcgtactgattccttagtttctgattaacttttactctgacaggagaagggagcttctgtggcatctgaaacgccaggaggcagaaaaagaaaagctgatgcagtgaaggaagaaaatacagagacacctaaaagtgatgctgttgatcatccaaagaaaagaggacgtccaaaaggtgtaagatccagcaatggcacacctagtaactcagctactccgagcacaaaggggaaaactgccggcaagaataccaaagaaacaccaaaaactggccccaatcttataaaggaactcgagaagagctccaaggacaaagctagtgtatcaactgagacaaaggatgaattgcctaaagatgacaggagtgcaagcagacctaaggaggctattagcaaaggcaaggattcaaaagacgaaggcaagtccactgaaggaaaagctaggccaggtcggaaactaaaaaatgctggtactcctgcgggtgacgctgacaaagagaaggggaaggagaaagaagttaaggcagctgaaatagagcaggaggcaccaggaaacgcttctacaggaaagaagcgcagaaggaaggcttgaagctaacactgatggaacttcttttgtaaatggatgtgcaccttgtattattgagtgttaactcgaaatttcgtcagtttggtctctgatagttaggtgtggaagcaacatttgctatagctgtaatgctaggattaacatgtgttcattgtggtcagatgcatggtgcattggtgttgagctttgagcggaatcaacccaatgctcgctgtgaggcccatggcatcgtgttgtctggtggtgttgtagcttattgatgttctatttattataagcaatttaagcagtggattttgtagcaaatgcaccttttcggctaggatgttggcctggtttttaagttgggcacggatctcataggcccttcg

SEQ ID NO: 12426 - DNA, 1294 bp, Zea Mays
gaacccgggaaaacaagccgtcggttctactcccggaaggtgtcgccaaaggtctcctccagcacctacaacatagcgcaggtttcatatgagctgaatgtcttgggtactcggggccctaggcggatgaactgtgttatgcactccatccctacctcgtgccttgaggctggtggcactgttcccagccagctggacagcatccttgctcgctctactgatgagtcatttggcagcatttccttctccaagtcatctgttgtggaccggtctatgcgtttcagcagctcaagattctccgacatctcaatgagcagcagccgcaggattggagacacggcatcgggagacaatgatgagtgcaaggagaggccattgattctccggaacaaggccccaaggtggcacgagcagctgcagtgctggtgcctcaatttcaggggcagggtgacagtcgcatctgtgaagaacttccagctcgttgctgccacgcagcccgctgctggagcaccaaccccatcacaggctaccccagtgccgcccgagcacgagaaggtgatcctgcaatttgggaaggtggctaaggacatgttcaccatggactaccgttacccactgtcagccttccaggccttcgcgatctgcctgagcagcttcgacaccaagctggcctgcgaatgaagccaccagtcatggctcaaagtcaaggacgatctgtctgtttcacgaagacggtggccccaaattttgctgggccaccattctgttgtatgttgttgatgccttcttaacttacctaggaagctgcgtttagacattttgcacctgatctacagctgctgctgtgtttctgtcctgatcgcattgttttccatagctttgctctgtggagcggcaacttgatctgccctgcccttaactagccggcaggtttattaatttggttttccatactatggttgtattaactgagaagagactccgacactttcgttgtgcctacctaagttctgtctgcctttgccctctgggatatgcaaatgtgcatcttgtaaaatttctgaattgcttttgtggcaagtcatagtaataaaagaactagcttccattcgattgcctgtttgggtacgtgttcctccaagtgaccactggccactgcaagcggcaacgccggcgaggtttttttcttgtttaaagtgcatgttttttttttgaattattatgtgcatgcttgtgctcgtaaaggcaagtgcttgcgaccttgcgtgtttgtgttctacaaaagaaaaaaaaa

SEQ ID NO: 12427 - DNA, 2900 bp, Zea Mays
ctatttaggtacgaaaccgagcaccagaaccctagcttaatctatttagttactgggtcacgcatgtcgtctgctgctgcggtggacgagatggagctggacggcattgagcggcaccgggataaggagaggagggagaggcataggagggaggagaaggatcacaatggcagtggaagaagggacagggagaaagagaaggacgaccggagaagggacaaggatgatggcaagcatagggatagggatagagatagggagagagacagggataaggatagcaagtacagagaccgggataaggagccagagcgtgaacgtaaccgtgaccgtgaccggggcaaagatcgggagcgggaaccagatcggcagcgtgacaaggaccgtagcaaagaccgggataaagaagcagagcgtgataaggaaagggagcggagggacagggataaggagagaagccgcaatagagacaaggacaaggataggacgcagagggaggatagggatcacgagaagtcaagggtgaagggtcgtggagaagacgaagcagatttatccaagggcgacaagggggttcagaagcagagagttgatgcctcaggggatgctgagcagcccgcagcagatgagctcagagagcgcattgcaagggcaaaggaggaaagattgaaggagaaaaaggaaggagggatactggatggtaatgacggggcttctgagatactgtcttgggtgggaaagagtcgtaaacttgatgaaaaaagacaagctgaaaaggagaaagcattacgtcttgcacgagcactggaagaacaggataatatcttggcagaaaatggcgatgacgatgatgacgataaagaggaagatacacaagtgggagatcacttatctggtgtcaaggtgcttcatggccttgataaggttttggaaggtggtgcagttgtcatgactctcaaagatcagagtattcttgccaatggggatatcaatgaagacgctgacatgcttgagaacattgagattggtgagcagaaacaaagagatgaagcttataaggcttcaaagaagaaaggaacttatgatgacaagttcaacaatgattcatcgtcaaaaaagtcgatactgtcacattatgatgaccaaatggaagatgagggcgtgacccttgatgaaggtggacgtttcactggtgaagcagaaaagaagctggaagagcttcggaaaaggattgaaggtggttatgttcagaaaaagacagaagaccttacttccaccacaaagatatcaacagactattttacccctgatgaaatgcttaaatttaaaaaaccaaagaaaaagaaatccctgaggaagaaggagaagctggatctggatgcacttgaggcagaagcaattgcttctggattgggggccgctgatcgtgggtcgaggaatgatggaaagagacagtctgctagggaggaagaacaagcggctgatgctgaaaagagaagcagtggttatcaaactgccattgcaaaggctgaagaggcatcaagagcattgcgcggggagaaaactgcacctgctaaaccagctgaagaacttgttttcggtgatgattatgaagatctgcagaaatctctagagcaagcaagaaagttggccctaaggaagcaggaagaggcttcagcttctggtcctcgttccatagtcgaactggctactgcaaccaagagccaagaggaaacagaagccacagaaggagattcagaacagaataaggttgttatcacagagatggaggaatttgtgtggggactgcaattgaatcaaggaacacgcaagccagaagacgatgtgtttatggatgaagatgatgatgccatgccttcagataatgttgcaaaagatgacactaatgggttggcagagatggaagaggatgctctgacagaaataccagccaaggtcgaagaggatgaagtcaaaccagatgaggttatacatgaagttgcagtaggaaagggtttagctggtgctttaaagattcttaaggagcgaggaagcctcaacgagggaacagattggggaggcagaacaacagacaagaaaaagagcaagcttataggtgtcgaggatggacctaaagacattcgcattgaaagaatagatgaatttggcagagtgatgacacctaaggaggcattccgtcatctttcgcacaagtttcatggcaaggggcctggtaaaatgaaacaagaaaaacgccagaagaaatatcatgatgagctgaaaaccaagcatatgaaatcttctgacacaccattattggccgcggaaaagatgagagaggctcaatctcgtaatcaaacaccatacctcattttaagtggcaatgcaaaaacaggtcaaacaagtgatagcggcggctatgctaccttggagacagagcaacctgggagcctaacgcccatgcttggggacaaaaaggtcgagcattttttgggcatcaaacgaagtgccaagcctggaagcttacctcctccagtcccaaagaaaccgaagaactgaacctggtggtagcactcagccaacgaagcaggctacaacgcatttactgtgagcagcaatcagcccacaagcttccacggctcaaccccccgccgccgcactagaaatgcaatatcctctgtatttcttctaagctgattacactaacattctggcatgttcgatggggttttgtaattcagtgatatacgtgtgcatccttgatctgccttgaacatgtaagtgatggaactaaatattgttctaacgacacaccgtttccgtttgaataaagtgtagttatgatgtgacggtttaaggttaaagcagctgtgttcaagagctacattcgttctgaaaat

SEQ ID NO: 12428 - DNA, 1643 bp, Zea Mays
tttttttttttaacactgcaaagtataagatagactctgttgagtttgaatcacttactttgggtagcttaccacccacctttcaagggatgaaagtctatgtcacagaggagcaagagctgataatggaaccatctcttaaatgggctgcaaacccaaatattactgttgctgtaaaagcctatggtttgaaagctactatccagattgtggatctacaagtctttgcatcacctcgcattactctgaagccattggtgcctacatttccttgctttgcaaaaatccttgtctcactcatggagaagccacatgttgactttgggctaaaacttcttggagcagatgtaatggctattcctggtctttacagatttgttcaggagaccatcaagaaacaagtagcaagcatgtatttgtggccgaagacactagaagtacctataatggatccctcaaaagcatcaaaaaggcctgttggaattctacttgtgaaggttgtgagagcccaaaatctgcggaagaaggatctgctgggtaaatctgacccatacgtgaaacttaagatgtcagatgataaacttccatccaagaagacaactgtaaagcgcagcaatctcaatccagagtggggtgaagacttcaagtttgttgtgacagatccagaaaaccaggctcttgaagttaatgtcttcgactgggaacaggttgggaaacatgaaaagatgggaatgaacatgatcccacttagagaactcctaccagaggggactaaagttactaccctcaacttgcttaagaccatggacccaaacgatgtacaaaatgagaagtctcgtggtgagcttactctagagctcacatacaagcctttcaaggaagaagatatagagaaagaagatacacagggtgctgatgtgatagagaaagctccagatggcactccagctggtggtggcttgctttatgttgttgttcatgaagcccaagatcttgaggggaagcaccatacaaacccatatgcaaaaataattttcaaaggcgaggagaagaaaactaaggtcatcaagaagaatagggatccaagatgggaggatgagtttgagttcgtgtgtgaggagcctcctgtgaatgataaactgcatgttgaagtcataagtaaagccccgaaggcagggctgatacatggcaaggaaactttgggctatattgatattagccttgcagacgtgatcagcaacaagcggattaatgaaaagtaccatctcatagactcgaaaaatggtcagatccagatcgagttgcagtggagaacttcctagacaggaaggagccagaatgccttgatgttcctctattcagtttgcgtatatctgtgattgagattgaggtcatgtagatatttcttttttttatagacatctgttgttcggatcttctcttaatcgatcaagtttccgacaagaactatgcagacatgttacagaccctgagaatggaactgaacaaatgacacgtcatacaattacactcggcattctggcatactgagaatttacaccatgctccaaatatatttcactgctatcttctaagagcatttagcgtgtgccgtgtggcatgcgtaccgaaatggttcgatg

SEQ ID NO: 12429 - DNA, 72 bp, Zea Mays
cgcgtgcacgacagctaaatctctaggtacgttctaccctagtcaattgtgttttagagcttacgcttgggg

SEQ ID NO: 12430 - DNA, 1292 bp, Zea Mays
ctccctttctgctgcccagccgccgtccgtccgcgcttcactatccttcattccctcccctgtcagcgacgactgggtaggctaccgccgccgccctacgctaggtgcccatctcttcgccggcgaagagcgcccaccaagctccggccaagggcgtgatggcggctgtaggcagcttgaagccggggatggagactcttcatgtgcaggactacaaggacgcgcctccggccaaggccgcggtagagagcctccagccggcgatggagagtctgcatgtgcaggattacaaggacgcgcctccggccaagggcgtggccgccgccgccgtagggagcttgcagccgggggcggagaacctgcaggtgcaggactacaaggacggtaacatgtattatggtgcttacccggcttatgcctatggagcctatggtggctggggggagtacccatacctgagccatgatggagcacagacaccaactgctgtgaagcttgagcaaggccttcaagtgcttaagattttcaaggatcatgtctgcaagacatccatactggatgacttcggcttttatgataatcgtgagaagatgatgcaagagaggaaagccaaacagcagcagtcgctgaaaaaggtcattgatgtgaagctgcccagcgtcaccgacatggagagaagtcctaaaggggagactggatcaacagaactcactggggttgggactgacgtcttgaacaaagagcgtttattaggcaaagcaggagagaaaaatggcgagaaaggaaatgatgtcgccccacaggacctgaaaacacaaactgagaagttggcgggtctaaatggctgttaatatttttcgttagctcaagccgttgacagtggtgtcggggtggaacctaaggctgtggtgggttgtttgaggaaattctgatgtcccattgagcttgtttcctatagttcataggagctagaggcttagctagttgcttgtgtttggtggtagtcatggtctgtgttctggcgtgtcaggtattttaggaatagaaggatgattaactgggttttgcaatgatggatcatgggttttgaggctgtatttttcgtttatttgcctttcctctctggattctagttcctctctctctctctctctagattctggacaagtgtagtgcttattttaagttggttggtttaagaacctgaaatgaacatgggaattctatcaagcatttacaaacttactttcctctgtacaatatgtgaaaaccgtctacttccatactttctg

SEQ ID NO: 12431 - DNA, 1614 bp, Zea Mays
cctaacaaaatctctccttagtttccccaacctgcttctgtttaccgaattcctaaatccaatccccttgccaagctctctctttgctgcgggaggtcgaggccggagaggtcttctgggatgggatcaagaaaggggtggttccccgtggccctcctgctgttggccgactctgccctctggccgccggtcgccgccgccgccgccggaggcggcgaggccgaacacgccgttcagcagcatagcgagcgcatctcagggagtgctggtgatgtgttagaagataatcctgtgggtaggttgaaggtcttcatttatgacttaccaaggaagtacaacaagaagatggtcaccaaggattcacggtgcctcagtcacatgtttgctgctgaaattttcatgcatcgtttcttgctctcgagtgctgtccggacactaaatcccaaggaagctgattggttctatacaccagtttacactacttgcgatttaactaacgctggactgcccttgccgtttaagtcaccacgggtgatgaggagcgcgatccaatatatttcaaacaaatggcccttctggaataggactgatggagcagatcatttcttcgttgttccgcatgattttgcagcatgcttccactatcaggaagaaaaagctatcgagcgtggaattcttccattgctgcgacgtgctacattggtccaaacctttggacaggagaatcatgtttgcctgaaggagggttccatcattattccaccctatgctcctccgcagaaaatgcaagctcacttgatttccccagacactccacgctcaatcttcgtttacttccggggacttttttatgacacggggaatgaccccgagggcggatactatgcaagaggtgcgcgagcttcgctatgggagaacttcaagagcaaccctctgtttgacatttccacagaccaccctgccacttactatgaagacatgcagcgcgctgtcttctgcctgtgcccattgggctgggcaccgtggagccctaggttggttgaggctgtggtctttggctgcattccagtcatcatagctgatgacatcgtgcttccatttgcggacgcgatcccatgggaggaaatcggcgtctttgtcgaggagaaggatgtcccaaagcttgacacgatcctcacgtcgatgcctatagatgacatcttaaggaagcaaaggttactcgcaaatccatcgatgaagcaggcaatgttgttcccacagccagcgcaaccaagggacgcgttccaccaaatcttgaacggccttgctcggaagctcccgcacccagagggtacgttcttacaacctggcgatcagcgcctcaactggaccgctggtcctgtgggagatctgaagccgtggtagagaagaatagctatcttcttctttgataatccaagctttgccacgagcaccccttaggactaatgcacgcttcatgagatgttatgtaatcaatatgctgtgcgtgctttaggtgcaaaatacaccttggccgtgcttagtccttatgaacgccatgtaacttattgatttcccatggaaatgaaatggtatatttatcttgctaaaaac

SEQ ID NO: 12432 - DNA, 114 bp, Zea Mays
cttccatttatatttggagagatcgcatggtaataccattacatttcgccagggaaccggaagttcccctttgtttgcaggggaatacatacaattacgagtaaaagaaaatgg

SEQ ID NO: 12433 - DNA, 76 bp, Zea Mays
ggctgggatccaacaccgtgtcatctctggtaaagcctcttccaataggttctgcatctccttatcctctgttcgc

SEQ ID NO: 12434 - DNA, 88 bp, Zea Mays
ttccttgcatatcttgtaagtagttatattggcttaattccaagcaatctttacacttacattatgcaaactagttcaattatgcact

SEQ ID NO: 12435 - DNA, 912 bp, Zea Mays
tacgacggcactggattgtagaattattcggtgcggaggccccgttgaggatgatatggccaacatcattgtagcacaactgctctacctcgacgctattgatcccaataaggatatcattatgtatgtgaattcgccaggagggtcagtgacagctggaatggctatatttgatacaatgaagcatatcaggcctgatgtatccactgtttgtattggactagctgcaagcatgggagcttttctacttagtgctgggaccaaaggaaagcgatacagcttaccaaactcaaggataatgatccatcaacctcttggaggggcccaaggacaggagactgatcttgagattcaggccaatgagatgctgcaccacaaggcgaacttaaatggataccttgcataccacactgggcagcccctggataagatcaacgtagatactgaccgtgactacttcatgagcgcgaaagaagcaaaggagtatggccttattgatggagtaatcatgaatcccctcaaggcccttcaaccacttccagcttccagttagtcatgaagtgtgctagaactccgtcaaacatttttgttgtatcaatgtgtctgttggaagccctggctacgtaatattctacgtccaaatgcatcaaagattgtacaaaacaagatatgcggttaggatatccatccttggtgatggatattggaactaaattaacagtattagggcttggtttcctcgtctatgtactctatatggatgcctttttttataggaccgatgtctttctattttaggtcaacaggtgacggtaataactgtgtcttcattagggcatgtgcccccattaattaagggtttcttgagggatcaagtgagaaaaaaaaatcaagagatgattttccgtgtag

SEQ ID NO: 12436 - DNA, 496 bp, Zea Mays
atcgtcaaataattaaactaaaagaactggaagctgttggactccgtcttaacaaaaggcctccccaatatacttcaagaggaagaagacgggtgggatttctttcaataccactgttcctttgactcatattgatgagaagctgtgctatcagattctgcacgagtacaaaattcacaatgctgaggtgttattccgtgaagatgctactgtggatgatctcattgacgttatcgaagggaaccgaaagtacataaagtgcgtctacgtatataacaagatcgatgttgttggtatcgatgacgttgataatcttgctcggcaaccaaattcactagtgatcagctgcaatttgaagctgaacttggacagactacttgcgagaatgtgggaggagatgggcctagtgagggtgtatacaaagccacagggccagcagcctgatttcacagaccccgttgttctttccaccgctgggtgacacctgtttcttgtg

SEQ ID NO: 12437 - DNA, 965 bp, Zea Mays
accaactcgccacaaatgtagggttttctgtccgcgccaccgctcctcgacccccgcccaacactcccagccgtcacgccgtcgccgccgcgagtccttcattcaccatgatcatctccaagaagaaccgccgcgagatctgcaagtacatcttccatgagggggttctatatgccaagaaggactacaacctggccaagcaccccaagcttgacgtgcccaacctggaggtgattaagctcatgcagagcttcaagtccaaggagtatgtcagggagaccttctcctggcagtactactactggtacctcaccaacgatggcattgagcacctccgcagcttcctcaacctgccgtcagaggttgtgcccaacaccctcaagaagtcctccaagcccccgtcccgtccctttggctctggcccaccgggtgaccgccccaggggtccccctcgctttggggaagacagacctaggtttggggatagggatggttacagaggaggtccacgaggtgcaatgggtgattttggtggtgagaagggtagtgctcctgcggatttccagccatcttttaggggtagcagacctggcttcggccgtggtggcggcagcgcttttggtgccagtggatcttccatggagtgatctatcaacttaagcgggaaaattgattcaggataggcacatgtttgttgatctttgaacttttgaggacaatgagattttggtttaccgagctgttgccgtggcttgacatgagttttgatatcgctggacaaggcattgcactccctatcgcttgaaatcgtctctgttggtgctggtgtataaaactttgacgtgtgccgtttataatatatatgtaactgcaaaaccaagtttctatacaagtcaaaacagtatacaatttggatcagaaggtggtgcaatgtataacccttctaaatttaaggatgttttgtg

SEQ ID NO: 12438 - DNA, 1337 bp, Zea Mays
tttgtaacaaaaagcagcatgatcaattacaaaaagcagcatgaaattgatctccagggtaacacatgctctcgtgcccctagaaattctaaatggacgaattgaactgccaagaaataaattgtcgaacaatatgtacagtaccgtcaaaaagcagcaagtattaagtaaacctgggcagtacgttctcaaacagtcaacagggcaaagtaccagtcaggccgtccaacggtagcgaaaacttaaaccttggtaacaaatcagttccatcagcatcgccatgacccatgattgaagcacactataaccaatgagttccacatctccacagccacgagccataacggatcaattccccatcagcgtagccacgattgaagcgcgccatgatctcggttgatgaatagtggaatccatcatactgcagttttgcaatcttgggagtcgcgtcgtagctccatgtttttgttgtagatctccgtgctcgatgcaaaaatccggcgtgcgcagcggaccaacaggcgcggaaacaacggatacaggaacacggaacaagatgagggaggagaccccggggccaaaaacatcaacccccgtgcgatctcctcccccggcacacaataatcatctttttattaatacctggcctgccatgcgagcgcacccatcatggcaaaggcctcctctaggatgtcacatctttttttctcttttttgctgtcgacgcacgcagacttttacatgctgcagcttacctcgcctcttccaggcggcatatctcatagatctactaataattatcgaaattgatccaataattatcagcgcagagacatcatccatcgaggtgaagcaggactgcagaccaagagatcccgccgcctccagccatcgtcgcctcagatccgctccgaaccgaacgacgacgacgacgacgacttagaaatttctccagatctggaaccagaagcagaacatgcgatgctcgaccaccaaaacaaaacaacatgaaccttgaaggcaaggactaaccgatacaggatccaacgcgggtttgttgttttctcccagtcctagctctattcaagcccgtaagatgccgaatccagcaatcagatctgagcctgcataacatgaagcaaacggatttcctgataaatcaaaacaaagtagctcaccgagagcactcgcgaggcaaggtatcaaggaggacggccatccaggatctggaggacgagatgaggttgcgtgcaggaggggaacgcgtccaacaatggtttgttcttggttatcgacgaataattggcggaaacaaatgtatttatggtaccctctcc

SEQ ID NO: 12439 - DNA, 863 bp, Zea Mays
ctaaagtgctaaaaagatcatgatttactttcaattttggaattttaatattacagtggtgccaggtcgggtgttgaaaatggaagaagctatcaagaaccgtgactttgaatcatttgccaaattaacttgtgcagatagcaaccagtttcatgctgtatgcttagacacgagccctcccatcttctatatgaatgacacgtcacaccggataattagccttgtggaaaaatggaaccactcagaaggaaccccacaggtcgcttacaccttcgatgctgggccaaacgctgttctaatcgcccaaaaccgtaaaactgcagcacatttcctccagaagctcctatactatttccctccacaggataatgatttgagcagctatctggttggcgataaatcaattctaggtgacgccggattgcattccatgaaagacgtcgaggctcttccagcacctccagatacgaagataccggatcagaaattcaagggcgatgttagctacttcatctgcagcaggcttggggcaggtccaaaggttgttgttgacgaaggtcaagcactgatcgattcagtcaccggacttccaaaaggcgtgtagttctagatttaggttggaataatggtttaagctggggattaaagacaatggtatcatacaagcaacctgggccggccaataaagatagaacacgttctcgccttttgtttttctccctcgcctagtatgtggctgaaatatttgtttcgctattttattgagcacttcagctgagacgcaagcggagaataataactttgtcgtgtaggagtactgcaggagcgctgcatcttggagctatgcctatgcgtgcgtgcgt

SEQ ID NO: 12440 - DNA, 95 bp, Zea Mays
ctaggaacagcggcgcatgctgcagcctacaggaacgaccagtcaccggctcgccgcccaccaggaatagccgccaggtagccaggcagaggcaa

SEQ ID NO: 12441 - DNA, 2673 bp, Zea Mays
ccgcacacaagtcctcacgatatttagattcttatgcagctagttatacacgaattcaaattctatatttaaaaggagtaccaaacaggtccaatgtgtgtaataaaaagaaaaaaaaagattccagtagcagcagtaaagcccattcgtatgtggccctgctccggaccgaaagataaagcccatttgaaatccagctcggcctgctgtcagttcaggagcaggacgagtcggggtcggcgcggcggcaggccgcaggccggcagcaggctctcgcttcgctctctcgttgtctgtcgagaggaagaagacgaggcgagggacggcagcagtagcagctccagcatcttctagcttcttcattcatgggattcggtctctactaggattaggggtgcttcatttcatccgatccccaacgacttgacctgattctgatctcgacgacgatgcggaagcgggatctgggcatcctgctgctcgccgccttcgccatcttcttctccctccaccacgaaggcgacttctccttccgggagtcctggtaccacctcaccgacgaggacttccccatcaagtacgaggccgaccgcctgcccccgccgctcgtcgccgatctcaacggcgacggcaagcccgaggtcctcctccccacccacgacgccaagatccaggttctccagccgccccacgcccgccacctcaacgatgactccgccttccaggaggcccgtgtcatggccgacatctctctcctccccgacaacgtccgcctcgcctcggggaggcgccccatcgccatggccgtcggcaacgtcgaccgctcctacagacctggcgaggtcaggaagcaggtgctcgtcgtcgtcacctccggatggtcagtcatgtgcttcgaccataacctcaagaagctgtgggagcacaacctccaggacgatttccctcatgccgcccaccaccgcgaggtcgcaatctccataaccaattatactctcaagcatggagatgcaggcctcgtcatcgttggaggaaggatggagatgcagcatcattcagcagatctcttcgatgaatttatgataccagaacacaacatggatgatcgccgtcgaagcgccagtgagaaacagggctctgaggctggcaatgcagacctgcgccattttgccctttatgccttcgctggacgtagtggcgaccgtagatggagccggaagaatgagaacatccagtcacagccatcagatgcttctgtgatgttaccacagcataattacaaactcgacgttcatgccctcaatagtcatcaacctggtcagttcgaatgtcgtgaattcagagaatcaatccttggcatcatgcctcatcattgggataggagagaggatactaccctacaacttgcacattttaggaagcataaaaggaaacaagttaagagaacgcctggaaaggctgttattaatagcgtgaacaagcccattgaacacaatccacctgggaaggatgcttccaatagaatagctagagctcttgggaaggctgcagatatggctaactcaaataaagccaggaaggcacagaggatgcagtatgttccgacaatcactaatcatactcaagtttggtgggttcctaatgttgttgttgtacatgaaaaggaagggatagaggttgtccatctagcttctggacgtacaatatgcaagcttcatttaaatgaaggaggccttcatgcagatattaatggagatggagttctggatcatgtccaggttgttggtggaaatggtattaaagagcagactgtcaagttttgggaggacattgatacagctggtttagaggtcgcgactcctatcctggtccagacagacgatgggcataaacacaggagaggaagccatggtgatatcatctttttgacaagccggggagaggtgacatcgtactctcctgggctgctcggccatgatgcggtgtggagatggcaagtatcatcaggggcgacatggtccaaccttccatctccatcgggaatgatggagaacatagtggtgcctaccttgaaggccttctccctacgtgcctatgacccgaaagaggtgatcatcgccggtggtgaccaggaagcggtggtgctctctccttctggtggcatactggccatgatcgagctcccagcgccccccactcacgctcacctcctggaggatttctccggggacggtctcaccgacatgattgtggtaacttccggtggaatatatggattcgtgcagacaaggcagcctggggctcttttcttcagcacgctggtggggtgcctgatagttgtgatcggcgtggtattcgtgtctctgcacctcagttcgtccaatgccgccaaacccagggcttcctcgtctgaatacagatgatgttttgatatgcaaggtcaagagacttttggtactcctatgttctagtagtctatatatttaaccaaatgagaattcgtgttattgtatgataagaattgttcctactagtatatctcatgatatactgatagtgcaatctcgttttttgttgtctaaaacagagtatatgaagtgtgatttcagtgccatggggtatgaggatggcgatgttagtcttgatgggcaagtggtacccaagaaagacact

SEQ ID NO: 12442 - DNA, 68 bp, Zea Mays
ggctaaggtcatggcatcatcttcggcccttgtataggccccaagcaactcgtcactagttgcctcaa

SEQ ID NO: 12443 - DNA, 233 bp, Zea Mays
ccggccggcccggcccaaggtccaactacgagctttttaactgcaacaacttaaatatacgctattggagctggaattaccgcggctgctggcaccagacttgccctccaatggatcctcgttaagggatttagattgtactcattccaattaccagacactaacgcgcccggtattgttatttattgtcactacctccccgtgtcaggattggttaatttgcgcgcctgctg

SEQ ID NO: 12444 - DNA, 882 bp, Zea Mays
gcttctggtatacttttgtcaagaatgcaggtggtagattgccgtatctgtggtgatcctaactcagtgcttcgttttgcttttatcgagtttgctgatgacgttgctgcacaagcagcactagcacttggtggaaccgtgcttggcttttatcctgtcaaggttctgccatcaaagacagcaattttacctgtgaaccctaaatttcttcctcacactgatgatgagaaagaaatggtatccaggactgtgtattgtactaacattgacaagaagatcgcagaagatgaagtgaagcaattctttgagggaacatgtggtgaagtttctcgtctgaggctacttggtgattatgtgcactccacatgcatcgcttttgttgagtttgtccaagcagatagtgctattctcgctctgaactgcagtggcattgttcttggaacgcttcctgttagggtgagcccatcaaagacaccagtccgctcgcgatcgccccgtgtgacgtcatactgaattcggctcatctgaagccgtcgtccagggcagcaaatttctgggcaacaaagccctagtcgtgtggccttagagactgccgcatcgcggataagtaattgtcgttgagcagagttctcgttggttaaagtccagtctagtaggaggcgcagagacccgtctgtatggtcgctgggagatctatcttgacctcctttttctgttctttttggtcttagttatcgtggttggattctatagcagccttgacaggcattcgaacaacaatgtttatggttatcctatccgctttggactcttaagcatgttttcccagtctttaaatattaagagatagtttggtaactatattttttcgagggattcata

SEQ ID NO: 12445 - DNA, 1226 bp, Zea Mays
acccttcccatgtgtcacgcatgagggtgactcatggccaccttttggttgcactgcgtggcatgttcatgtgtgtacctgtacagctcctcaagattcccagtcatgatcatgatacgagcgacagatcaaggggccggggatttaacaaaagagagagagagagagaaaaaaaaaacccacccggcagactgcgcttagcccttgcgttctccccgttctggcctcgccgcgcccggtcctctcctcttctatatatagcgtcccgggtctcacggcatttgcctcacacaaccaagctcgatcgatctcactctcagctggtcgctcactcttgcagctccacccttcactcagtcttaggctcttagctctaggctctagctagccgcgccactccttcgtgtagccatcagccttctcatcgccaccaatggccactgccgaggtccagaccccgaccgtcgtggcggccgaggaagcgcccgtggtggagaccccgccgccggccgtcgtgcccgaggagtctgcccccgccgaggccgaggccgaggccgaggctgaggctgctgctcctgctgatcccgaggagcttcccgcggccgagcagcaggcagccgccgagcccgaggccgctgctcctgctggtgccgaggagcccgcggcggccgatccggccgccgaggctgaggttgctgctcctgaggagcccgagaaggccagcgagtgaggccgtgcgcacgcagcggcggcggccagggcccaggggatcggcgtgcgcgcgtggcggggtagtcgctcgcgcgcgtacatggcagtatgacacgggattttgctgttcagtacgctacggttattactggcgtctctctctgtgtgtgtgtgtgtctcgtacgtagcccggtacgtagctagcagtgactgtcgcgtggacgtgtccggtgcgggctgcgagtgacgtgggctaaataaagtgtgcgtcgggtggtaatggtggtggggcccggtgtcagtggcgcggtgccccatgcctgccgctgctgcagcttgttgtgtcttgtgttggttggttcctgttctttctgtctatctattctcatgcatggcagtttgggtatggtatgggtcgtcttctttggttacgttccctgcattctgtttgtgtcattgtgtgatgatacgatcttctttatataataatagagccagtcgttcatcagcaaacc

SEQ ID NO: 12446 - DNA, 690 bp, Zea Mays
aattgccatgatttcgtgcagtatgccttgtttagttgaggatcctgttgctaatgaccctctccagttgcttccgaaaagaacttaccagcccagtaccatcaagcggaaaagaacccatggattccttacacgtaaatcgaccaagggtgggcgcaaggtgattgcccggagaatcgcaaaaggcaggcacagaatttcagtttagcaagatcccatagcagcactggatgttttctgtactactacagattcgtatcgtgttccttgtgtgaacgacgtattttaagccttttgaagtttttgcatgccaccctgctgaagcatgaagctgagcccccgcgcaagcagctgaaacaaactcttgctgcgaaataaacaagtcaaaggaactggaaaattgccgcgccgaatgagttcatttggagcagctgcgtgccgcatttgtgtttgtttgtgctggaattgccacgtatcagagatgcgtgcgtggtctgagtgtggtcgcagtagcacttggccttgttttcagagtgggggtcaagggggggtcctagtgtaatactttcctctcttataaatcaccaggagagattttattctactattttctaggggagggagagagtatgatgcacctgctgccgttttctttcgcgacattgtgataatacaatcatgatagtgata

SEQ ID NO: 12447 - DNA, 482 bp, Zea Mays
atttgataacccaaacaaaaaagacaaacgaaggatcaagaaccaaggttgctggtagtggtttctttaatggaagagcaaaggcaagaatctaccaaatctgatgatgagaacaaggctaatgatggagatccatcttcgaatgaaactgagccatcaaatggaaagactgatatcaatgatacacctatggatgaatctcaggcaacagatgaggatggtcgagattctggtaaaaacggcggtggaacagacctaaatttgaatttaggtttgaaagacccggatggtgataatgaagttgagacatcagagaaacatgtagcggcaaacaatccgcagacagagaatagatccaagaggaaatccgtaacccctgaccttgagatgacaatttaccaaacttgtttgatgtgcatcaggctagtgcacgaaataggccatacagtaagcaacttcaacgatgtctctgatgtgcatac

SEQ ID NO: 12448 - DNA, 1177 bp, Zea Mays
cctccttccctcccccggaatctaggggagggctggggtgcccatggaggtcatgggcctcatgctcggcgagttcgttgacgactacaccgtcagggtcgtcgacgtcttcgccatgccgcagagcgggactggtgtcagcgtcgaggccgtcgaccacgtcttccagacaaacatgcttgacatgcttaagcagaccggcaggccagaaatggttgtaggttggtatcactcacatcctggcttcggatgctggctatcaggcgtcgatatcaatactcagcagagttttgaagctttgaaccctagagccgttgctgttgtgatagaccccatccagagtgtgaaggggaaggtggttattgatgcattccgcctcattaatcctcagaccatgatgcttggccaggagccacgtcagacaacatcaaatgttgggcacctaaataagccatctattcaggctcttatccatgggttgaatagacactactattcaattgcaatcaattaccggaaaaatgagcttgaggagaaaatgctgttgaacttgcacaaaaagaaatggaccgatgggctaattttgaagaggtttgacactcactcgaaaaccaacgagcagactgtccaggaaatgctaaacctagccataaagtacaacaaggcagtgcaggaggaggacgaactgccacctgagaaacttgcgatagcaaatgtgggtcggcaagatgcaaaaaagcatttggaagagcatgtgtcgaatttgatgtcatcaaacatagttcagaccctaggaaccatgctcgacacggttgtcttttagtctactaataatattgttgtcccaaactgaaacatagccacactatggaagcatgacacatgcaatgagcttgaggccagatacattttggttctaaggtttgtttatgaatggatttgtctacatttcattgtcgttaaacttcctgccttttctatcaaagcttcagtgcgttctagttatgtttaagccaaggtggctccagatgtcagttgggatgtcattgccctgggagaactgtgtaatgtgattatgacctgtggcagataacttatttttgagttaatccatcaccacttcattctttattgttagttgtttagtactaatatgtggaatggagtcatcccatca

SEQ ID NO: 12449 - DNA, 939 bp, Zea Mays
aaaagttaggcaaagtgtgccaagtgaggctgcaatccaaacatgcccacgtcttcgaagaaagcgacgggtgccggatccagacttcattccccaaaaccaaaataatcgccaccgctctccgcaccgaaccgaagcagcggcgatgtcggcggagaagccggctcccgtgcgcgtgctctactgcggcgtctgcggcctcccggccgagtactgcgagttcggccccgacttcgagcgctgcaagccctggctgcgcgcgcacgcgcccggcgtctaccccgacgaccttgtcgccgcctcctcctcacccggcggcggcgacaaggacgtcgacaaggtcggggatcgcctccagggcgtcgggatctccgacggctccaccagcgccgcaggggatgcttccgcgtctaagccccaagaggcgaaacgcctgcctggtggtaagctcaagaaaaaggagaagcaagaagtggtcattgagaagattgtccgtaacaagcgcaaatgtgttactgtggtgaaagggcttgaattgtttggtgtaaagcttagtgatgcttcgaagaagcttgggaagaagtttgcaaccggagcttctgttgttaagggccctacggagaaggagcaaatcgacgtacaaggggacatctcatatgatattgtggagttcattacagatacatggcctgatgtacctgagtcggccattttcttcattgaagatggaaggaaggttcctgctgcttgatgccatatggtttataaggcacgagaccaatggatttacaaatataatacagagtcccaggaatggtatcagccatcaaagagatgttcatgaagacaaccaaccaccagcatatgctcaactaccacttgcttcacttcacctccatgttttcacgttggccaatactgaggttgagcaatagatga

SEQ ID NO: 12450 - DNA, 511 bp, Zea Mays
cttaaggaaatccaatgcaagcagggaggatggaggagaaaaaaagggccatggcgaacgagctggtggcgaagctgacgtttgtctgctgggacaagtgcgtgacggggagcgtggggagcagcctgagcaggagcgagacctcgtgcctgtccaactgcgcgaaacgcttcgccgaggtgaagatgatggccctgcagcgcttcaccactaccggccgcggctgaagtcccaacggccaaccacgcgcgcaaacgcaggcatctctctctctctctctctctgcccctgcgtggacggagcaatgtgtgtgtgtggtgtgtcctctggagtgtgccattgttggtgagatggtagaaaactagaaagacatgtcaatgtatcctatgcattttttttgtttaagacggtgttagaattaagttgattctgagatgttgatgcaagaagtggctgcggctcttccgttcctgcagggattaaagaaaaagtcaaaaaaaatttaaaaaaa

SEQ ID NO: 12451 - DNA, 1210 bp, Zea Mays
ccacccactcggcgcctccgcgtccgcttttttggctgggcaccgacaccagcccgcacgacgggaccagaccacaggagaggaggggaagagggaggggagcccgacccgccaaaaatagcaggggcagggaccgcaggcgccgcgaccgatgggcgtcaagcaggtcctcgtccgcccccgctacggcgacggcgacggcgacgacgatggcggtaccagcagcagcagcagcacgggccgctgcgatgaggatgtggtcgaccagtcgccgccgcccatgtcgtcctgcggccgctacctcctccaccgcgtctgcaggttcgacacactcgccggcgtcgccatcaagtacggcgtcgaggtggcggacgtgaagcgcgccaacggcctcaacgccgacctgcagatgttcgcgcacaagactctccgggtcccgctccacgggagccaccagcccgccgccgcaccaccgtctcttccctcctattccccaaggaaccacgccgatcgcgtcgccagagaatggacaacacgccgccctcccaaaaatgccgcttccatggacccatttcttaaaccaccacggagcacagtttcgccgtccatgagccttctgcagggatactatggccttccaccgactccacaggagaacctcacctacgaaggcactgagatggcgacgtacgctcaaggtcatcataggaaggctagaagcttatcgagcagcgaacatggagatggtgctgacgatgctgagaagcccataaggcggcgccagaaagccgactctgagctgacgacaggtagggaggacaatggcggttgcctcttgccaagggctgggcaagggctggccctgaggccaaaatctgggagtcgaccagacgggaacggcagccagctagatctctcggccacgtgggtgccctcgtacggggatgggctgcacaccgtgaagaaatcatcgagcaccccggagttccaagactcagacagcatcagcatcgcctcggaatggctgaagagcaagtggaacctgaagccggacgcgttcaccctcacgcttcctcctctcccgctcttggacagcatacccaagcctctcctcgacaacattcccaactccatcgctgcttggcgaaacaaggcggccaaagattagcaagaggaaaaggagactcgtatacgctggcctcgcctagcc

SEQ ID NO: 12452 - DNA, 83 bp, Zea Mays
tccttcagaccgcaccttcatatcatgcataccttcgtctcaaagccgaagcctcctgtaacagtctatgttatactgaaaaa

SEQ ID NO: 12453 - DNA, 94 bp, Zea Mays
tgctgctcctcctcaacaccttggcctttcccaagtccttgctgatcctttccaaggtacctaatcatcaaaacatccatggccccaagcgtaa

SEQ ID NO: 12454 - DNA, 122 bp, Zea Mays
acggggtctatgctgatcatgaagaggcatggcctaggctagcggcctccattgcacatgggaggagcgctcgcttaccatctccccaagtgggagagtggacgtcaaaatttgtggtagag

SEQ ID NO: 12455 - DNA, 101 bp, Zea Mays
aaaaaaaaaaaaaaaaaaaaaaaaaaaaaaacaaacaaaaacaaacgaaaaaaaaaaaaaaaaaaaaaaaaaaaaaaaaaaaaaaaaaaaaagaccaaatc

SEQ ID NO: 12456 - DNA, 1690 bp, Zea Mays
acgagggggcccacgcctgaatgccaggcctggccgcgacgtgtcgcgcctcgccctccccgactccactccactccactccactcgcccgcgcccgccgcccgcgtgctcctccctcgcgccccgccccgccccgcccctatctatatccattcccgctcgtccccctcaacaaccctcctcaccgcgcactcgtgttcgtgtcatcccgcccgcaggccgcagtccatggccaccgccagcctcgcgctctcgctgcgcctcgcgccgtcctcgcgcccgctgagcctccgccgccggggggccgccggcgtcacctgccgcgccaccaccgccacgttccaccagctcgacgccgtcgcggtgagggaggaggagtccaggttccggacggcggcggcggagggccgcaacctgctgccgctcacgaggtgcatcttctccgatcacctcacgcccgtgctagcgtaccgctgtctcgttaaggaggacgaacgcgatgcgcccagctttctcttcgagtctgtcgagcaggggtccgagggcaccaatgtggggaggtacagcgtggtcggggcgcagccttctatggaggtcgtggccaaggctaaccatgtgacggtcatggaccatgagatgaagtcgaggagggagcacttcgtgcctgatcccatgaggatccccaggacaatcatggagcagtggaacccgcagattgctgacagcctccctgatgcattttgtggaggatgggttggattcttctcatatgatacagtgcgttatgttgaaacaaagaagcttcctttcagtaaggcaccacatgacgataggaaccttcctgacattcatttaggcctctatagtgacgtcattgtgtttgatcatgttgaaaagaaaacacatgttattcattgggtgaggacagactgctatcgttctgttgatgaagcatatgaagatggaagaaatcggcttgaagctttgttatcaagattacattgcctcaatgtcccaacactttcttctggttctataaaactcaatgttgaaaactttggcccagtaatgcaaaaatcaacgatgtcaagcgaagaatataaaaatatcgttgtccaagctaaagaacacatcttggccggtgacattttccaagttgttttaagccagcgttttgagagacggacattcgccgacccctttgaaatctatcgtgcattgcgcatcgtaaatcctagtccatatatggcctatctacaggcacgaggttgtattctcgtggcatcgagtcctgaaaattcttacccgggtacaaaagaggacaataatcaatcgtccgcttgctggaaccataagaagaggcaaaacaaaagcagaagacaaaactttagaacaattgcttttgagtgatgaaaagcagtgtgctgaacatattatgctagtagatcttggccgaaatgatgttgggaaggtgtccaaaccaggttcagtaaaggtagagaaattgatgaatatcgaacgatattctcatgtcatgcacatcagctcaacagtaactggagagctacgcgatgatcttacgtgttgggatgcgctacgagccgcattgccagttggaaccgttagtggcgctccaaaggtgagagcaatggagttgattgatcagctagaagtgagtaatgcgtgggcc

SEQ ID NO: 12457 - DNA, 1241 bp, Zea Mays
tcaccgccctcggcagttgaatagcaagtattgaatggacggctgatccagcggcgcttgatcctatcggacggtcgcgaggatcccaggagccctatatccccatcctcgccccccacctccttcgcttcactcgcgtccgcccccgccgccgcctttcgtcccagcccctaaaccattctccattcctctcctcagtttagcacaatggcactggctaataagcttggtggtctgctcaagaaagccacaagttcaaatccgtctgtctaccaagcaatcagatgcatgtcatccaagctctttgttggagggatttcttatcaaactgatgatcacagtctcagggacgagtttgccaaatatgggcaagtcattgaagctaggattatcattgaccgtgagtctgggaggtctagaggttttggctttgtaacttacacgtcttctgaggaggcttcagctgccattactgccttggatggaaagactctcgatggacggagcatacgggttaatcatgctaacgagaagaccggtggctttcgtggcggcggtggctatggtggtgctggtggaggcggtggatacggtggcggccactatggtggtggtggtggcagcggtggatacggtggcggcgactatggtggcaactacagcaacaggggtggtggtggtgattatggagttgctggtggaggtggaggcaactttactgctggaggtagcgacagctttgccaacagtaactttggttctgacagtagttttggtggaaacggtgctggtggctttgatgcaaccggcggttccacaggcgatgatgggttctctggcacacctgatgataactttggtggtaacaagaatgaagaaaccatggatgatatcttcaaggacgatgagccggacagctacgccgacaagaggagctagtttgtgccttctccaaagagtgctcatcaatacgattccagaacgatatgtattggctagtgtttgctgttaacatcatagcggcctgtatgttcaaataatggagcgagtaattctgatgagtttgagttgtcgggggctgtggaactttcaaacatggcgtgcatccacgttataatgtcgttttgctagatgctatgctttcatcgtggcttggaaatcggggtcttgtcaagcttcagctcagacggatctgtaaatggtaccgtaagtcaaattcaaattatgtgcaaaggcagaac

SEQ ID NO: 12458 - DNA, 1104 bp, Zea Mays
ccatcccgtcccgattccaatccaatcccccgcaagcgcgaagagaggagacgagaagggggagggatccacagttcacacacaccccgcttcccatggcgctagcgctgcgctgccctcccgccgccacctcgtcccggagccccttcctaccgtcgacctccccagcccctgcggggaaggtcccgaggaggccgcccgccagctggaggtgcctcgcctactacggcgacggcggattccgcaagaactacgaccacatccccaagcagttccgcgaggagaacctcaaggatggactgatggataattacaagcatgttcctcaattcctttatggattaagtgatgctcagatggaaatgtttatgaatgacgataacccttataatcggcagtcccagaaagttacagaggaaagcgtttctgctgcgaggagctacgatgagtttggtatgtacaccttgtcaggcatgcatgagggccctgcaagttacagcatgggtatgggcatggggggcagcatgagcatgagcatgggcagaggagggagaggatatagaagaatgagaagctctgctccagatcttccgtcattgctactggactctcgaattatatttcttggaatgcctattgttccagcagtaactgagcttattgctgctcaatttctatggctagactatgacgaccgcacaaaacccatttatctgtatataaactccactggaactatggacgaaaataacgagcttgttgcatctgaaactgatgcttatgcaattgctgattttatcaatcgaagtaaatccaaggtttacacaatcaatcttagcatggcatatggtcaggctgcgatgcttctttcccttggtgtcaagggcaaaagaggagtgctgccgaattcaatcactaaattgcacctgcctaaggtgcacaaatctggtggagctgccattgatatgtggattaaggcaaaagagttagatacaaacacagattactacctcgaactcttgtctaaaggagttggtaaaccaaaggaagagcttgctgaattccttaggggcccgagctctcagctgattatttcgtcttgtg

SEQ ID NO: 12459 - DNA, 1057 bp, Zea Mays
ccaaaaggggcctaaaaccgctataaactcatcaaagacttcgagcgagttagcaaagctgaggctgagcatactgatccagcaacagcaaaaatgttgcatgacagaaagcagtcgatgatcaaagaattaaactcctacgttgctctaaagaaacagcaagtgaaaacaagagaatcgatctttttgatgggccaagtgctgaagatggctttggtgaagaaaatgtcctgttagcatcaaatatgacaaaccagcagttaatggatcaaggcaatcaactaatggatgaaactgatcaagctattgcacgatctaagcagactgtccaagaaaccgtcaatgtgggcacagaaactgcagctgctctgaaagcacagacagaacaaatgagcagagttgttaatgagttggattccatccatttctccatcaaaaaggcatctcaattggtgaaagaaatcggtcgacaggttgcaactgatcgatgcatcatggccatgctttttctcattgttgctggagtcatagctataataattgttaagattgtgaacccacacaacaaggacattcgcgacatccctggcttggcaccacccgtcagcaggcggctgttgcgatagaggacaggtgaattgcatacctggtgtaaaaattgatgtggcgcggcgccttggcaagcccatctgtattctacgtcttgtaaaacgctgctccagtcatgtggtatattgctgtaaaacttctcatgggatccactcctactccttggctacacacagtgcgtatatgttcctcctagttcgccttcctgtttttgcaaaactaactctgaacggtgttctgttagaatcatgtgcacacatgatggttgagatgtgtctatgatgttcattgtgacgaacgattcttaaaaatctcatcggctttagttgaattgaacacatggttgagttgagttgaacacatggttgagcataatatatttcttatgatgagtgatcctcaaggaggatcagctttagttgagttgagactaattttgacgcgagtg

SEQ ID NO: 12460 - DNA, 502 bp, Zea Mays
cttttattgccatcctgtttccgcttggtccaaatatggtgaattttattcatctatagttatccggtcgattatggtttacatatacggacagctatcttcagatagtgttgacatcagcatgaatactcatctgaagactgtgaagctgacactaaaagggaaaaatcctgttacccttgatcaccttagtgtgaggggaaacaacatccgctattatatccttcctgacagcctaaacctggagactttgctggttgaggaaacaccaagggtcaagcctaagaagcctacttctgggaagcccttgggccgtgggcgtggccgtggtcgtgggcgcggtcggggtcggggacgttgagcatgctagctgcttttggaaattgcattgcgtgcatctgcagtgtaatctacattcctatcaattgtacgaagtatgcctttgattatgcaaccatgtatcaattgtttttttttgccagaaataaaaaacaaatcttat

SEQ ID NO: 12461 - DNA, 970 bp, Zea Mays
ggaaaatattccagatttcattgtaggagtgaagaacaggaagatgtccggttttgggcaccgtgtgtataaaaactatgaccctcgtgctaaagtcataaggaaattggcagatgaggtgttctcaattgttggacgggatccacttattgaggtggccattgccctagaaaaggcagcgctgtcagacgaatattttatcaagaggaagctgtatccaaatgtggatttctactctgggctaatttatagggcaatgggattccctacagaattttttcctgtgctgtttgctattcctcgcatgggtggctggctagcgcattggaaagagtcactcgatgatcctgacactaagattataaggccccaacaggtatacaccggcttctggcttaggcactatacccccgtcagagaacgagtgctatcaagccagagtgaggaacttggtcaggttgccacctcaaacgcaactaggcgccgccgtgctggttctgccctgtagaagctgcagcgtataaacgcaccggcatactcaataaacatcgaccacttttgtgcttgaaaaggccacaaatgctttttagcttggttggagttgtaggccttttgttgtcgagtatataggcaataatgcagtgagaacaccacaccgttacaatgtaaaactgtcacgaggcatcacttgctggtgtacaccccttgcgttctctatgacttaatcacttaacttcccaaaagatgaattaagaggtacgatcgagtacccgtgttcttgcgttgacaccatgtgctcattttggtgaaattttgttgttcatttgcatggagattagtggaaacaaagatcgctgttggcgtatttgtgtcacggatatattgaacacatttattaattgtttttctttctctgtcctaaaatgaaagctaaaatatcttctattttaggacaggcaaaatatattgt

SEQ ID NO: 12462 - DNA, 284 bp, Zea Mays
ttttactagtaaatttacaaatatggtggttgagattcctagaggcagcaaggttaagtatgagttggacaagatatctggtctgatcaaggtggatcgtgtcctttactcctctgttgtttacccacataactatggtttcattccacgcacactctgtgaggatagcgaccccatggacgtcctcgtactgatgcaggaacaagttgtccctgggtgttttctgcgagctcgtgctattgggctcatgcctatgatcgatcagggtgagaaagatgataaga

SEQ ID NO: 12463 - DNA, 528 bp, Zea Mays
cctaggcgaggtaggcaggcaaggcgcctaggtgttagaccaccgcccggacgcctaggcgacgccttaagaacagtggtcactgtttgcaaaaccaatcccattcatccatcaggtatatcactccaattagatcagtggaagatactgaaggacaacatcaaagccataaatgaggcaatcgaggaaaatacatgatgggagccgccaagcagtcacgtgacgggcgagcttttgcttcttctctgtttgaggcctgatgtacggaagtagtttttgttgcccatatgctgccgtgttgcttttgtccatttgaccacctgctgttgtaggtggccgcatggccgaaaggtttggtttctgccccgtgctactagtaaacttaaacgtcggacggatgacgtaacttctcactattatcttgtagccaaaaacagcttgttaggattgcagaactaagatttagtgtaaaaatgatccggtttctttcttgctttattatgtgatcatcatgagagtattttgcca

SEQ ID NO: 12464 - DNA, 96 bp, Zea Mays
aaaggaagttccagggccctcgtacgagggggtggccgcgcgggacaacgggctgacggacaggctctcactctctctctctctccctcgcgaacg

SEQ ID NO: 12465 - DNA, 84 bp, Zea Mays
accctccaaagcttatacacaagcctaactaatcctcctccagaactggaaacgccctccagcctcatgaacacctagagtact

SEQ ID NO: 12466 - DNA, 775 bp, Zea Mays
cctagttgcctccccgctcgggctgtgcttgcttcgttcgaattggatgtgaattggagtgctggttggctgggtgatgggcttctttgcggaggctgggccggtgcagatcttcgtgtccaaccatttgattccagacgatatggagttccaatcaggagatgtgccgaactacacaacttctgatggatcggtgaaaattcaaaaagagagtgaggtgcggctgaagattattggtactcgtgtcgatgctacagaaattttttgcattggcacaataaaggatgattttctgggtgttatcagcgatcctggtgcggcagtgtaaatggtctaagaagcgagattgtactccattgttctgacttctgagtactatcgcagacgtgtgtaatcgctggtccgttaaaactgcaatggctgtactgactgcggaacttgttgagaatgatgtgactaggaccttgtttagggcctgtttggttctttagtatggccctgattggcacaactgctgcttattgaaaaaacagcttatctgataagctggtgaaaaatagcttctgcttgttgactgcttttagtgtattttgagaagcagctgaactgataagctgctgcagaagctaactgtttggtaaaacttttgcttaaatttgtgaagaagttgaaaataagctgtgccaaacaaggcctatagaggctaaagtttagtccctaccttgtttggttgcatggactaaaaatattcgtattaaatgacttgtaagaagac

SEQ ID NO: 12467 - DNA, 2260 bp, Zea Mays
cgagtcgaagtggcagctcccagcctcccacgcgtgaccgtgagagggaagggggtatttaacagacggcgggccgaggatgcgagctctcgcggcagcagcaactgcagtggcggcgcctacccccacgcgcctccgcctcccgctcctctcccgcaccctgcgctctgccaggtcactgtagaagctcttattcctccaggctcctacggttctcgtgcagtgccaccaccatgggagatgagacctcaacctcggttgctccccaggaacaggaatccactgtgcaggctgggagtgtcaagcaacagctctccgggctggtccttatgtccctccgggctactgtgcctgaggtggaggtagaaccgatggttgaagtttcagcaaagtttgctgactaccaatgcaacaatgctatgggattatggtcaaaggttaaaggatctggaaccagtttcaaaaaccctaatgccattggacaggccattgccaagaacttgccttcttctgatattattgaatccacatctgttgctggacctggttttgtgaatattgtcttatcaaaccgctgggttgcacagagaatacaagacatgctcgttaacggtatcaagacttgggcaccaattcttccagtaaagagggcagtgattgatttttcatcacctaatattgcaaaggaaatgcatgtgggacatctaaggtctacaattattggagatacattagcacgcatgtttgagttctcgaatgttgatgttctgcgaagaaaccatgtaggagattggggtacacagttcgggatgctaatagaatatctttttgagaaatttccaaattggcaagagattggtagccaggccattggagaccttcagattttctataaagcatccaagcatagatttgacaatgatccagaatttaaagcaagggctcaacaaggagttgttcggctacagggaggagaagagagatatcgagaagcatggaaaaagatttgtgacattagcaggagtgaatttgacttggtctacaaacgcctaaatgtggtgcttgaagaaaagggggagagtttctataatccttatattcctcaagtgttggaggaattgagtagcaaaggcttgatcaaggagagtgagggtgccagagttatatttattcaaggtcatcagatccccttgatagtggttaagagtgatggtggcttcaactatgcctcgactgacttggctgccctttggtatcggctcaatgttgagcaggcagagtggatcatatacgtgacagatgttggtcagcagcagcactttgacatgtttttcagtgctgcaaagatggctggttggctgccaggtccaaacgaaaagaagtttccgaaaacaagccatgttggatttggtctagttcttggttcagatggcaagcggttccgaacgcgcagtactgaggttgttcgattggtagagctacttgatgaggctaaatctcggagcaaatcagaactactacaacggctcactgaaaatggcaaaattgttgactggacggatgaggaattagagcaaacttcagaggcagttggatatggtgctgtgaagtatgctgatctcaagaataatcgtctgactaattacacatttagttttgaacaaatgctgagcgataagggaaatactgctgtgtaccttcagtatgcacatgctcgtatttgttccattattcggaaatccaacaaggatgtggaagatctgaagatgactggagccatttctcttgaccatccagatgagcgtgtgttggggctgtatcttatccgatttgctgaggtggttgaagaggcatgcacgaatctgcttccaaatgttgtgtgtgaatacttgtacaatctatctgaaatgttcacaaaattctataccaactgtcaggtggtcgggtcaccggaggagacgagccgactgttgctttgccaagcgactgctgttgtcatgcgacagtgcttcaatctgctagggatcaccccagtctacaagctgtgatcggctgcatgtttgaagtttgatttatacattcaacatcgctttacgtagaaacccattcatcatggttgcagttttggccttgtaacctagttgaggcagttaacagactataatccatctccctgtttgaaaatagaagcaactcaaaagtttgtaacaaaatatgctctgcagagtttctattgatccattacattacgtaaaaaata

SEQ ID NO: 12468 - DNA, 645 bp, Zea Mays
gcattctaagtgtctgcagctccacggcattgaatccgtgtactggtgggagggaaaggtacaatctgatgctgaagaattactcatcatcaagaccagggaatcacttctggatgccttgactgcacatgtcaaagccaatcatgaatatgatgttcctgaagttattgctctgcccataactggtggtaacaccaagtatttggaatggatcaagaacagcacccgggacaagtgatctctttttttttggagctcgacataatgcgatgatcgaagtgcccatggctccttagctcttccagtggcttgcacacaagggtgtatcctctcttgacctggacatctcaattacgttgctgtaccgaatccatatctaccatcttcaggtaacaagtgatttggtgtcccgtgtgggtaatccaaatgcatgcattgctctgagtattgacaggttggctagtgtaacgtgtaagtccaaaccagatcgtatccaaacatgcgtattgttggtctttgatcgatatttgggccgagttttctgctggtgtgcctgaaactgatgttgcgtcaccgactgttcaattactataacatgttcgctttttacgtgatgattttacccaatggtttgttgatattttc

SEQ ID NO: 12469 - DNA, 150 bp, Zea Mays
cttatgcaatcaagcataaagcggttcagaaggactatcgtcttttgtttaggcagtataccgatgcctgatgctggtggttatgatctgccctcattgtacccagatggcttcaaaggcgtccataaaatatgagttgacatggaggaa

SEQ ID NO: 12470 - DNA, 307 bp, Zea Mays
caaatacggactaaaccaggtccatttataccgcgaattaaccctaaccgccagccgcgccttttcctctcctcccggtgccagccgccgtgcgcgctctcttcgccctacggaaggtgcggaggtgccgagatcttgctcgatctcttcggcggcgaagagcgccaaccagatccgccctgtttgttggtgtggcgccggagcaggagtaggtcgcggccacagaaccctaggagcgaccatggcgactttcgcgaagcctgagaacgcgctcaagagagccgaaggcacttgcgaattacgataa

SEQ ID NO: 12471 - DNA, 76 bp, Zea Mays
ccgagctcagcagcaagaccgtcactagagagctcgatcctttgggcttccatccaggggaccaagcttcaataga

SEQ ID NO: 12472 - DNA, 2081 bp, Zea Mays
ctgctctcccaccgtggacttcgccccttcgttgggcagtcttggtattgttggacttgggcagtacgcgctcccaaatctcacttgaattttccccttgggctgccaaattggccgctttggcgctctctcctcttataacgaagaacgtgccaaaggcacggtcgtgaaaataatcggggaagctggagaacaaccagatcccgtggcgtggggactcggcgttgaccgacgggaaggaagcggggctggatctttccaagggaatgtatgatgctggggatcacatgaagttcaccttcccgatggcattcacggcgacggtgctctcgtggtcggtgctggagtacggggatcagatgagcgcggcaaagcaactggaccctgccctcgatgcactgaagtggattacagatttccttattgctgcacatccttctgacaatgtgctgtatatccaggtcggtgatcctgatctggaccacaattgttgggaaaggccagaaacaatgaccgagaaaagacctctcacacagatcaacaagaagactcccggatcagatgttgctgctgaggcagcagcagccatggcagctgcttcaatggtcttcaaatccagagataccacgtattctgatgtgcttcttcagcatgctcagaaactattcacttttgctgacacttatagaggcctctcaagcgagagctatcccaagctccaggatttctataactccaccagttacgttgatgagcttctatgggcagcgagttggctctaccacgccacaggcgaccagacgtatctcagctatgtaactgtacagaacgggaaaagttatgctgattggggaaggccaacatggttcagttgggatgacaaaaatccaggcacacaggtgcttttgtccagactaaatttcttcgggtccaaacagatatctaatgccgaaaatgaggggttgaaaatgtatagagatactgcagaagctgtcatttgtggtctgattccagattcgcctcaagccactgccagcagaactggaggaggcttggtgtggataagcgggtggaattctctccagcatgccaccaacgctgcgttcctatctgttgtgtacagcgactacatgctctcgacgcggacagcggcagtgcagtgcagcgggaagtactacagccctaccgatatacgcaactttgctgcatcacaggctaactatatcctgggagacaacccgatgaagcttagctaccttgtgggatatgggagcagctacccaaagcaagtacaccacagaggggcgtcgatccccgcggatgcgaaaacaggctgcaaagggttcgagtatctccactcacccagcccgaacccaaacgtggctacgggcgccctggtgggtgggccgttccagaacgacaccttcgtggactcccgtgacaacgccgtgcagacggagtccagcacctacaacagtggcaccctggtcggtctcctctccggcctcgtcaccacttcctccgtggtacagtcgttcacctagagggctcctcctatgttctggcctggagcgatgcgtgtacgagtacgattgcagtttttttgcttggcgtggctgatggtgatgcgcgatctgtgactgtgagagagaaagcttggttgccaaccgttcagttcagacggatggcatatgcaggatgcagcagtagtttagtagtgcccacgcgtttcttctgttgtgtgtgtacaatgacggtgctgctcctgcagtgcagctatagtttttcaccgcgtgctcctatctggtttgctggtgtgcctgtaaggctgtagctacgagtaatgtattagactatttgtaggtcgtatttcatttgttcattctgtggtgaggtagttcagcagagctttgtactgtaccgatgaattgcaccgtctcccaactgaaatgtgccttgtggattcacagctggaggtgaatggcacgcattcgtgcggctcttcgctccatgtttttttttaaaaaaaactgggataaaatagggaagagaaacatttctggtaatacaatggctcccag

SEQ ID NO: 12473 - DNA, 1127 bp, Zea Mays
gactgctgctggcttgctggtcaccggcggcgtcgaggatcagggccaagatcctgtacgcgacatcgaagcaaggcctgcggcggctgctggacggggtccactacgaggtgcaggccaccgacccctccgagatgggcttcgacgtcatcagaggccgcgcgcaatgaggcccccgctgcgctctgctcctatttacgtacttacctgtgcgtgggcgtgttctcctactactcactgctcagtagtcagtagtcatctgcgttcgtgtgtgtgtgtgtgtgatcggccggatgctaattggcgttggtgtgctcccgtagcgatcgatgctgccaatctgacgaggcttcgcgtgtgtttgctttgctattttcggttctcgggagagatggtgcaggcgtggtgtgttgatgttgatgggtggagtagaagctcaggggagtggcagcggactaatgaaacgtccacctctgcgacgtagaattccactgaaaaaaaaatgctccagtgtaccataagctgcttcagatttgatcgtgttttctctcccatggtggcgtttctacctacatttttcttagaaaacacatttctagttactcgttcagttctgaattataaaatgttttgatttttctagatgtattgcttttgctacgtttagatatacacaatgtctagatagatagttaaagcaataaatctaagaaaaatcttataatttagaacgagacaatatgattcagagcaaagttgggttacgagagcaacatagaagaaaaaaaagtacaaagtggggaatagccatggcaattaaaatgaagttgtgtttaaaaattgcttgctccagttctcaggatctgcctagttttccggtccgttttttagaatcgttttgatgaaaatcgtccgaaatcgacataaacatgccgagtcgtagtgatagtagtaatccgtcacttttaaaacctaaaccatataaactcgtttatctttctttgcacgtaattcttacgatactcatattaataaaagtttgttagaaaaaagctaaaacaaatagtcccatattaggtactctcacactttccagtctagaccttgtactatatagttgggccaac

SEQ ID NO: 12474 - DNA, 93 bp, Zea Mays
ggtcatgaagtcccgcatggcactggggttaccgagcccggagaagtcccaacaaaagttgggctcgtcatcttcctcggaacccgagggtcc

SEQ ID NO: 12475 - DNA, 106 bp, Zea Mays
gttgggtctttgtttttttttttttttttttttttttttttttttttttttttttttttttttttttttttttttttttttttttttttattaatatttttttatt

SEQ ID NO: 12476 - DNA, 3096 bp, Zea Mays
tgcagttgtccttcaccacagcggagtgatggctgttgtcaacccaaccaaccttgctattgacgacgatgacgacgatactcccatttcattcaagaggacgagtaactctacgaagactgccaggcccaccccttccaagcatgaggggtcgtcaggaggtaatggtgcacctgttaggatccccaaacctgtgtctcccaatccgcagaagaacggagccaccggggcttcaaggccgttgcatatgaagccaccgtcatccagtccaaaccatcgtccttctggatctggccagccaaacagtttggcacaacatagttcaaaggctaatagcattgacatgagtaaactgaaaagacctctcgtcaaagatgagagatctgatgactcagatgacgaggtgccgattgggttaaggagaaaggttgaggagaagaagttgaagggagttgatactcgggttcagaagacagatgactcagatgacgatgataagccattgggtctcaagatcaactcatccagaatgtcttccaacagagtgaataagcctgttctgcagagaactgtaccaaaggttgagcagcctgatgaagattcagatgatgataaaccattggcaagcaggttgcccagtaatgccggtccaaaaagtggaggtgatgtctctgaggattcagaggatgagaagccactggctgccagattttcaaaagttgctggtagtggaaacccaaaaatagcttcttccagcaaagggttaaccagtgatacaaatggccaacaaagtttgggtaaaaggcctctagacaatagtaatcaaacaagttcagctcttaagaaggctaaaccttcaaacgtttcagcttctgcaatcgttagaagagaaatcaagacagatgacaacacacctcttgcacaaaggctgaaaatgggagagtcttcgaaaggcaagtcatctgcaaagagtgtctttaagaagagtcctgcttctgtgaagaaggacatcaagaaaatgaaagggaaagggaaattaaagaagaacatgaaaaattctcagttctcaaagataatgaaggtcccccctggatctggtggaggaaagaaatggactaccttggagcacaatggtgttattttccctcccccatacaagcctcatggtgtcaaaatgctttacaatgggaaacctatcgatctgacaccagaacaagaggaggttgcaacaatgtttgctgttatgaaagacacagactatgcggccaagccaacattcattgataactttttcactgattggagaaaagttcttggtaaaaatcatattattaagaacttcgagctttgtgatttcacaccaatatatgaatggcacctcagagagaaggagaggaagaagcagatgacaacagaggagaaaaaaacattgcgggaagacaaattgaaacaagaggagaagtacatgtgggctgttgtagatggtgttaaagaaaaggtcggaaatttcagagtagaaccgcctggcttgttcaggggacgtggagaacatccaaagatggggaaacttaagcgccgcattctaccaagtgatattacaataaatattggaaaaggagctccagtccctgagtgcccgatacctggagaaagttggaaagaagtcaaacatgacaatactgttacatggttggccttttggaacgatccaattaacccaaaggatttcaagtatgttttcctggcagcaagcagctcactgaaggggcaaagtgacaaagagaagtatgagaagtccagaaaattgaagaattcgtgagaattatacaaaagatttcaaaaacaaagatgtgacgaggaggcaaatagctgtggcaacataccttatcgataaactagcccttagggctggcaatgaaaaggacgacgatgaagctgatactgttggttgctgtacgctgaaggttgataatgttacatgtatgcctccaaatcagattcagtttgactttctgggtaaagattcaataagatactttaacaccgtagaggttgaagagcttgtgtacaaggcaattgagggtttccgtgctggaaagaagccaggacaagatctatttgacaagattgatacatctaggctaaatgctcacttgaaggatctaatgcctgggctcactgcaaaagtgttccgtacatataatgcttccataacattggacggaatcttgcatgaagaaacagaagatggaactgttttagaaaaaatcgctgtctatcagcgggcaaacaaagaggttgccatcatctgtaaccatcagcgtagtgtctcgaaatcacatgagtcccagatgactagaatgaacgaaaagattgatgagttgaagtcccagatggaggagctgaaagcagacttgaacaaagcaaagaaagggaagcctctaggctatgattcagaggggaagccaaagaggaacttggctcctgaagcgattcaaaagaaggttgcaacacttgaaggcaagatagagaagatggagatggataagaggataaaagaggatctgaagacagttgcgcttggaacgtcaaagatcaactatcttgatcctagaataaccgtggcatggtgcaaacgccatgaagtccctattgagaagattttcaacaaatctctcctcgcgaaatttgtatgggcaatggacgttgacccggaattcagattctaggagaccattggctaccatgtgccagccagtttggtccagtttccagcccttctccctggacactaattgcagctaggaaaggaaagagctcggtgtttgttttttcaaagtccccaccccccctgctcgtggaacgaaggaaagcacccgtcattctctttgtaggcccttcttttttttttcttttggttcaattgcgctaagttcaatatgtattctgctgagaaatctgagctcgtttgagaacggttggacattgaattcatagtgagttttaatcttgaatatagatgacttgttgagggatgatcccgtggtcgtttgtgtgttttgtcgactagtgagcttgccttgtccaccaaagtca

SEQ ID NO: 12477 - DNA, 76 bp, Zea Mays
ttgagaacaagtccccaacaaaacttatgcatgaatagtgataataaagaatattattgggtaataaaagtggatc

SEQ ID NO: 12478 - DNA, 479 bp, Zea Mays
tggagatgttgtgaaggcgcctcgtgccggatacgtgagtggcctgaaggttactgcaggccaacaagtttttgactccagtgtccttttcacaatcaaggacagctctgcaaactgagatggagcgatcactgccctagagtagttgcactgcaactgcatcaagcacccagcggatgctcgtccagatagagaagcgaaggaaataaactgctgggttcgtctgcgggcaatccaatccggcagggcaagcagacggcgcatggtgtttcccggcttgatgcgaatccatcatccgccgcaacaattccattgcgtagtgtacacgaacatgaaactgtaccacgctgagcaagaggaattcttgtttgatttgtgcaatgaaataagttgattccatcaccgttccatttctcataattagtaataataatgaataattagtaataatataatgaggaatgtgtttattttaccaa

SEQ ID NO: 12479 - DNA, 1747 bp, Zea Mays
caggtctcggtagtaaaccacgcaagagaaaataaaatgacagagagttgtatgttgtagacgggcgagtgcgacgagcggagaacgtaatgccagcgctacaccgctgacgtgtccgccccggctccgggtgaaggtcaaaaggggcaaagggcggggggaaaccgtgggccctatatagcgggccttctcgctggagctaggagaaatcgccaagccaagccaagccagaagcggcagcctcgcgcagcggtctggtctctctggtgggtgcccctcttcgccggtggccggaaagggtagtggagtgggaccgctcaaggagaggccggcgtccccaagtctcacttccgccgtccgcttcccccctgggatcgagggaggaaggaaaggaggtgcttcacaatgaaggccctcattcttgtcgggggtttcggaacccgccttcggcctttgactctgagcttcccgaaacccctcgtggattttgcaaacaagcccatgattctgcaccagatcgaagctttgaaagaagttggggtcacagaggtggttttggctatcaactaccgcccagaggtaatgattaatttcttgaaggactttgaggataagcttggcatcacaattacatgctcccaagagactgagcccttaggaaccgctggccctcttgctctagcaagggacaagcttgcggatggatctggccagccattctttgtcctcaacagtgatgtcataagcgaatacccatttgctgaactcatcaaatttcacaagtgtcatggtggtgaggcaacaattatggtcactaaggtggatgaaccatcaaaatacggtgttgtggttatggaggaggcaactggcagggtggaaaggtttgttgagaagccaaaaatatttgtgggtaacaagatcaatgctgggatttacttactgaacccatctgtccttgaccgcattgagctgaggccaacatcaattgagaaagaggtcttccctcaaattgcagctgatcaacagctctatgcaatggtccttccaggtttttggatggatgttggtcagcctagggactacattactggcttgcgtctttatctagactcgattaggaagaaatcagctgccaagctagctactggagcacatgttgttggcaatgtgctggtgcatgagagcgccaagattggagaaggttgtctgattggtcctgatgtcgccattggacctgggtgtgttgtggaggacggcgtgaggctttcccgctgcactgtcatgcgcggcgtgcgtatcaagaagcatgcttgcatctcaaacagcattatcggttggcactcaactgttggtcaatgggcacggatagagaatatgactatcctgggggaggatgttcatgtgtgtgatgaggtgtacagcaatggcggtgttgttctcccacataaagagatcaagtcaagcattctgaagcctgagatcgtcatgtgagctctccagttttagctacagtacattcttaacttctttgacgaagggaggattgcagatccccttttataaacgatattgcttggtatcttcgatctaatgcaaacagcttcatacttggtctcttgttaaactattgacaatgtatcttgttttttgttgaaaagtttagtacttgagtgtcaatcatacgtattcgcttgctaaaaactattgacaatgtatcttgttctttgttgaaaagtttaaaaaaaat

SEQ ID NO: 12480 - DNA, 94 bp, Zea Mays
tctattatgatggcaaggacaactccattgccactgagagtcaaatcaaggtagagaacttgggaaatcaattggttcaacaaaaaggaaagcc

SEQ ID NO: 12481 - DNA, 1422 bp, Zea Mays
gctgtgtgggccagtaaatggttgctccaactcgaggtggacgatttgaggttatttttgtttccccaactggtgaggaagttaagagcaagagacagctaacccagtacctgaaagctcatcctggaggccctgcatcctcagagttcgattggggaaccagtgatactcccagacgctcagcacgcttgagcgagaaggtcaaggcaactgagagcccagagggtgagaagacccctaaacggggaagatcaagttctaagagaggcaaaaaggaggaaaaagaagacacagaggctgcaaatgaggctggagaagatggtgcttcggaggaaggtaaaggtacagatgtggagatgaaagatgctgaaaacgctgaagacgagaagaaagaggtcccaaatgcagatgctgcagagaagactgaggaaggtgaagataagaaagaggaggcccctgctgtagatgcagcagagaagactgaggaaggtgaagataagagagaggaggaggcccctgctgtagatgcagcagagaagactggtgagaaagaggtggcccctgctgtagatgcaacagaggagacagaaaaaagcaccgaaggccaagcacagcctaattatgttgctgccccagaatctgagtataaaggagacggaaagccaggtgaatccgaagcagctccccttgcatttgttgatgaaacagctccccatgtaattattggtgaagagaagaaagaggaaaatactgagaatgagaacagtcaggcagccgaatctgccgtgccttccctggcatctttagagggagagaagaaagagaatggtggtgcccctgaacaaccagccctgcctgtagctgagacgaaggcagatgctcctccggcagaggcagaaaagggggctgaaaattcaggccagccgaataccggctctcaagaaccgaaggcagcaaactgcgacgaggggcagattcaacctggtgcctctgctgtgaggtgcacataagggagcttgatctcagatgggactctgttgcgttatgtctttaggacgatacctcgcatttgctttgagaattgtaatcgtggttaacctgacagcgctgtgtagcactaggctgcccagcacgtagttatcctttcgtttcttttataacggtggtgttgcagcatgggtaatgggccggcctgtgctgcctcagccaccactgcatacccagtgtaagtgtaactcgttattagcgtggtcgacattgatctgtggagaggactgcaggacagtactgtcctcgacagctgtaacgttacgttttgtgtgttcccttgtgttattgaacttatattatgatccataaataaagccataagcgtggcagggtcattccctgaccaccttcaggcatcaccatttgttggcc

SEQ ID NO: 12482 - DNA, 531 bp, Zea Mays
tagaaatccgatcccccaccgcaatcatcaattcatcacggcatcacccccaatttcttctactccaccgaaacataaatctgtagccagcagaaagatcttgcggaaggtggcagacgcatagatgaggacgactaccggctgttctgtggagatctaggcaacgaagttaatgatgatgttctatccaaagcattctcacggtttccatccttcaacatggcaagggttgttagagataagaggactggcaagactaaaggttatggatttgtgagcttttcaaaccctactgacttggctgcagcaataaaagagatgaatggaaagtatgttgggaatcgccctattaaattgcgtaagagtaactggaaggagaggacagatgttgaggctctgcaaagacaaaagaatcatgtccaaaggaagcctaaaattcccaagaagagtgttcttcacaagtagagatatataggccctaccgagggtgaagggcagctcatgagttctgatggatgacttatatgttgc

SEQ ID NO: 12483 - DNA, 1964 bp, Zea Mays
caggcacatcagagaacactaaggtggtggttgagagtggtgctgtgcccatctttgttaagctcctcaactccaatagcgaggatgttcgtgaacaggctgtatgggctttaggtaatgttgctggtgactccccaaagtgccgtgatctggtgctaggccatggtgggctattccccttgctgcaacagcttaatgagcatgctaagctctcgatgctgaggaatgccacatggacactatcaaacttctgccgtgggaagccacaaccgaactttgatcaggtcaaaccagcattgccagcacttcagcaacttatccactctcaggatgaggaggtcctaactgatgcctgttgggctctatcatacctatctgatgggactaatgacaaaatccaagctgttattgaatctggcgtgttccctcgccttgtggaacttctgatgcatccttcagcctctgtactgattccagctctgcgcacggtgggtaacatcgtaactggggacgacatgcagactcagtgtgtcattgacaatcaagcacttccatgccttttgaacctactgaccaccaaccacaagaaaagcatcaagaaagaagcatgctggacaatctcaaacatcacagctggtaacagggaacagattcaggccgtgattaatgcaaacataattgcacctctggtgcaacttctgcaaactgctgaatttgacatcaagaaagaagcagcctgggcaatttcaaatgccacttctggtggcacacatgatcagatcaagtaccttgttgcccagggttgcattaagccactctgtgatctgcttgtttgcccggatcccagaattgtaacagtttgcttggagggtcttgagaacatcctgaaagttggcgaggcagagaaaaatcttggtgcaggcgatgtcaatgtttacgcacagatgattgatgatgctgagggcctggacaagattgagaacctacagagccatgacaacactgagatatatgagaaggctgtcaagatgctcgaatcttactggctagaggaggaagatgatgccatgccctctggcgacaatccccagaatggcttcaactttgggaaccagccctctgttccatcaggtggattcaacttcggctgaagatgcccatttggaatggcggctgtgccattgtgccttggcctagtggttggggctagtcagagttggggtagtggcgtcgtcctccaaaaccttggttcggtcccattggtctggtctcaggtgtttgtcatgtcagtcccagtcagcagggtcagtccttgtgctgcatcaccagtggtgctgcatggaagtggtcagtcttcaaggtcagccggttggatcatttgggctcttgctcccaccgcctctggtggtaggcatgaagtcgcaggtgttgtcgggagttgggttttgcctccaatatagcatgaatgaattatattgttttacctatttgatgaggtagaagaaaagaaccttggaagatagggaatgtgttggtttttgtcaaagcggttcctgtcctgtatgacatgttgcatgagtattgacacaaattataagacataatggcaaataggtttttgggagtctcttgagtctcgagtcttaactcattggctcattgtaggtttgtggttcgttatgtcatcttctctgttgtagtcacttgtgcttcctcaaacgtggttttggcaccattgtctcaaagtcgttccaagcttatctagagcagtagaagacgagggttgtttgcggcatttgaggttatggttcctagtttttttttgtggaacctgatttatcgttgtatgatcatgacaaacaattggtagtaaggaaatcaaaaaggggaaatccgtacatgtttgctctgtttcatctgtatcttgcatgttaaatatttaaatataaaaagcattgagtcta

SEQ ID NO: 12484 - DNA, 389 bp, Zea Mays
ctagactgtttgattgagtgtgaaggttcagacgagaccgtctctaaaaaaaatattatcactcgaatgctgtcccggttcatccctcggaatcagactgacaataccgtcctcaggacaaggcacctcagaagcccttctcgtccgcgccgcctccttgaccccgctggccggcgagctgctcagcgcggcttttttttgcatccacaatgccgcagcttggcacatgttcattgcctggagctgcaatctatggcacttcaactaggagatttggaggtttggagtttcagcaacataaagttaatcacatctcatttggtcggaaagcgtctgttaaagcaacattgaaaacatcatcataccaagatttgttactaaacgatcag

SEQ ID NO: 12485 - DNA, 933 bp, Zea Mays
cttctgctttgaaccacactctggttgagctccagtatttgcatgattatgctggagttaatgcaagcatcggtctgacagccaatcctgtagtcaacctctctgctgcctttggtactaaggctgttgcagttggtgccgatatctcacttgatactgcaactgggaacttgactaaatacaatgctgcactgaggttcactcatgaagaccttgtcgcatccctgaacctgaacaacaagggagacagccttactggagcctactatcacaaggtgagcgaattgaccaacacagctgttggggcagagcttacccacagcttctcgaccaatgaaaacaccctcacctttggcgggcagcacgccctggacccactaaccgtcttgaaggcccgcattaacaactctggcaaggccagtgccctgatccagcacgagtggaggccaaagtcgctggtcaccatctcggccgaggtcgacacaaagaccatcgagaagagctcgaaggttgggattgctgtggccctcaagccctgattggttatacagaccattttttccccttctaagttcctagcatgactgtttgggtcagatcagatcagctggggaaaacaaaactgttggggttcctggcatctttgtttgctgtagtcagttgatttaatgaactccgaaatgtctcatggaggaaaattttcggtcgcctgtgtagcgctctgttaaatgagcaaccttcacaataattcaagctcggtagaattctgaacttgttaatgatgattgatggtgactgtcaactgaggtaggggaggttctgttttcagcaataatttttctaccttgtggtgtcggggactttacccaatcgattcatgtgtttttgtggtgcagtatttaattaatgtcaagcgttttttattgcaattta

SEQ ID NO: 12486 - DNA, 689 bp, Zea Mays
atcctcctcagatgctttgcatttggaaaatcacagatgtttgacgatcaagacctgggcttctttgccaatttcctgggcatcttcatctttgtcttggttattgcgtaccacttcgtgatggcagacccgaagtacgaaggaaactgatgtcctctagtgcaaagatcctattatctgcaggccgaaatagggctatactgttagctaatgctagtgagatcgcttgacactttgagtgcatatcatggaagctggacatgcagttcctggcattttggttttgcccatgttttaatctgctgaattagtaaatcctggagaattcaaaagcgttttcaagtactgcagttggtggttgtttctggtcctagtgtatgcatgccagaatcttatgaataatattctttgttttgttgcctatttagctgtttagttggttgttagcctgtcaagaaactggggaacggctccgttactagactacattgagtcgtctctcacattggagtctgggagcaccaccaggcagaggcagccatgttcttatgttgttttgtgctgtctgctcaagctttcgttcatctcacctgaggcctcccttcgttgaagagagagcttggatgagagctctgtttttccttctttttttattatttactattcaaaaagtcgagaccagaaaaaag

SEQ ID NO: 12487 - DNA, 1909 bp, Zea Mays
tgtcactgttgacaaatgaattattccctaccgatccagtctctgttccccttcttgtatttcatgataagggatctgcatattgctaaacaaacacaagacattggattttatgctggttttgttggcgcttcatatatgtgtgggagggcagtctcctcaacagtatggggaatcgtggctgataagtatggaaggaaaccagttatcgtactgacccttattgcaatagttatcttcaatactatgtttggactaagctcaaactattggatggcattaatcacacgatgcctgcttggaatcatgtgtggttatctcgggccaattaaggcttatgctacagaagtgtgccgaaaagaatacaatcatctggctttggcagttgtttcttcctcacgaggcattggtctcattattggtccagctattggtggttaccttgcgcagcctgcagataaatatccaagtatattctctcagacgtccatatttgggaggtttccatactttcttccgtgcctgtgtatatcaatccttgcagttattgctctaattgcctgcatctggtttccggaaactttgcataaacacaatggggatgccgttgataattcagttgaaaccgtagaagaatctcttgctggcaccgacactgaagaaaatggaggtggcggatgtctaaaattatttacaaactggccgttgatgtcagctattactttatattgtatcttctctcttcaggatgtggcttatgcagagacattctctctttgggctgtcagtgacagatcgtttggtggattaagctttactaccacagatgtgggcaatgtccttgcgatgtcaggtctcttcctttttctatatcaaatgttgatctatccgttccttgccaaaacggtggaccacatcacattagtccgtgcagtggcgttattgactctaccggttcttgctagctacccattctttccttcgttgtccgggttcgggctcatggtggtagtaaattgtgcatcttttctgaagaatacattctcggtaactaccattaccgtgttcaacattttgatgaatgaagctgtgactcaggatgtaagagccgcagccaatgggatagctgtaacactaatgtccatctctaaagcggttgctccagctgttgcaggaatcatattttcgtgggcccagaggcgtcaaacagctgcatttcttccaggcgaccacttggtgttcttcatactgaacatcttcacgttcatcggtttcgtcttcaccttcagaccgtttttcgttcgaggcagtgccaagcactgaaacatggatgaaccggacgacgacccatggtatcctatccaggggcaatcgaatataaattttcttccggcgtggccaagggaggtgccgagtctgtaccagtacgacgactcaggccagaacacacggcgtatggtatggtacacagcaaggccgtgttgttgctgtaagttttgtaatttctgtttccttctcggcttcgcagcatgcagttgctgtatatgatggaagaacactctgttactgggcatgttgcgcggtttccacgcgtgtaagtaatgtagaagtcgctatggtaggtatttccataccgtcattagtggatcattgattttttttttgtaagaaggttattgcaatgccctttttccgggcatgaataagaaaaaggaaatatgcttatatgcatggtatgaataagtgagcaatagacttgtactgtgttcttgatttatttaaaatcagactaagagaactggtgacattttaaaccattcgtacaagaaccttgtactacctcagcacgttctcatttgaccatgcaattctggtcggtgaaattcttttcagccttgtgttggcgcca

SEQ ID NO: 12488 - DNA, 882 bp, Zea Mays
gggaaagaagagaacaaaaataaagcaagaggcgagaggagagagcaacgacgccatcggagggaggaaagagaagaagacgatccgctagcgtgtgcgtggcgacgagatgtggcggaggcgagtgggcgccctcctccgatctccacgaacttcttcctcggcctcctcggcctgccagagccgccgccaccatcttctccccagcgaggaacctcttgctctcaaccgtcttgccaggctcttcacgtcccaggctggaagtgatggtggcgatacccagaagccctttattgcttttgtcttaggtggtcctgggagtggcaaaggaacacagtgcactaagattgcttcggattttggatttgcccatctgagcgctggtgatattctccgacatgaaatagcatctggcagtgagaaaggggagttgatcctagaaatcataaaggaagggaggattgttccgtctgagataactgtggaactcatcagaaaagcgatggaaatgaacaatgctaaaagggttcttattgatggcttcccaaggtgtgaggaaaacagaatcgccttcgaaaggattgttggaacagaaccagacattgtgattttctttgactgtcctgaggatgagatggttaaacgccttctaggccgtaaccaggggagagttgatgataacattgagacaatcaagaagcgtctaaaagtgtttgaaagtttgaacattcctgtcgttgactactactcttcaaggggaaaagttcacaagataaatgccacgggcactgcagatgaaatatttgaagcagtccgtaggctgttttcttccttaagaggcccttttcggagttcgtgtccaatccacctgttcaagacggg

SEQ ID NO: 12489 - DNA, 2936 bp, Zea Mays
ctagaatccggttccgcgccgatggattccgtatttccgtggcagccaagtgaagcaaaggctggtataaaggaatgcgacaagtcagtcggcaatcttctgtatgcagtcgccaccaagtacccaactaatgcacttgttcaccgtcctgtccttattagctatgtcttgtcaacaaagataaagaaccccgcacagctagatgctgctctgtcatttcttactaatactggtcctgattctctagatgtggtcaaatttgaagaagcatgtggtgtaggtgtggttgtttctattgaggaaattaaatctactgttactgatgtgcttgaggagaatatggaagctataaaggagcagcgatatcacataaatgttggtacactatgcggacaggtcaggaagagacacccctggggtgatgctaaggcgataaaggaggaaattgacaagaggcttgcagaaatcctaggtcccaagacagaagctgacaatataaaaccagtgaaaaagaagaaggaaaaaccagcaaaagttgaggagaaaaaagttgcagttgccactgctgccccaccatctgaggaggaattgaacccgtacactatatttccccaaccagaggaaaacttcaaggttcatacagaaatatttttcagtgatgggaacatatggagagcgcataacacaaaggaaattttagaaaaacatcttaaagcaactggaggaaaagtgatgacccgttttccaccagaacctaatggatatcttcatattggtcatgccaaggctatgtttattgattttggtctggctaaggagcgaaatggccattgctaccttagatttgatgacacaaatccagaagctgaaaagaaagaatacatagatcacattcaggaaatcgtccattggatgggatgggagccctacaaagtaacatacacgagtgactatttccaagctttgtatgaacatgccgttgagttaatacagaaagggctagcatatgtggatcaccagactgcagaagaaatcaaggaatacagggaaaagaagatggatagtccatggaggggtaggccaattgaagagtctctgaaattatttgaagacatgaggcgtgggttgattgcagagggtgcagcaactctccgtatgaagcaggatatgcaaaatgagaacaaaaatatgtctgacttaatagcatatagaataaaattcaccccccatccacatgctggcgacaagtggtgtgtctatccgagctatgactacgctcattgcatggtggattctcttgaaaacatcacacattcgctgtgcacacttgagtttgacatacgtcgcccttcatactactggctacttgttgccttgggcctttatcaaccatatgtgtgggaatattcgaggctaaacatatcaaatactgtgatgtctaaaagaaagttgaatcgacttgtgacagagaagtgggtagatgggtgggatgatccccgcttgttgacactggctggtctccggcgacggggagtatcatcaactgcaataaattcctttattcgtggaatcgggataacgagaagtgacaatagcttaattcgtgttgatcgtctagaatatcacatcagggaggagcttaacaaaacagcccctcgaaccatggttgttttgcgacctctaaaggtggtaataactaacttggaagaaggaaaagtactagaccttgatggcaaaatgtggcctgatgcttctgatactgatgcttcctcccactataaggttccgttctcaagaactgtctacattgagaaaactgattttcgcctaaaggactcaaaagactactatgggctagcccctggtaaatctgtcatgctaaggtatgcgttccccataaaatgcacagatgttatctctggtgatagtcctgatgatattgttgaaattcgagctgaatatgatcctttgaagacttctaaactgaagggtgttcttcactggattgctgagccagcacctggtgtagagccattgaaggtggaagtaagattattcgagaaattgttcatgtcagagaatcctgctgaattggaagattggcttggcgatcttaacccacactcgaaagaggtgataaaggatgcttatgctgtaccatcacttgccactgcggttctgggtgacaagttccagtttgagcggcttggttacttcgccgtggatactgactccacacctgagaaactcgtgttcaacagaactgttaccctccgtgattcgttcgggaaagctggacccaagtgactgttcagtgtaatttagggagggcgctggttttgatcggttgcagaggcgcacctgaactatacagtttgtgaagaaaatggtcgtctaatacagaacagtttaaaggccttactctttataaaatttagggttttttaatctggtgccctcagttttggtgatgtgttcatttgtaccccttgtttacttcgaatcagattttgtatgatagtgttagtgtcccgattctaccgtctgtaaccgaaaggtcccgggttcgagccccagcctctgcatattatgcgggtaaggcttggcgcttaaagatacaattcccaagaccccgcacagtgcgggaagcctacagcactgggtacgcctagtgttagtgtcccgattcccattctgtttgatgtcatactattgtgatgggagttctgttttcccctgcgtcctcttttttttgcaaatccttactgtgatactactccctttaattttcaaattataagccattttgatttccttggagagtcacatcacaagtctattaaaattataaagaaaacgaagatttatcaaaattataaagaacaaatatttataacataaaatagatatagtataaaaatattataaaaacataa

SEQ ID NO: 12490 - DNA, 696 bp, Zea Mays
gacagacctggtggagtcaagtactctaccaaacttgccccttcccttcccagcgcgctctctctagccggcgacgattgggcgagcggcgccactcaacgccaggtcttcgtgaaaaccatcgccggcgatgagtttcaaccagtctactgtcaaggggcaggccaggagggagaggcctagggctcgccctcatggcctgacgcagcagaggaggcaggaaataaaggaagcttttgatctgtttgatacagataactctggaaccattgatgcaaaagagctcaatgttgccatgagagccttgggatttgagatgactgaagagcaaattaggcaaatgattgctgatgttgacaaagatggcagtggagcgatcgactacgaggagtttgagcacatgatgactgccaaaatcggagagagggatagtaaagaggagctttcaaaagcattccgcattattgatcaagatggaaatggaaagatttctaacattgatatccagaggattgccaaagagctgggtgtaaatctcaccctcgatgagatccaagacatggtgcaagaggctgatagaaatggtgacggtgagatagactttgacgagttcatcaggatgatgaggaggaccagctttggctactaggtgtatttatctggtttatgaactgacgtcttcatcgtatgtcgaag

SEQ ID NO: 12491 - DNA, 431 bp, Zea Mays
gcgcctgctgccttccctggatgtggtagccgtttctcaggctccctctccggaatcgaaccctaattctccgtcacccgtcaccaccatggtaggcccctatcctaccatagaaagttgatagggcagaaatttgaatgatgcgtcgccggcacgaaggccgtgcgatccgtcaagttatcatgaatcatcggatcggcgggcagagcccgcgttagccttttatctaataaatgcgcccctcccggaagtcggggtttgttgcacgtattagctctagaattactacggttatccgagtagcacgtaccatcaaacaaactataactgatttaatgagccattcgcagtttcacagttcgaattagttcatacttgcacatgcatggcttaatctttgagacaagcatatgactactggcaggatcaac

SEQ ID NO: 12492 - DNA, 463 bp, Zea Mays
catacatgtgactgggcctactagccgatcttgtcttgcatggtgcatcatggcattggctgttgtgagaaatgagttctatgatctgcgcaataaattccagactatgcttcagcttgagcagcaaatccaggctcaacaataaatcgaagcagaaagcgtagctgcatgtggcctcacatgataagtgtatctttaaagatgtagaccatgttctctgtgttcctacaattgtgacaaaatcatcgtcgttgaggtcggctcacatgcatgtaactgttagctataacaattattgtctaacgttgtccttgttactccacccgtttgtgttggattgccatcgaccatcatatgaaaactttttttttccaatcccctccaatccatgtgggatgagaataaccggtttcctggtaaacctgcaagtgaatttctgcgctgtggaaacatacgacgtccg

SEQ ID NO: 12493 - DNA, 3269 bp, Zea Mays
cccttcttaataacaaagcacaacacaggcaaagaggatccgtcttcctccgtgctgcctcacttccgccgcacgcgaccggagaggcggctcactgcgtagcgccgcgagcccaaccctagccccgcccgcccgtccattccttccgtccttctggtggaccagctgccgagcccctccggcaggcatgtctccccccgagaaccccagccccgcggcgccggccgagccgtcgcagccgccgccaccggcggccgcggccaaggggaaggggaagaaggacgagaagaaggatgacgatctgtcggaggaggatctggcgctcaaggagcagctggagctctacgtcgtgcgggcgcaggacgcggatcccggcgtgcagaagctcgcgctcgagagcatgaggcaggagattcgctctgccacgagctcgatgacttcggttccaaagccactgaaattcctccgcccacactttggaactctcaagtcctatttcgaaacaatgcaagagtctgagctcaagaagtacatggctgacattctgtcagtgttagctttgacaatgtctgttgaaggggaaagagagagcctgaaataccgtttgttgggctctgaaggtgatattggttcatggggtcatgaatatgtgagaaatttggccggcgagattgcacaagaattccaaaagcgtcaggatgatgacttgcccattgatgtcctaatggagctagtgcagcaaattgtttcatttcacatgaagcataatgctgagcctgaagctgtggatcttcttatggaggtcgaagaccttgatttactagttgagcatgtagatgctacaaactacaaaagagcttgcttgtacctgactagttcatccaaatttctccctgcccctgatgatatgttggcacttgacatagcatataccatctacatgaagtttggagaccttgcaagcgctttgagaatttctctgcagcttgagaaatccacccagtatgtgaagcaagtctacacagcaactgatgaccttctgttgaagaaacaattctcatatctcattgcacgccatggtttggctatggagattgatgatgagatcgccgctgatgacaatgacaaggaggttttgcaagaaatagtaaataatactaagttgagtgagggatatcttactcttgctcgcgatattgaggtcatggagcctaaatccccagaggatatatacaaggtccatttgattgatggtcgtggtgccagctccagtcttgattctgcaagacagaatttagctgcaacatttgtaaatgcatttgtgaatgctgggtttggccaggacaagttgatgaccgctccatctgattcatccagcagcgggtcttccggaaattggttattcaagaacaaggaacatggaaaagctagtgcagcagctagtctgggaatgattctcttgtgggatactgattccgggctcgctcagcttgacaagtacttgcatagtaatgatactcatgttgttgctggagctttgctaggtattggaattgtcacttgtggggtgaagagtgattgtgatcctgcgtttgctattcttatggagtatattggcaaggatgactcaaacattcgtattggagcaatattgggtcttggaattgcatatgctggttcccagaaagaagagcttaaaatgcatctatctgctgtgttgggagactcccaatcacctcttgaggtcttggtcttctcggccattgccatgggattggtgtttgtcggttcttgcaatgaagagattgcacagtctattatatttgctttgatggagcgtagtgaggccgagttggcagaacccattatacggttgcttcctgttgcgcttggccttttatatcttggaaaacaggatagtgtggaggctaccgcagaggtctctaaaacatttgatgagaagatagggaagtactgtgatgtaacacttatgtcactggcatatgccgggacaggaaatgtgcttaaggttcagaaacttcttggcatttgctcacagcatcttgagaaaggtgaaacacaccaagggccagctgtcctagggattgctcttattgctatggctgaagaattaggagctgaaatggctgtacgttcacttgagcgtcttctgcagtatggcgagcagaatataagacgggcagttcctcttgctcttggtatactctgcatatctaatcccaaggtaaacgttatggacacactaagcagattgagtcatgatgcagacgccgatgtgtcgatggctgcaattatctcattgggtttgattggtgctggcacaaacaatgccagaatagctggcatgcttcgcaatctttcaagttattactacaaagaagctgctcatctgttttgtgttagaattgcccagggccttgtccacctcggaaagggcttgttgaccctttctccataccattccgatagatttctcctctccccgatggcacttgggggccttgtaaccgttctccacgcgtgccttgatatgaagtccaccatcctagggaaataccactacatcctctacattattgtcctggcaatgcagcccaggatgcttttgactgtcgacgaggatctgaagcccctgtcagtacctgtccgcgtcgggcaagcggtcgacgtggttggtcaggcaggaaggccgaagacaatcaccggcttccagacacactccacgccggtcttgctcgcagcaggggagagagctgaactagcaactgaaaaatacattccactgaccccggtactagagggctttgtgattctgaagaagaacccagagtaccacgaggagtgaagacccagatagcatattggtgtttccgaggcccgtccagataggcagcctcgaatttgcgcggccttggatatctatcttctttcttgctcagcggcagcgccatcctggccctctccttcctgggtccgtgtccatgtttgattcttatcttaccggagctgtggctaactgaaagagctgtctttggttggcttaacttgtagtacgaccgtatttattaattactagaagacgtttatagagcgtactctgtacggtgaggtgatgacatggtggcatagcgtagtgtaattttctttttggcgttcgtctcggccaatcgatagcatacatagtccttgttttgacattgtgaatcatcattatccgttccctgtattttggggtttcaaaaaataaa

SEQ ID NO: 12494 - DNA, 1132 bp, Zea Mays
acgaggccacgacagagctgacgcaaaatcgctgcccgccgcgccgacaagcaacgtgggttcaccagtaaacaattcaaattcgacttctcagctcgttaaatatacggtcggctccgctcgccccttccgctcgactcaaatcgtgaaactattgagaaaattccattccaacgacatcgaaggagcctgcgaagcgagcgagagtctataatggcggacggaggcgagctgcagctgctgggctcatggtacagcccctacgtgatccgcgccaaggtggcgctggggctgaaggggctcagctacgagttcgtcgaggaggacctctcccgcaagagcgacctgctgctgaagctcaacccggtgcacaggaaggtgcccgtgctggtccacggcggccgccccgtgtgcgagtcgctcgtcatcctgcagtacgtcgacgagacctgggcaggcaccgggacccctctcctccccgccgacgcctacgaccgcgccatggctcgcttctgggcagcctacgtcgacgacaagttctgcaaggagtggatcaaactgtacaggtcgacgacggcggagaaggcggcggaggcgctcggcggcgtggtccccgtggtggagacgctggagcaggcgttcagggagtgctccaaagggaaacccttcttcggcggcgacgccgtcgggctcgtggacatcgcgctcgggagcttcgtggtgtggatcagggtggtggacgaggcggccggcgtaaagcttctggacgaggccaagttcccggccttgacggcgtgggcggagcgcttcttggcggtggacgccgtgaaggaggtgatgccggacgccggaaggctgttggagcactacaaggggtttctggctaaacggtctccacctgctggttactgaacgctgtaactgtaagcctgtaacagcaagctcagtgttcgtgtacttttccgtgcgttaacgtgtactagagttcaggaaaggctttgattctgtccagagtccagacgaataaacgaatgttttttatacttcctccgttgcaatttatactttatttgacttttttacttaaagttttatcggtttgttttattaaaaaattctaatttattattaa

SEQ ID NO: 12495 - DNA, 1743 bp, Zea Mays
aaaaaagcagaaatttaacccagcaattgggagaatagttgccccgaaaatggttaatggtggcagagtgagcaactgggcatgtattaacttctctcggaatgtgcaagatagtgccgctaggggtttctctcatgagttggcagtcatgtgccaaatatcaggaatggattttgctcttgagcctgtgctgcctccagtgactgcaaggccagaacatgttgagagagcgttaaaggcacgttatcaagatgcaatgaacatactgaggccacagggaagggaacttgatctgctgatcgtaatactgcctgacaacaatggttctctttatggggatctcaaaaggatctgtgagactgaactcggattggtctcccagtgttgtctgactaaacatgtttttaagatgagcaagcagtaccttgcaaatgttgcactcaaaataaatgttaaggttgggggaaggaatactgtacttttagatgctttgtcaaggagaatcccccttgtcagtgacagaccgaccataatatttggtgctgatgttacccatccacatcctggagaagattccagtccttccattgcagccgttgttgcttcgcaagactggcccgaggtcacgaaatacgctggactagtgagtgcgcaagcccatcgccaggagctgatacaggatcttttcaaagtatggcaggacccgcagagaaggacggtaactggcggcatgataaaggaacttctcatttctttcaagagggcaactggacagaagccccagaggatcatattctacagggatggtgtcagtgagggacagttctatcaagtattgctgtacgaacttgatgccattagaaaggcctgtgcgtccctggagcccaactaccagcctccagttacttttgtcgtggtacagaagcgccatcacactaggctgtttgcgaacaaccacagtgatcagcgcacagtcgatagaagcggaaacatactgcctggcaccgtggtcgattcgaagatttgccatcctactgagtttgacttctacctgtgtagccatgctggcattcagggaacgagccgccctgctcactaccatgtcctgtgggacgagaacaagttcacagctgacgagctgcagaccctgacgaacaacctgtgctacacgtacgctaggtgcacccgctccgtgtccatcgtgcccccggcgtactacgctcatctggcagccttccgagctcgcttctacatggagccagacacctctgacagcgggtcactggccagcggtgcccgtggccccccacccggtgcggcacgcagcagcacgagaggggccgggagtgtcgaggtcaggcccctacctgctctcaaggagaacgtgaagcgtgtcatgttttactgctgagacgctggtgggctgccttcgccaaggaaaatgccctggagcattcccatgtacccgcactgtttcggtgatacagtactatctaacgccgattttgcgcgttaagacttccagtgatctgggaaatttcttgtacgactgttgtagtgttgtgtattcgtaatgtgatgacgcggcagttcttctaggagcttagtgccgtgtaaaatatctgttgtaagttgtaacctgtcaccctctagtgttatgtcatgatgaaccaaattatttgttgtcattccatgtacttcgccaagtatttgttgtcacgatgttctaggatgatttttttt

SEQ ID NO: 12496 - DNA, 761 bp, Zea Mays
tcatctagacacaatttggaacttctctagtggcttgatattggaggatgtgacatccaaaagcaagaaatacgggaggcggttgaattacccttgactcatcatgagttgtacaagcagattggtattgatcctccaagaggggtgcttctgtatggtcctccgggtactggcaagaccatgcttgccaaagcagttgcacatcataccactgctgcttttatcagggtcgtcggttcagagtttgttcaaaagtacttgggtgagggccctagaatggtgcgtgacgtgttccgtttggccaaggagaatgccccagcaatcattttcattgatgaggttgatgctatagccactgctcgttttgatgctcagactggtgctgaccgagaagttcagcgtattcttatggagctactcaatcagatggatgggtttgatcaaacagtcaatgtgaaggttataatggcaactaatcgggcagacactctagatcctgctttgttgcgtcctggtagacttgacaggaaaattgagttccctctgccagaccggcgtcagaagaggcttgtttttcaagtttgcactgccaaaatgaacctgagcgatgaggttgatttggaagattatgtttccagaccggataagatcagtgctgctgatataatagagttcaagtgtggtgttaaagactatcgcttcaaggtacaccttgcattttgaaaatgcgaaggtgaggtagtaatgataacatctatatc

SEQ ID NO: 12497 - DNA, 2161 bp, Zea Mays
gagatcctcaggttgatgcgacgggaagattggcgggcggacacggacccaaccccacgtccccacccaacgcatcgtcctcgcgaacaaaaccgacgcgcccaccccgtcccggctccggctgtgtggctcaccttccactttcccccacctccaccatcgtgcctcagcatcagcactcgaatgccacgagactgacctctccctcgtcgccgcagccgcgatgcccgcaccgaccgccgagccggcgctcccggcggccttcctctgcgtcccgtccccgctcctctccacgccgctccccggcgctgcactctccgcctcccccgcgccctcctcccaccatgcctccttcctcccgcgcccgcgcggcgggccccgagcgctctccgtcgccatctccgtcccgggccccactttctccgtggcgtcgcggctccatcagatgtggggcgagttcgcgcggttcgtgcggctgcacgggaaccaaatagcgccgctcgggttcgcgtccatgggcctgggtttcggcggcggtggcggggataacgtcggcggtgggggaggagggggtggaggggatgtggatggggtaggcgaggtagaggaggccgcggcgcgggccgaggcgccaaagaaggtgctgatcctcatgagcgacacgggcggcggtcaccgcgcgtctgccgaggccatcaaggctgccttcacccaggagttcggcgacgactaccaggtatttgtcactgatctgtggactgaccacactccatggccattcaatcaactgcctaggagctatagttttttggtgaaacatggacccttgtggaagatgacatactatggtactgcaccgcgtgtagtccatcagcctcattttgctgcaacatccacattcatagcaagagaagtggcaaaaggtctaatgaagtaccaaccagatgtaattatcagtgtacaccctttaatgcaacatgtccccctccgaattctaagatcgaaaggtctcttggataagatcccattcgcaactgttatcacggatctcagcacttgtcacccaacatggttccataagcttgtcactagatgttactgtccatcaactgaggtggaaaagagagcactgaaagctggactgaagcccgcacagattaaagtctatggcctccctgtccggccctcttttgtcaaacctgttcgaccgaaggatgagctgcgaagagagttaggcatggatgaagatctgcctgctgttctattaatgggtgggggtgaagggatgggtcctattgaggccactgctaaagcacttggtgattctctgtatgatgaaaacctaggggaacccactggtcaaatacttgtaatttgtgggcgtaataagaagctggtcaatcgattgcaatccataaattggaaagttccagttcaggtgaaaggctttgttacaaagatggaagaatgtatgggtgcttgtgattgtatcattacaaaggcaggacctggtacaattgcagaggcaatgatccgtggcttaccaattattctaaatgattatattgctggacaggaagctggcaatgtcccctacgttgttgaaaacggatgtgggaagttctcgaaatctccaaaacaaattgcgaagatagttgccgactggtttggcccaaggtcagacgaattcagggtaatgtcccagaatgccctcaagctagcacgacctgatgctgtgttcaaaatcgtccacgatctgcacgagctcgtcagggaaaaatgttttgtgccccaatatgcatgtgcaacataaaaggccgtatcctctattttgtgtttgcttaatttttttaaccccatgcggcactagctatagctgattgtgaggattgcgaatattgattgatttgaaacgtttccgtaagagaaatgaaaaatgtattgaatgctctagtttaattttccgaaatactttttcaggctagtactgttgtgggtgctgcatgcagattgggttacgaacccaacccgatgaaattttcaatggattacttggacgacatggattttcttgggacatgtactttggtagaccgaaccgtcaagagctccgtctatccgggtttgatccagccttccgaaggctgttttgtctcaaaat

SEQ ID NO: 12498 - DNA, 3037 bp, Zea Mays
ccacaccacaaacgaacacaaaggcaccagcccccgcccgcgcaccgaaacctcgtcgcgtagcgcgggggcgaggagagggacggggggcgaggagagaatacccactgcggaatctcattctcatccagcaccgctccaccgctaaacccctctcgtgctcctcgacggcactgacgccgagtgcgacgccgagcgaggtcgcgactcgcgagggggaaccctagcagcgatagatctagagcgggcgctttcgatctgtccgggaaatggcggaggatcctgccgcggaacaggagacgcggcagctagaggaccggctcagggatgtcggggaacggctgcaggcgccttccgacgacgcggaggacctgctcaacctcctcatcgaagttgaggaatgtttaattaaagtagagcagtcacctcgcgaaagcatatcaaatgctcttcgcccagcaactgaagctctggtcaagaaagagctgctgggccatgctgattcaaatgttagacttgctgtggcatcatgcatatctgagatcacacggatcacggcgcctgatgctccatatgatgatgatgcaatgaaggatgtattctctttaattgtgggggcctttgagcatctggatgacatagagagccccttctttggaaggagaacttcaattcttgatactgtggcaaaagttcggtcctgcgtggtgatgctagatcttgaatgtgatgatttgataaatgatatgttccatcacttcttgaggactgctaattctggacattcagaagccatcatatcctgcatggaaacaataatgagattggtaattgaggagagtgaggatgtccaaccacagattgcttcatgtctactccaaaatgttagaaaagaagaaaaggaatcttcaccttcctttgagcttgctgaaaaagtgataggtacatgtcgtgaaaaacttaagccagtctttctgcaatcactaaaaggcacttccttgagcgaatacagccaaatcgtcgcatcagtttgtgaagaggtttcagatgacagggaagataacaatgctaatccttctgggaaggacatggtggatgatggcaagctctctgaaaggactatttctgatgaattacctcaggaatcttcaaagatggagcaagatgttagccgtcctgaacaagacggtacttctatgaatggtgatacagttactgctattagcagtggtgctactccgccagatactagtgagtctgatcaaggaccaccttccacaaatgagaagattgaacaaccatgctatgcccaaaacatagcagatgctatgcagttgaaatctgaccacaatgaaggtgctgagtccaatgctgcaaagcccaataagaaagctacccttggttcagtaaaaaatactaagctcaaaccgtccgataaatgtgaaccaactgtgcattctgatgctgacactaaaaagcaagatcttgtagcatctgcagagggatccaatggagcagccgatgatacatcaagacctgctgatagtacacctaaacccaagcgaggtcgtcctcctggtccaaagtcattgcagaaggctcctgggaaggatcaatctccaggtttggatttgaaaaaggtcaatgatgattcagctgggaagctggcgaaacgatcagctaaggatgagaagccttctgcaaaaaacactggtgaaggagaaccatctaagaagactcaaaagaacaatttaaaacagcataagggtgaaactctttctgaggatgatcctgccaaggatctgagcttaaaggaaatgatatcgctgaaatcttcgaccaagggcccaggtagaaccaaagggcaaaccacagagaatagcacacctaagttgaagcaagaacaagaaactgatgagcctccacgttcaaggaaaaacaaaggccttgatagaagtctagttggtgcaaggatcaaagtttggtggccagatgataagatgttctacaatggtattgtggagtcatttgatgctgtttctaagaggcacaaggtagcatatgatgatggggatgtagaggtactactgctgagggaggaaaagtgggaattcatcagtgaggagaaggaagcttctatggcatctgaaacgccacgaggcagaaaaagaaaagcggatgcattgaaggaagaaaatacagaaacacctaaaagtgatgctgtggatcctccaaagaaaagaggacgtccaaaaggtgtgggatccagcaatgggacacccagtacctcagctactccgagcacaaaggggaaaactgccggcaaggttaccaaagaaacacctaaaactggccccaaccttaaaaaagaacttgagaagaactccaaggacaaggctaatgtttcaactgggacaaaagatgataagagtgtgagcaaacctaaggaggctattatcaaaggcaaggattcaaaagacgaaggcaagtccactgaaggaaaagctaagcctggtcggaaaccaaaaaatgctggtactcctgcgggtgattctgacaaagagaagcaggaggtagaagtcaaggcagctgaaatagaggaggcatcaggaaatgcttccacagggaagaagcgtaggaggaaggcttgaagttagcgctgatgaacttctcttgtaaatggatgtgctccctcctaggtttgctcctttaggaccttgtattattgagtgttaacttggaatttcgtctgattggtccctagtagttagttaggtgtggaagcaacatttgctatagccgtagtgttaggagtaccatgtgttcgttgtggtcaggtccatggtgcattggtgctgagccttaagcggaatgaaccctatgctcgctgtgaggcccatggcatcgtgttgtcgggtggtgttgtagcttgttgatgccctattttatattattatacgcgattgaagcagtggattttgtagcaaatgtaccttttggactaggatgttggcctggttttcgagttaaaaaaaca

SEQ ID NO: 12499 - DNA, 1489 bp, Zea Mays
aaaaccagtccattcggaataaatcagtctttattcgtttctgccgaattgggtggagaacaagaagccatttgctcctccgagggaggtacatgtccaggttacacattcaatgccatctcacaagattgaaattttcaagtcacttgatgattgggctagagataatatcttgacacatctcaagccagtcgagaagtgttggcagccacaggatttcctccctgacccagcatctgaaggatttcatgatgaagttaaggagctcagagaacgtgccaaggagatccctgatgattattttgtttgtttggttggagacatgattactgaggaagctctaccaacataccagactatgcttaacaccctcgacggtgtcagagatgagacaggtgcaagccccactgcttgggctgtttggacgagggcatggactgctgaggagaacaggcatggtgatcttctcaacaagtacatgtacctcactgggagggtagatatgaggcaaattgagaagacaattcagtatcttattggctctggaatggatcctaggactgagaataatccttatcttggtttcatctacacctccttccaagagcgggcgaccttcatctcgcatgggaacactgctcgtcatgccaaggactttggcgacttaaagctcgcacaaatctgtggcatcatcgcctcagatgagaagcgacatgaaactgcgtacaccaagatcgtggagaagttgtttgagatcgaccctgatggtacagtggttgctctggctgacatgatgaagaagaagatctcaatgcctgcccacctgatgtttgacggtcaggacgacaagctgtttgagcacttctccatggtcgcgcagaggcttggcgtttacactgccagggactacgccgacattcttgagttccttgttgacaggtggaaggtggcggacctgactggtctgtcgggtgaggggaacaaggcgcaggactacctctgcacccttgcttcaaggatccggaggctagacgagagggcccagagcagagccaagaaagcaggcacgctgcctttcagctgggtatatggtagggaagtccaactgtgaaatcggaaacccattgcgactgcttgagttggagcatagtctatcatgcaccctatgacgcatcgcgacgacaagacctggtgtgtcgcgtgacatagttgttcaggttttgaccaaatggtctgggagcatttgttttgccttgtgccgtctcatagagcgttaggatagtgtacgtctgtgttctagctttgttttgtctgctgctttgatgtacaacttgtggccatgaggctggacatggagtgaacatgttgtacattgtcgctggcggtatgtttcggtatgttatttcagttgttgagatctgttaatttttttgtgagctatggaggtcgttctgttctggtcgtggacatggcttgaaattttgcagtg

SEQ ID NO: 12500 - DNA, 933 bp, Zea Mays
gtttgactatgtgttcgactggaccattctgaagtatcctcagataggctccaacccgcggatgagggcaggtgaaaggactagtggagctgctggaccctcgatggacaagattgagaaggccacaggagaagcaggcggtagaaggaatcttagtggtcctgtgaaccagactgacagttatgcacaacgaccgcgtgagaccgtatctatgtcattaaaggaaattatgcatagcactgaccggtctggggaaaggaccatggagagaccacgtacatcctcgcgcacaggcagtgcatcccgtagagctgttgcatcaagcagcaggcaggcctcatctgtggaaccaagtgagcagcagtatagccgggcaagcagattgttctctagcaacagtggcagtcgcccatctagcacccagagggtgaacccatcgccaggcgaggcaagggctacctccctctcacgggcggcagtcgcgagaggcgctcgcgacgagccactccatcgcagcctggagcttctgtccctcggtggcggcgggaaaaggaagtagtggcaaggaaagcgagcatctgagagcgggcggaagggaagaacgcttgtttgcgactctgtaaatgacaggattcgtcaacagtttccctggggcttcccatagtttccttggtgctccggtctgttgtaccattgcttcatagatagcaacgattccttgttaaacgtgtgctgtgttgcaggttgcgttagggccaagtcctagcctttgtgatggtgattacatttaggggtggtcaagattcacttatttatgtttcttcaccctttcctggactcggcgacttttttcatgtcgaactctgaattttcttattcaacagaagttgataaaaaaggacttcctgtgtaaaccaaataaaaaaacttctc

SEQ ID NO: 12501 - DNA, 800 bp, Zea Mays
ctccctggtctgttaaaaatttgaagccagagtctgatgaagaaagaaatttgaaagaagaaatcaaccttctgaaggtggatcttaaggaaatcgagagaaacatgagtaatggttctgaccagacatcggtagatgcaaaaggtttgtctgagaagatatctcagttggaaagccagcttgagcagctttcaagggagttggatgacaagattcgatttgggcaaagaccacgttcgggtgcgggcagggttacagcacttgcaccaactagtttaggggaggaaccacatgctacagtggtggacagaccgcgctctcgtggtggtatggagccaccaccaaggcaggaagaaagatggggatttcaaggaagcagagaaaggggctcttttggtgcaagcagaaattcggacaggccaatggcaaggcagagatggtgaaactgggacaacaagcatctcttagggatatttccggttcccagtccctttttttgttctgaaaagatgggcaaaataagtcgttacttatttgtttgtcgtgtttgcttggtctagaagattgttgaggatggagataactccacatgaagttattggtttgtcaactctatgccgtaggatgttttgcatttccctttttgccatctaccatgtcaaaacgatatcttagcaacctccgatactaactgttatgcttactggattccagttcagcatatgtcactagttgattatttgtgcactgcttagtggaaaccttggatttgcacttttactgatgctatgtcacctttc

SEQ ID NO: 12502 - DNA, 894 bp, Zea Mays
cggagtcccgtacacgctagtgttggcgactccaagagtgttcttatcgccccgaaggcggtctccactctctacagacagccgccaccgccgccggtggttcacaagcagccggtaggtactcaacccaaaccgcaaggaggacacggaacccaaattccagcacgactcatccagccagcagcccaagcgaacctagggcccttgagctccctcccgcatggcgttcccgtggtgcctctcggctccggccgccgtcccgcctgtggcgcccgcgccgggcacctttggcgtatccgcgtcggtcaccgccctcgcgcgtgtgccggttctcgccggtaggcggcgcaggtggagcacgctcgtggtctgcgcggcccccgacgaggagaagattaccaagcggtcgcccctcgatttccccatcgaatgggagagaccaaagcctgggaggagacctgatatcttccctaagttcagcccaatgaagacaccattaccgcatccgttaccagctgatgatcctctggatgatgatcaagaggaggaagaggaagaacaaccaccaccacaggaggagccacaagaggatgatccagacaaggaagaacctgaggaagatgacccggacaagccaaccgagtaacttctggatggcttgaactgtggtagatataggcagcgggcaaagatgtgctacatctttggagcacgccaagagatctcagttctattcgaactgtttgttctgccggcttatataggctctagatgcataagtttgttatgacctttgagcttttctaaagctatggaagttttgttttacggattacagattacggtgccatatctgtgatgatatgcattcacacttctatcttaaaaaaataa

SEQ ID NO: 12503 - DNA, 1002 bp, Zea Mays
gcaggactatcaccatttataatgaagctgaaactgctataactgaaatgactggaaaatggcttggaagcagacaaataaggtgcaattgggcaacaaagaccaattcagaagagaaaccagaaactgacaatcataatgcagttgtactaacaaatggtagctccaccaattcagcaacagatgcaagccaggatgcaggaagtaaagagaacccagagaacaatcctgattgtactactgtatatgttggcaaccttggacatgaggttaatcgggatgagcttcaccgccacttctataacttgggggtcggggcaatcgaggaaatccgtgttcaacaggataaggggtttggatttgtgagatatagcacccatggggaagcagcattagctattcagatggccaatggattggtagtccgtgggaaatcaattaagtgctcatggggaaacaagccaactccacctggcaccacctccaagcccctaccccctccagttgcttcataccagcctgctgtagcaatgtcaggtgtcccacaaggtttcacagcagccgaacttcttgcttaccagaggcagcttgccttaagccaggctgcagcagggcagattgctggccagcatggtctcgcgggtcaggtttctgcaggtcttcttgctgctgctggttctcaggccctctacgatggctacccgaaccagtcatcagcccagcagcttatgtactacaactagagttcaagaggacggcgttggccatcgtcgccctgttttttattttgtggttcatgtactatttgtgtgagagttcttgatctcttgtcgccgcggaattgtgttactatcttattactgtaccattgaccatttttcttgtgagattcatttgagtagtcactttaacagagtaagagatgtattctatgtgacttcgcgattgattaatgtaatgctcccctgtgcatagaagtatggaagaaaaaaaatacagaaa

SEQ ID NO: 12504 - DNA, 609 bp, Zea Mays
cagcttgcttatggtgaagtgagttatcatctttctggggttagctgtttcggcggggatgaattgtcagatagtggtgaccattggaggctagaaattgaaggaagtggaaaagtatggaaaagagatcaaaaggtgcgacttagacatgttgacaccggaggttatctgcatagtcacaacaagaagtacaatcgccttggcggtgggcagcaagaggtctgcggtgtccgagagaagcgagctgagaacatttggttgacagcagagggtgtttatctcccagttaacgggagcaagtgaaaaagcactttctagcatttactatttttaatgttaatcagtataggatcagatattttgccagctttcattcgtccttgtcttaagaaaaacgaacatgggacctgaccccctagtgatatgtttaagttggaatgttggatatcgatgatgtcgacaagaccaggacagcgcatgcttgtaattgatatttataatccatatatgaccgtgtagatacccagaggccagagatgcatgtgatgtgacactttgttaacaactagagatgcggatcatcgtccagatgtgacagacattcgtggc

SEQ ID NO: 12505 - DNA, 2193 bp, Zea Mays
gttctgtctgtcttcacttatccgaggttccgtgcagcagtggaaaagagcagattttagcagagcagcgagggtcggagaagcctccccaagcttcgaatcgctatgcagcccgtcaaggtgtacgccgaccggcggtcgcaaccctcccgagctgtcatcatcttctgcagggtgaaccagatcgatttcgaggaggtcacggtggatctgttcaagtctcagcacctcacacccgaattcaaaaaaataaacccaatgggacaggtacctgcaattgttgatggaagattcaaactatttgaaagagccaaaattgagtcaatcttggattggcatcactcaaatttgcggcgtggtgcagcaacccttgtaatgcacactgcattggctcccttccttggtcttacgacaagtcatgaggctgtgaaacaagcagagaagcttgtgatgcagtcactgggggtgatcgaatccgtatggctgaaaggcgatgccaagttcttgctaggtatcccccagccatcgattgcagatctgagccttgtctgtgagataatgcagttggagatccttggcgatgaggtccgtgaccgattcctgggagctcatgagaggatccttgtctggatggacaaggtgaagaaagccacgagccctcattttgaggaagcccacgagctccttttccaagtgaagaaggcacgcatggtgcaaggcagcagcagcaaggcttttgagtcgagcacaaagctcaaaacagcatcaaagctctgacgaccaaaggcagaataagcgacagacagatccatcttgtgatataatataataaacgggaactattattaattactgttggtattaattacacttattccagaaggccacaagtgcttcgttgcacttacttattccacaaggccacggtcgggaactacttactgttcgttccagcatgctatagtaaacaactctgcaacaacatcatccccaaaaaacaagcaaacaacaaaattggtatctagtctgtcttgaatctgtgtgaaatcctctccaggccgtccttgcactcttccattgccctcttcgacttgtctccaagggttgcaccaaacgcagatacgcttcccttcacttgtgctgatacctcgtttgccctggaagcagcacaagccccaaactcggtacaccactgccttgcatctgcagcttgctgctttaggattgcgatgaaggacctcacatgctgcatcactctctccaccgcaccccgagacctcacctccatctcaccagacattgtcttgagcttctccagcagagcttctgcctggttgatagactcgtcgactgcgttttctttgccagcgttagcccatgtcaccccagctgaggcgtcatccttcagttctccttcgacaacaactctgattccttgacgctcccattggttccgggcctcctcaagggcgcgtgcatgctcccgggcctttttggcttcctcctctgcccaagccctggttaagttaaagagcacaataacatcatgcacaatgaaataatatgcacaaaaatgatcaaatctcagatgtcaagaattcttcttgccttgccatagataacgccttcctctccacttcaagctcatactgaagttgcacaacagccgagttatcgctctcaatttccttttggagtttctcaatcctactcttctcgaacgacacctccaccttcttgctcagtacgttctgcagctgttcctctacctcactcctcaacttcaacagaacttccatttcagactcaacagcagctctgcccctgaccagaatattcttctcttcctctctttctgccctcaacctatctagctccaccctagcttcttcagctactttttcaagggtctctaccctttctctttcctccttaagctccctttcaaaacttgcattaagatctttctcgacctgagcaaccaatgcagcatgtgcatttacagctgcttcagctattttctctgcctcgatacgggcaacctcctccagaaccacttcgccagaatcaccagctgaaaatgctagggcagcttgtccctttgtcacaggtttgttcggttggaaaagtcttgtgaaaccttcaagacaagagctttagcgataaccctgaatccacaccaggaagatcaat

SEQ ID NO: 12506 - DNA, 944 bp, Zea Mays
gcaaacttaggggcagtgaagcttgatggcccatgcgcatcgaagtagctcaagtaccccgctccgggcgctccggacttggccctgcggaccgtagagctcctggagcaagccgggttcggccccgtgaagcaggaccacagccgcgggctcgaccacggcgcctgggtgccgctgatgctcatgtacccggacgccagcatccccgtgtgccagctctcggtgcagaccgaccgcgacggcacgtaccactacaacctcggcaaggcgctggcgcccctgcgggaggaaggcaccctcatcatcggctccggcagcgccacgcacaacctgcgcaagattagcccgtccgacgcgcccgtgccgcagtgggccgccgagttcgacacctggctcaaggactcgcttctcaacggaaggtacgaggacgtgaagcggtacgaggagaaggcgccgcacgcgagggtggcgcacccgtggccggaccacttctacccgctgcacgtcgcgctcggcgccgccggggacggcgcgaaagcggagcagatccaccagtgctggtccaacggcacgctctcctacgcgtcctacaggttcaccaccaacacctgacgcgctgctcgtggtgtcggtggaataccaccgtcccgcccggccagctgctgaattcgggggaagcatccatcgacgggtgtggcactggcagcattgcacatactgtatttctaataaacccccgtgtgcctgccgttccgttcgcggtagatatgcgtttgttattgttttgcattgtttggtgcagcagcttaggctgattgattgcctgcatggtggtgccgggttctcgctggcctagctgaagcgtgcattctatcgagaaacgttttgtttgttaatgtattctatcatcgtttttaagagttgaaggccttcatcaatccccc

SEQ ID NO: 12507 - DNA, 205 bp, Zea Mays
gttctgcgtcgaacagtaccactgtctcgtcaacttgacaccaaggtgcgtgtgaatgcgttgcgctgtttaggagatcttgtgccatccttggacaaagaaggaataatgggtatcttggagactgttcggcgttgcacagctgttgaccatactgcgccaactcttatgtgcacacttggtgttgctaatgcaatctataaac

SEQ ID NO: 12508 - DNA, 863 bp, Zea Mays
ctaagagctaaagtgaatactaatttgggacggagggatgatgctgttgatcatccaaagaaaagaggacgtccaaaaggtgtaagatccagcaatggcacacctagtaactcagctactccgagcacaaaggggaaaactgccggcaagaataccaaagaaacaccaaaaactggccccaatcttataaaggaactcgagaagagctccaaggacaaagctagtgtatcaactgagacaaaggatgaattgcctaaagatgacaggagtgcaagcagacctaaggaggctattagcaaaggcaaggattcaaaagacgaaggcaagtccactgaaggaaaagctaggccaggtcggaaactaaaaaatgctggtactcctgcgggtgacgctgacaaagagaaggggaaggagaaagaagttaaggcagctgaaatagagcaggaggcaccaggaaacgcttctacaggaaagaagcgcagaaggaaggcttgaagctaacactgatggaacttcttttgtaaatggatgtgcaccttgtattattgagtgttaactcgaaatttcgtcagtttggtctctgatagttaggtgtggaagcaacatttgctatagctgtaatgctaggattaacatgtgttcattgtggtcagatgcatggtgcattggtgttgagctttgagcggaatcaacccaatgctcgctgtgaggcccatggcatcgtgttgtctggtggtgttgtagcttattgatgttctatttattataagcaatttaagcagtggattttgtagcaaatgcaccttttcggctaggatgttggcctggtttttaagttgggcacggatctcataggcccttcg

SEQ ID NO: 12509 - DNA, 465 bp, Zea Mays
atgcctattgcctaatcggcggccagttttgatgggccgggcttccgtctgaccatgatcgcctggcccatgcgttccacttccacactcaccaccacggaaccctaaccaagaatccgacccggcgctagacgattcggacggaaggaagacgagaaggccccgaggcgagcgggggatcaaagaagaagatgaaggtccgtgcggcggtgaagcgcctgtgccggttctgcaaggtggtgaagcgccggggaatcgtcttcgtccaatgcacggccaatgccaagcacaagcagcgccagggcttctccaccatcgccgaagcagccgccgtctcgtgcgttcacctgcctccgccgccgcccgctagcggttccgcctccgccgcagcgttcgcagagtcatttatgcggaagcaaggaatgggagcccgtttcgtcgaagctgtatggaaaggagtcctaa

SEQ ID NO: 12510 - DNA, 205 bp, Zea Mays
tctctctctctctcgggcgctctcggtctcggccatggaggccgcaagcaatcaggagccggggagatgcggcggcgacgacgacgaggcgaagaggagggaggcagagcttgcgtcaagcaggctcctcgacccggggttcaagccctccaaactatcccaggaccggctcgacaagtttaagagaaaaagaagccgatgccag

SEQ ID NO: 12511 - DNA, 986 bp, Zea Mays
  misc_feature (985)..(986): n is a, c, g, or t
gaattttgaaagtatatgatgctatgatggtagcgcgtttgggttccagatcggggtgaattgtggtctaagaacaagagggaaggatctttctccagacttcgcaattttggacgacgaggttttgtgttatctggtttgtcgggatggatgccaaaaagttcctgcagctggtcgaagagaagaaaaggaggatcctcgagaagaaagaagccccactaaagtggcagcagaagctagaagcagcagttaacgtcaaagctgatgcagaagcgaaggcgaaaaaactaaaatcaagaaagcataggaggagaggagattcttcctcggactctgacagtgactatgacagcgatgttgatcggaaacaccggaggaggaaggatcgtagaaggaacaagaagcatgagcattctgactctgatgatgccaggagaggcaagcgtaggtccaaaaagggctcagactcaagtgatgagagcaaccgtgaatatgaaagcgggtctgaagaagaacatacaaagaagaagcgtttgcacagaagaaggcatcacagacactcttcaaggtcagactctgaagacaacagtgatgaggaagagcggagatctgccaaggaccattctcagccccgcagacgccaccatcagtcttctgatgatggctcggacaaggtcaggttgagacatgggaagcgtctgagatcaagtgacgagaatgctcggccagattccaacagccataagcatctcaggagccaatccttggaggagtcatcagatgatagagatgatgatggaccagagaagataagaaatggcaaaaggtatcacaagaatcatcaccgtcaccaccatcatcatcgtcaccatcggcaccaccatgaaagacataataactcagcagaacctaatgacaggaggcaagtactgaaagatgaccagagggcccttgaaggtagcagtgcagactgaaggtatccacnn

SEQ ID NO: 12512 - DNA, 1063 bp, Zea Mays
cggctgcctctgcctgcgggctgtggccacacagtatatgggggagcttggattgaacttcgaagtataccgcaatgatgaactgaccatagaagatgtgagaaggaagaacccaaggggaatacttatttctccaggacctggtgaaccacaagattcgggaatatcattgcagactgttcttgaattaggcccaaccatcccaatttttggagtttgcatgggtctgcaatgcattggagaggcatttggaggaaagattatccgtgctccttctggagtgatgcatgggaaaagctctccagtttattacgatgaggaattaggaaaggcattgttcaatggcttgccaaacccttttactgccgcgaggtaccacagcttggtcattgagcaagaaaccttcccacatgatgctttggaggctactgcatggactgaagatggacttatcatggctgctcgccacaagaagtacaaacacatccagggtgtccaattccacccggagagcatcatcacccctgaaggcaagaaaatcatcctcaactttgtcagattcattgaggaactggagaagcagcgttcgtaggggaggtagacgcgacaggtggtttcatttcatagatcagacggaagcagagacaaggcgcttaaagctgcgccaggttccggggctggcagttgaagcatagctaggaaacagctttccctctcttaattcgttgtgttcgtggtgacataatctgtgtgcggaccgaatttagaataaagtacaggcgtccgtctgatcaaataagcaccggtgttggtgctctatagatgaatatatccggtgattttcggcatgggaggcattggcacatttttgtctgagttctggcggtagcaagaccggagtaataaccatcaggcgtttctatgttggttacgtgccgcacgcaggccgggcgtgcggaggatttatgccctgagaggctgagactatctccctcgtcccttattttaaacagtatcattatacaattccgcgttacctgctggagagttgcatgtttggttt

SEQ ID NO: 12513 - DNA, 72 bp, Zea Mays
ctagttttttgtattttttagtagagacggggtttcaccgtgttagccaggatggtctcgatctcctgtcct

SEQ ID NO: 12514 - DNA, 487 bp, Zea Mays
ataatttttgggaataatttttttggcttcgagttgctcttcctactccgcgcccggccgcctttgcctgccttcccatctcctctggtcttccgccatggcccagcccgtattcctctcctctctccgctcccgcctctgctccgcgccgccgtcgccgcaccatcacctccagcccagccgcggctaccacgtcgagctcggcgctcgcgagaaagcgcttttggaggaggatgttgctttgaagaggttcaaatcatacaagaacagtgtgaaacaggtctccaagattgggaatgttctcactttagctgttgtatttggttgtagctacgagcttggtgtgttggcggcaagcatgaagtgaaggaaaacacagccattattccgggaagtgatccatcagcgtagactgtcattctatcacctcgtgtttttagcctgtctgcgtctctctttttttttttgtcagaaaattggtgttttt

SEQ ID NO: 12515 - DNA, 241 bp, Zea Mays
atagcttacttaatgtgcatcttacaagcaatatagcactgttatcacttatattgcgattttttctacttatattgcaaaaaaaaatctacaagcgtagggcacgtgccagttactagttatacaaaaaaagggtgcaacaagatagcctgcttgcattgcatctccaggtctaggagataaaccaagtcctacaaacttacaggtcacaccagaagctgacacgagatcttggatctcc

SEQ ID NO: 12516 - DNA, 2050 bp, Zea Mays
tataattcctcgagctgtgaatctgttacttttaggcgttggatctgtggtgaaggagaacaattatgtgaaacatatcgatatttcgacctgcctttctgctctcctgacaaagtgaaggagaagagcgaggcccttggggaggttctcaatggggatcggttagttgatgcgccttacaagcttgatttccgtgacgaagttgagtccaaggcagtttgctcaaagaagcttactacagaggatgtagtgaagttccggaatgcagtggctaaggactactacttccagatgtactatgatgatctcccactgtggggcttcatcggtaaagttgagaagggcggcaaggatgatccgagcgagtggaaatactatctgtacaggcacatcatcttcgacatcctatacaacaacgaccgggtgatcgaaatcaatgtgcacactgatcagagtgcattggttgacctgacagaggataaggagaccaatgtggaattcctgtactcagccaagtggaaggagacaccaacaccattcgagaagaggatggagaagtactccagctcctccaacatgccacaccacctggaggttcattggttctcaattataaactcttgtgttactgtcctcctcctcacagggttccttgcaactatcctcatgcgagtattgaagaatgattttgtcaagtatgcccatgatgaggaagcagccgatgaccaggaagagtctggatggaagtatatccatggtgatgtcttcaggttcccaaagaataagtcgctattttccgctgctcttggcacaggaactcaactatttgctctcacaacctttatattccttcttgcacttgtcggagtattctatccttacaaccgtggtgcactatttactgcattggttgtcatttatgcactcacttcaggaattgctggatacattgctacctctttctattgtcagttggaggggacaaactgggtgaggaacttgctattgacaggatgcctattctgtggacctctcttcctgacattttgcttcttgaacaccgttgctattgcttatagtgccacagcagcactgccctttggcactatctgtgtcattgtgctcatctggaccttggtcacatttcctttgcttgttttgggaggtattgctggcaaaaacagcaaaagtgaattccaagctccttgccgtaccacaaaataccccagggagattcctccacttccgtggtaccggagaactattccacagatggctatggccgggtttttgcctttcagtgccatatacatcgagctgtactacatctttgctagtgtttggggccacaggatttacacaatctacagcattctgtttattgtctttatcatcctccttatcgtcactgcattcatcacagttgcactgacatacttccagcttgctgctgaggaccatgagtggtggtggaggtcattcctatgcggaggatcaactggatttttcgtatacggctactgcctgtactactactatgcgcgatcggatatgtctggcttcatgcagacatctttcttctttggctacatggcctgcatctgctatgcattcttcttgatgcttgggatggtgggcttccgtgcctccttgttctttgtccgccacatatacaaatctatcaagtgtgagtgagctgttgttggaagatcaagagcagcagagctgtacccgtttttggtgccaccgagaagtcccaaatatagaaaaaaaatggtttgctctcgcgtgcaacaggagcagctagtgattgccatgtttcagattaggccattatttatagtaacagctaatgaacctataaatttgttccgttcatgggactgctatgataaaatcgtctttttttgtccgatgtattatctcccagtgacgtcagacggcatataactttgttggaaccgtggcatgccagcggtaattgctgaatatctctaagtcgttacagtaatgaccaaaggtcgttcagtaattattcagtcattaccgg

SEQ ID NO: 12517 - DNA, 920 bp, Zea Mays
caactggaggccaatagaatcgctcgcttgcgttatcttgttcgcctcgtcagttgttgtttcctcccttcccatcccccactgctcagcagtcagtcagcactcgccacccacacgcctccgctccgcccacggttccactccaactctccgatctccaggaatccgcggctgaggcgccggcgatggcggctcccatggtcgacgccgaatacctgcgccaggtcgacagggcgcgccgccacctccgcgccctcatctccaacaagggatgcgccccgatcatgctccgcctcgcatggcatgatgctggaacttatgacctgaagacaaaaactggtggtgcaaatggttcgattagatatgaagaagagtgcaccacatctgagggacatcttttatcggatgggcttatcggacaaagatattgtagctctatcagggggacatactctgggaagggctcaccctgagaggtctggattcgatggtgcctggacaaaggagcctcttaagtttgataactcatactttcttgagctgttgaatgaggaatctgagggacttttaaagctcccaactgacaaggcactgttatcagatcctgaatttaggcgctatgtggagctctatgcaaaggatgaagatgcgttcttcaaagattatgctgaatcacacaagaaactctctgagcttggcttcacgcctcgcagcacagcaccatccaaatcagatcttccaaccgccgccgtgcttgcacagagtgcctttggggtagcagttgctgcagccgtagttatcgctggctacttgtacgaggcttccaagaaggccaagtagagggcgaagttcttctccacatggctttgctttagatgtttggtttgaagaatcactttgtcggagaggaaatcttcggc

SEQ ID NO: 12518 - DNA, 846 bp, Zea Mays
ttctgctgtcattctggggtcagctgatcctagcaattggacccgacagaccattttattctgtgatctcatcataattgaagcccccactgatgaaaagctgttaccttggttgctttcttgagtactggtcaccagatagtagcatgttctcttctgtgtgattaggcttgattgtggactgacactcctggtcacttatctcttgtgatcatccagagtatatcatctgtcagctgatcttttctctatggaatcgcttccctttatgaaagtatccttgttttagggcaaatctcctttggcaaacattgttcagggtgcatcactttgctggttatcctgagcatattctcctcgtcgaatgaactatcagcagcgaagagacttccaaatgatatccatcaggaaattctcatttagtttgatggaagtttcataaggtttcgtaccatctgatttgctgggcaaatctcctttggcagtacttattaatagctcttttgggggcaaatctcctttggcattagctttaagatttctcactgggcaaatctcctttggcactagttctacctttagtttcacatcgctcttcgggcaaatctcctttggcactaaataccaattatatttactatttttagtaaatctccttccgctgtgcgcactagcatctatatctgggtaattctcctttggcattatcagtcaagtgtgctgcctgcctgcacataacttatacgagaatatcaagaagtgattctggaagaaatacttggccagctggtatattgaccttctggacatcaatttgcatattgttccttgttcttgagattacca

SEQ ID NO: 12519 - DNA, 1098 bp, Zea Mays
ggagttttggacgattcacatttgcatctgaccagtatttcaggagtctgattgaccctgtcgacagaacagttgacagagatcttaatcttatcaaggaattgggcttaaagctcgtgtttgctatgaatactcatgtacatgctgatcacgtcactggaacaggactaataaaaactaaggtacctggagttaagtctgttatttcaaaagctagtggagcaaaagctgatcattttgttgatcatggggacaaaatacactttggtaaccttttccttgaggtgcgagctactccaggccatacctctggctgtgtgacttatgttacaggtgatgctgatgggcaaccttcaccaaggatggcttttactggtgatgccttaattatccgggcatgtggaaggactgacttccagggaggaagttctgagcagttgtatcagtcagtgcattcacagattttcacattgccaaaggatacactactttatcctgctcatgactataaaggtttcacggtaagtactgttgaagaggaggctgcctataatgctcgactcacaaaagataaggaaactttcaagacgatcatgaataacttgaatttgtcatatccaaagatgatggatgtagctgtacctgccaatttggtctgcggtatccaggatccaccaccgaagatctgagctgttcccgtggaagcctgcaactgcacttctggttgtttatgaactctggatcgccaccagaggcttgcagctgagttgttcattaaataatttgtttgctgcatcctgtgatatcgcgagaaaataatctaaccaatggccggtgtagcctctggttgtatgtggcaaagcactattgtttagagagatcaaaaggaacaatgctgatagtcaatgaagtttgattgcctgacaacatctctagaaatacttcgctaaccgcaatcatgttatttggatgttctttttaaaacggtgaaaggatgttcttttttttaaaaaaaatagtgaaaacaacatcaagctgtctgttttcttcaggatgctaaccatcaatgcagaccagtcatattcccatgcattgcta

SEQ ID NO: 12520 - DNA, 809 bp, Zea Mays
ccatcaaagaactagaagactatttgcaaaagtaggagaaatatgcttcctacttaagtagcatggttaatttgtgcacatctgttttgttgaatcatcggcttggaaaattaactaccacaacgggaacaaaatcactgatagcacaacaaaatagaacaagtctatgaagatacatactttattgttgctccacctttaccaattataccaccacaagagctattaggaactacaagtctaactttaggtctagcttctgcttcgttgaattcttcaccctggtaaaataactcagccaacagtttctcaagaatcagctccatggccttcattacttcatcaaacagtccagaaaccatgatgattctgtcatttgtaccagggaaaaactcattgctacgtgataactgaatacgagccccagactgggactgaaaatcattaatggttgatccacccttgccaatgatgcaccctgctgccgtattagacactagaaatctcaaatgtgttggcgcgtggcagttacctccttcctcggagggagactgctgctgctgcggaggggagcgtggggcacgcttgggggcggattccggcgaggaggcgtagggggagcccggggcttccatccttcctgctgtggggcggggcggtggggggcggaggtggaggcggtggggggcggaggcggatgcaggaaactctagctagatctctctgggcctacaccatggatttccaagtgaagaaaggagagggaggggggctggttgggcctttttggacttcaatatccggccttc

SEQ ID NO: 12521 - DNA, 1179 bp, Zea Mays
gtttgccacggtagtatcgtaggagcagcacatcgaagatgctacggcctcaagcccgtccggcccacgggatactggactggcccacctatacaagtatgcgtagtttgggcttccgtctgcagcattgtaaagtttgttctgcagcccatggcctggcctccgctaccacgagtagggttgatcaaacttgatcggccgctctatcatgagctgtgtctatcttgaatttgagcccgtcgcacttgccaggtcgggcgtgggccaacgtaaaaagagtgacgtttcttcaccaatcaccctgcgtttcttctcctgttcatcacccgtgcgtgcgctctctctctttctcgtgcggcaactgcgaggccgccgacgcccgacggcagggtgcccaggccttcttcggtcccatcgcgaggccatagttgcatcattcgcctgagacgactgcccaccgccaggactgatctcctcactaggcgcgtagaggtgaagagaataacttgacaatgagcagcataggcacaggttacgatctgtctgtcaccaccttctccccagatggtcgtgtcttccaggtcgaatatgctaccaaggccgtcgacaacagcgggactgttgttgggatcaagtgcaaagatggcattgtcctgggtgttgagaagctggtaacctcaaagatgatgctggaagggtcaaaccggaggatccattcagtgcaccggcactctggcttggctgttgctggtttagcagcagatggcaggcaaattgtttcaaggacgaagtcagaagctgccagttatgaaaaggtctatggagaacccattcctgttaaggaattggctgatcgtgtggcaagttatgttcatctttgcacgctgtactggtggctcaggccttttggctgcggtgttattcttggaggttatgatagggatgggccacagctctacatgatagaaccctcaggagtttcttataaatactttggtgctgcattagggaaggggagacaggctgcaaaaactgagatagaaaagttgaaactttcagagcttacgtgccgggaaggcattgttgaagttgcaaagatcgatgctggtgttcatttcgctgtagtttaattggcttcaatcactcttcttcattgttcaatgtcattcaagaaatccg

SEQ ID NO: 12522 - DNA, 1937 bp, Zea Mays
ctgcctggctggcatggcatggcccagggtagtaggttgggtatcacgacagtagtttctactgattccatacgacatatgatgagaagctttgcagatgaaaaacaaagtcctcttctctatgcatcaacctaccatgcaggtgaatatttggatcctattgcagttgctcaggcaaaggcaaagcgcaatgcaaataaacccacagttgtttctcatccaaataccagtggagacaaagatgtgacttcaggtgacaaatctcagcatggatcttcagaattacctcctagagctgaattgattggcaacaagcaaatggcagtagaaggctacaaggcgcaaagtgagatggtgatcgacagcctggacaggttaattacatcctgggaagagcagaaagaatctgtgattgttgaaggagtgcatctaagccttaactttgtgatgggattaatgaagaaacatccttccataataccatttatggtatacattacaaatgaggataaacacatggaacgatttgctgtacgtgcaaagtacatgactctagacccagcaaagaacagatacatcaaatacattcgaaatattagagctatccaggaatacctatgcaaccgagctgacaagcatcttgtgccgaagatcaacaataccaatgttgaccagagtgtggctgctatacatgcaacagtcttcagctgtcttcgcaggcgagcagccggggagcaactgtatgacctcaacacaaacactgttgctgtagtggatgaggaatacaggaaccagcgtgcagctaacaccttgggttctaagggcatgtttcagttgatccaaaggaaggggtcttcaaggaatctgatggcacttcttaacaccgacggttcagtcaccaaagcttggcatgtaagtgcaagtgatggcaatgggaatcttaatggtatcacaaacaacaagaagtctcctgaaaatcctatgctggatccctcacaaatcgggaaggcagaagccgtcaatctccagtttggtccttttgggatcagtgcctggatgagtgacacgggtggaaccagccatactgggagtgtggaagacctgaggcctgatagtgtggagactggtggtagaaattattcgtcgtgctgcagttcgccaaagatgtcagattccacctcgaaggagcttatggaggactactcagtctatggcagtgacgaagaagctgacgaccctcgtgatgctgaaactgatgatgacctaactgatgaagaaagagacatgcacgagatagatgcaggctctgtagacgagcactcaaccaagtcggatgaggaatacgaggacttagccatgcgtgatgtgatggagaatggtgactggtctgacgacgaccaagctgtgggcaaaaccaagaactcaccagccctggagagcatccatgggagtggggcagctgaagatgatggcataaagagccggtaccaccacaacctggacctgttcctgaaaatgtccaaggaggtagctggcaccagaatgccttgcgcgtcatagtgccaccagggtggagagaaggccggcgacacgctgctctggtcccagtgggtggtatgtttcttgggcacctgcttttgtgatgctgtgagcttgtgctgttgagtgtacaccggtggctgtggctttgtagcatgtacctgtccaaactacaaaatgctctcacctggttgtaaagagaggacctgatgctttgtcatatcatgtagtaggagtattatgtttgacaataatgtcctggccctgctgctgatgaagtcacctcacgtgaactatgtgccatatcatgcatgtcctttggttgatcaatgtttacaaagatgtgtcgtaagactgtcttcagcagttcaaataagaccatcttcagcagttcaaat

SEQ ID NO: 12523 - DNA, 320 bp, Zea Mays
actaagccacggcgcgggcaatggactcaatgagcttcggcaatggcctgtgcagatacaggagaatggggagtacagtcccgcgtacagccccccgagagaggacatggcggcaggggaaggagcccacctcccaggagaggatatggcggtggccgtggtgaccatggctctgtcagcctcctggtccgcaacattccattgagatgcaggcctgaggaactacgtgtccctttcgaacggttcggccctgttcgggatgtttacctgccaagagattatcacactgggactgtatttttggtagaagtaaatgcaag

SEQ ID NO: 12524 - DNA, 3008 bp, Zea Mays
cccgcacgcaaacaggccgcccgcccgcccgcagcccactacccgacctcctaaaccctagccgcctctgcttctctcctccgctccgcaccctctttttcactccccctcccccgccggagttgcgtttcatttgaataggcgagcggggaagcatctcctaaacaacctccgcactccccaaccgccccgaacactcgcctccattccgcgccgccgccgccacctcgcgtcgccgtccggatctcttgggctcgtgtgcggcagggatccattgatttctcctctgcgagccatggatatcactcaggttctgctagctgctcaatctccagatgctaaccttcgaacagtagcagaaggcaacctcacacagttccaggagcagaatcttcctaacttcctcctctccttatcaatagagctctcgaacgatgaaaaacctccagagtctagaaggcttgctggtattatccttaagaattctttggacgcaaaggattctgcgaaaaaggagctactgactcagcaatgggtaagcgtggacccatctatcaaattgaagattaaggagtcgttgctggtgacactaggatcttcggttcatgatgcaaggcatacctcttcacaagtcattgccaaggttgcttcaattgagataccacgtcgagaatggcaagatctcattgccaaattactggagaacatgacttctccaggtgcatctgctcctttgaagcaagcaacactagaagcattggggtatgtgtgtgaggagatttctccacaggacttggagcaggaccaagtgaatgctgttctgactgctgttgtccagggaatgaaccaggcagagctcagccctgaagttcgtcttgctgcagttaaagccctatataatgctcttgactttgctgagagtaactttgcaaatgaaatggagaggaattatataatgaaggtggtttgtgagactgctatgtctaaagaagtggagatcagacaggctgcatttgaatgccttgttgcaatagcatccacatattattcacacttagacccttatatgcaaaccatattcgacctgacagctaatgcagtgaaaggcgatgaagaaccggttgcacttcaagctgtcgagttctggagcgctatttgtgatgaagagattgcactccaagacgaatatgagggatctgaggatggcaactctactgtacactttcgctttattgaaaaagccctccctttactcgttccgatgcttctagaaactttgttgaagcaagaggaagatcaagatcaagatgataatgtttggaatatttctatgagtggtgggacgtgcctcggactcatttctagaactgttggtgatgcagttgtccctcttgtgatgccatttgtggaggccaacatcacaaagcctgattggcattgtcgtgaggcagctacctttgcatttggttctatccttgaaggtccctctgttgaaaaacttgctccactggtccaggctgggcttgatttcttgctcaacacaatgaatgatgcaaatagccaagtaaaagatactactgcttggactcttgggagggtatttgagcttttgcattctccagctggtgcaaacccaatcattaataattcaaaccttcctcgtatcatgtctgtgttgcttgagagtagtaaagatgctccaaatgtggccgaaaaagtctgtggagctatttattttcttgcccaaggttatgaagatgcggagtcaatgtcttctgtgctcacgccttatctacctaatatcattgctgcacttctttctgctgcggaccgtgctgattccacccattccaggcttcgtgcttctgcttatgaagcactgaatgagattgtgagggtcagcaacatacctgaaacttcaggcatcataggccaattgttgcaggagatcatgagaagattaaaccttacatttgatctccatatactttcttctggtgataaggagaagcaaagtgatctgcaggctttgctatgtggtgttctgcaggtcatcatccagaaactgagcagcactgatgcaaagtccatagtttctcagactgctgatcagctgatgatgctgtttctgcgtgtctttgcctgccacaattctactgtccatgaagaagcaatgcttgcaattggtgctcttgcatatgctactggtccagattttgtgaaatacatgcctaacttcttcacatacctggaggctggtttgcagaattatgaagaataccaagtgtgttccatctctgttggggtggttggtgatatttgccgtgccttggaagataaaattttgcccttctgtgatcgcattatgactgttcttcttaaggacctatcaagctctatgctcaatcggtctgtgaagcctccgattttctcatgctttggagatattgctcttgctattggtgagaattttgagaaatacctaccatatgccatgccgatgcttcaaggagctgctgaacttcttggtactcttgatcagagtgatgatgatatggttgattatggcaaccagctcagacgtggcatttttgaggcatactctggtatactccagggcatcaagggcccaaaagctcagctgatgatcccatatgcaacacatctactacagttcactgaagctgtcttcaaagataggagcagggatgacagtgtgacaaaggctgcagttgctgtccttggggatcttgcagacacgcttggccagagctcaaaggatctgttcaagacccacctattccatgttgagttcttgagggagtgccaagcacaacagttggatgatgaagttcgggagactgcacaatgggcccaggggatgataaaccaggcggtggtctcctaatcttctacgttatgcaaggatgtatgtggggcaggtcagtggtagtcgagatgtcaggtgtgctatctgttaccggtagaaattgactcggtaaacagac

SEQ ID NO: 12525 - DNA, 796 bp, Zea Mays
cagcgattagaattttatctttttctaaggaagcgcctttttgtcatgattaataacctccctacaatatatgaagttgtcacgggaactgccaagaagcaaaccaaggagaaaactccgaaaagcagcagcaagagcaataaagctggcccaaaaccgccacgccagccagaacccaactcaaggggttcgaagatgccacctccgaaggatgaggatgacagcggaggcgaggaagaggaggaagaggaagatcacgaaaacacgctgtgtggttcttgtggtgacaactacggacaggatgagttctggatatgctgcgatgcgtgcgagacttggttccatggcaagtgtgtcaagatcactcctgccaaggccgaacacatcaagcactacaagtgtccgaactgcagcggtagtggcaagagagcccgagcatgatgatgctggatatatccatctctcatgcctgacttgatgtaaaacacccacatggggaccgaatgcccgatggttgttgctttcagtgtaggaccagctgtagggtcttgatgtgctgtttgctgtagtatgtcaaagacgttctagatctattgttagtaactagcaactaattgtagtagcctgtatttcttcaatcttctcccagggcgcctgtgctgaactcaaactgttttagatctaagttgtgcattatgtatcactcatgttagtttgttaaaaaatgtgttagcattcgtatgaaacgccaaccatgtttacaaattaattaacttcaagtctattttgctcgcac

SEQ ID NO: 12526 - DNA, 630 bp, Zea Mays
ggaaccatccctttcaaaggagaccaagcaatttacatacaaggatggctcccagttcgtgttcatggatctgacaacatttgaagaaagtcggttaaatgaagcagatgtcggtgacaaacaaaaatggctgaaagaggggatggactgcaatttgttgtactggaatgggaagatcattgatttcgacctcccaatcactgtgaggctgactgtaactgatactgacccaggggcaagtgatagtgcgcaaggaggaacaaagcctgcaaccctggaaactggagctgttgtcactgtgccctcttttgtgaacgtaggcgatgatattctggtggattcaagaactgggcagtatatgaatcgagcataacgaattgaagaggatttcggatttgaggagagtactgcttttttgtttgaccattttagtcccattcacttgtacaaacgccctgggtctttggccccaggaaatttacatttctgctgcatgtgaatcctcactctgattataaccatgtacatctttggtttccagatataaggaaaattgtgttcagatttttaaagctgaaatctcaaactctgattataaacatgttactactgaccacaaaacatgagcaa

SEQ ID NO: 12527 - DNA, 1344 bp, Zea Mays
ctctctcccaccacaaatattcttcccgccacgatccctctcatccggaagaaaggggggaaaaaactcgcctttttctctctgctggttcaagaacgccatggaaaatctcgagcgctcgctgtgattcctgcgaatacccaagcccaaccaaaccctagcccggcagccattctcttcgttccctctttgctctgcgcgccacaccgcacgacctccccgaagcagacgtgcccgctgcccgtccgtcccccgtggccatggccgcgacgtggtcttcgtcttgctgcgccgcgaccgcgtcgagcagcgctctgcttcgtcatgcccgcgtcaagagcgcgccttgggtagccggtgccagccggagtagctacaggcagcggcggcggcggcgggagctgtccatccgcgccacggccgcggcgccgccgccgcccgtggtctacgcggacgccggcgccgacaacgtggcctcgctgaagatcaagctcctgagcgcggtgtccgggctgaaccgtggcctggcagcgagccaggaggacctggaccgcgcggacgcggcggcgcgggagctggaggcggcggcggggtgccccgtcgacctcagcagggacctcgataagctgcagggccggtggcggctgctgtacagcagcgcgttctcttcgcggacgctcggcggcagccgccctggcccgcccaccggccgcctcctccccatcacgctcggccaggtgttccagcggatcgacgtggtgagccgcgacttcgacaacatcgtggagctggagctcggcgcgccgtggcctctgccgccgctcgaggccacggcgacgctggcgcacaagttcgagatcatcggtgagtccactgtccaccagtcctgccctcctctgccacccatcccatcccaactctgatggcggacggacattgcagggacctcgggcatcaagatcacgttcgagaagacgacggtgaagaccaagggcaacctgtcgcagcttcctccgctggaggtgccccgcatcccggacaacctccggccgccgtccaacaccgggagcggcgagttcgaggtgacctacctcgacgacgacacgcgcgtcacccgcggggacaggggggagctcagggtgtttgtcatcgcgtgacctgatcgcgcttgcggcgccgttctgctggtccgtgagattgccatccttcttcctccctgttgctccagtagatttgttggtttcttcgtctgaccaatgtataccgttctgttcttccgtgaactgaatctgcgattaacttagtaactatcttgtgtggtttacatgcttgctccgaaaaaac

SEQ ID NO: 12528 - DNA, 540 bp, Zea Mays
cgacagtggacccttgaagaggagtgctgctgcacaaccaaggttgcttattccagtggtacttgtgatgatgtataacagatggaatcagatattagttccggattatggtttcatgcagcttgagttaataccaatgcttgttgggttttttacctataagattgctacattcgctcaagcaatccaggattctatacctccagtcggaaatcgtgaaggttgaaaagtgtcatgttgtatataaacgaaggtggtagccatggtccctggtcagtggtcacccagatagtaaggtatgtatagaagaatctggtctggtgtcatcgccaagtagatgagatgctcgttgaggacgccatttgaaaatctcgagtgcttaactatgttctgcacaaatattttgacgaaagatccaactcgttatctaggtccaccgatgtataggctctcaactcatgcttgcttgtagccttgtaggatgagagccaatctttcctctccatcctctcttttcttctccatattcgaaaaatattg

SEQ ID NO: 12529 - DNA, 580 bp, Zea Mays
tggctacctgcatccggatctgatctagtagttactagttggtgtgttcgggaacgtttccgcgggcgggcggcggcccccagtggcgaagatgatctgactaccgacgtacgcagcacgaggcgttcgttgccatcttcttctcctttgagtatatgatactagcaacatccacggtatcaacattcgtgaagtatatattctatgttagtgacatgctaatggaaggtcaatgggagaaaaaggcagtgtatacattttacttggagctcataagtgaccttgtgcacttgtcattatacatgctcttcttcatagttatcttcctgaactatggtgatcggcgaccgtgatcttccatgttattatgttctgatacttgagacttttattatgactatgtatgagatattgtctcttattagtactggttgatgagatgtgtcttattatgactatggatgagacttttgtgatgtaattgataagactatggatgagacttttgtgatgtaatcgatgagactatggatttaaatattgttatgtgattgtgtgtgagatgttttgtgtgaaaata

SEQ ID NO: 12530 - DNA, 1583 bp, Zea Mays
cgtgcagtaggagctccatcgcggccgttcgcgcgccttcatatccgaccgcccgtcccctcgaacgcggatcgacgggcccactagcctccgcgtttaactacccggcaccaccagacaatcccctcatcttgctctgaacgcattcctcccatctcccaagacctcctcagacccgagaagcgcagctgcggccatggacgccaccggcactggagctggagggaaggcgaagaagggagcggccggtcgcaaggccggcgggccgaggaagaagtcggtgacgaggtccgtgaaggccgggctccagttccccgtcggccgcatcgggcgctacctcaagaagggccgctacgcgcagcgcgtcggcagcggtgcccccgtctacctcgcggccgtcctggagtacctcgccgctgaggtcctggagctcgccggcaacgctgccaaggacaacaagaagacgcgcatcgtcccgcgccacgtgctgctggcgatccgcaacgacgaggagctcgggaagctgctgaccggcgtgaccatcgcccacggcggcgtgttgcccaacatcaacccggtcctgctgcccaagaagacggcggagaaggcatagggtttggaggcggatccgatgttgtcatgtgtaggttgtaagcgggcaatgtgattggctgtgtatctgcttcgctcaagttgctttatgtcattcctaatggaataggaaatgccgtgtttcttacgtctgcttttggttctgcattctactgaaaaagcgtacgataattaacacattcacctttgaagaatcacgattgaaaagtacattaaatatttgctaatggagattttgggagcgtttgctttaaggaatcattacgtctccacaagttctttcctcaattttgatgtgataaacttatttttcacaaatcaaacaaaaaagtaagaaatgaaaagatcatagatttttttttatttctcaaaccaaaccctatcgtagaatgactaaataaaaagtaaaatcaacagtttaccgtctaattgtatcaccttaacctctaaacaagctagctaataagttgactaattattagttatttgatctatgataataggtgctaatatatcatataaagaaaaaatcatctattaatcaagttttcaaacatatcacgactaatttttgtaaactaattatttacgggctaataattagccactggtaacaataaatcaggaggattcaaacatagccttcgtagtggttcagttgaggaagatcacatcaaatctcgattgcgctgtctaaagtattgtattggataaatgataactaaatagttgcggccagcagtctgtagacatcacaattagcaccagtaaattaagtttgcattggaagcaagtgagcagagcagattagcatatgccctggcatccattgccttaacagctttctctggctctgcttgcaatgaatatttgacagaacctaatcacttcatccgtccagtttgattcatactgtttttcagactgctccacagataaaaataatgtaaataggatgcaaaagataaaag

SEQ ID NO: 12531 - DNA, 507 bp, Zea Mays
acgaggcgctttcctcgctcaacggaatggcagggagatgagggtcaacttggccctcggaaagaagtaacagagttcagatatgtggaggaagttgcaattggtatgtgatggatgcctatgcgatgcaaccgagacgacgacgcttgctcatctcatccggagcacatacgaggagagcagagagcaggaaaaggaaaaggaaacggaaaccttcctgatctagcatagcatgggagtgtcattgccatctggtgtgtgtttagcaaatatatacggttcatacagtgcgaattgtgattctggcgagattaggatgctgattcctccgatcattggagcacagttttggcttgatccatgcacattcgaagctgctgttactgaaagagttgacaggccgtatgtttggtacaactttttttatgagaatatggatttgtggataatactgaaagatgtcctatacgttctgaatccaagaaaaaaacttgtctctattcgtca

SEQ ID NO: 12532 - DNA, 199 bp, Zea Mays
ataatgtctgtgtaaagaagtgtttacttaggtgctatacgatgacggagatgttgaagtgcttaacttggctaaagagaagtggatactgattgaaagtaatgactcatcagtgaagaggcaaaagaaggatcatcttgggacaaacccaggaagagcactggagataactagcagcagcaagtctcctcctagcctg

SEQ ID NO: 12533 - DNA, 88 bp, Zea Mays
ttacccgtcacgcagacattacaattcatcggagatgcggaagtgcgaaagcagttacaataacttacttttattgaaaagtaagaca

SEQ ID NO: 12534 - DNA, 371 bp, Zea Mays
atccatcttctctcaaacgagtccacatccacatcggcgtgctcccgagccctgaacgctgtccctgacccgttcacccgtcgcaggcgagcagcagacagccagaggagacgtcgcgcctgtgcctaccatggacgagaaggagttctggcgcatgctcgacctcttccccgtcgtccgctcccgtgactattgcgctgatcctggaacatctatcagaggaaccagacagcgatcacgagttcaggaggcagcgaagggcaatgacaaggactcatccgacgcacaagatttatttatgcagaagttgaagatggctgcagagaaaaagctcctgttggtctgagtggttgagagtgagaggaatgcta

SEQ ID NO: 12535 - DNA, 1262 bp, Zea Mays
ttgtaacctgttggaaagctgcaccaggttcgaatatgattgttgcaataagggatatcatacctcctgcgcagagggctgcattcaatgatgtgtatattgcatatgaattgatggatactgatctgcatcaaattattcgttcaaatcaagctttgtcagaggagcactgtcagtattttctttatcaaattcttcgtggcttgaagtatatacattcagcaaatgttcttcaccgtgacttgaagcctagcaatcttcttttgaatgcaaactgtgacctcaagatatgtgattttgggcttgctcgcaccacctcagaaactgattttatgactgaatatgttgtcacaagatggtatagagcaccagagcttttgttgaactcctcagaatatactgctgccatcgatgtgtggtctgtgggctgtatatttatggaactgatggaccgcaaacccttgtttcctggaagagaccatgtccatcagctacgtcttctaatggagctcattggcacgccaaatgagggtgatcttgattttgtaaatgaaaatgcaagaagatatatccgccaacttcctcgtcaccctagacagtccttacctgaaaaatttccacatgtacaacccttagcaattgacctggtggaaaagatgctgacttttgatcctagacagagaataactgttgaaggcgcacttgcacacccttacttggcatcacttcatgacataagtgatgagccaggctgctcaatgcccttcagctttgacttcgagcagcatgcattgtctgaagaacaaatgaaggatcttatctaccaagaggctcttgcattcaaccctgattatcagtagccaaagttcaatttcagccggtgattggcttcattgacatggagattttttccccacctgatgtcagtgcaaaaagtcaccaactccgattgctagctgtaaataactgccttacctgaagatactccattcctctgattaaaagctggtgacggtgtcattaagggtagaaaagaacgagcttgtgaaggtcaaatttctgcgaagccatggatttctgtgcttacaatatgttgttttcaatcggactttccttcctttttcttgtcaaaaacgtctcgatgttgtctgtgagaggtagttcgtgaacgatggctgcctgaattcagtggttgtcatcaaagttaacatttctggtcaacttaagattaagacttcgtggcttcttgcttgttttttttt

SEQ ID NO: 12536 - DNA, 2962 bp, Zea Mays
ctttattatggtgggcccggagtctggtacctgtagaccttgttattgatcattcagtacaagttgatgtggcaagatcagcaaatgctgctcaggcaaatatggagcttgagttccatcgtaacaaggaaaggtttgggttcttgaaatgggggtcctctgcattccgtaacatgcttgttgtccctcctggatctggcattgtccaccaggtgaatcttgaatatctggccagggttgtgtttaacaatggtgggatcctttaccctgacagcgttgtaggcaccgactctcacacaactatggtagatggtcttggagttgctgggtggggagttggtggtatagaggcggaagctgcaatgcttggccagccaatgagcatggtcttaccaggtgttgttggctttaagttatcaggcaagctgaggaacggagttacagccacagacttggttctaacagtaactcaaatgcttcggaaacatggtgttgttgggaaatttgttgagttttatgggcaaggcatgagtgagttgtcacttgctgatcgggcgaccatcgcaaatatgtctccggaatatggtgcaactatgggattcttcccagttgatggaaagacgctggactatttgaagcttactggccgaagtgatgatacagtggccatggttgagtcctacctgcgtgcgaataagatgttcgttgatcacagccaggttgacgctgaaagggtatactcttcctatctagaacttaacttggaagaggtagaaccatgtctatcaggaccaaaacggcctcatgatcgagtgacattgaagaatatgaagtctgattggctttcttgcttggacagcgatgtaggattcaagggttttgctgtccccaaagaatcacagggcaaagttgcagaattttcgttccatgggactcctgcaaagataaagcatggtgatgttgtaattgcagcaattaccagttgcacaaacacatcaaatcctaatgtaatgctgggagctgctttggttgccaagaaggcttgtgagttgggcctggaggtaaagccatggattaagacgagccttgcacctggttccggtgttgtgaagaagtacttggataagagtggtttgcagaaatatctcgaccagcttggctttcatattgttggctatggttgcacaacctgcattggaaattctggagagcttgatgaatctgtgtctgctgcaattactgagaatgatattgttgctgctgctgtgttgtctggaaacagaaattttgaaggacgtgtgcatcctttaaccagagcaaattaccttgcttcccctcctttagttgtggcttatgcattggctggcacagttaatattgattttgagaaagaacctattggcatctcgaaagatggaaaagaggtttacttccgggatgtttggccatccacagaagagatagccgaggttgtcaagtcaagtgtgctccctgacatgttcaagagcacatatgagtcaatcaccaaaggaaatcctatgtggaatgagctgccagtctcaacaagcactctctacccctgggatccatcatctacatacatccatgagccaccttacttcaaggatatgaaaatgagtcctcctggcccgcggcctgtgaaggatgcatattgccttttgaattttggtgacagcatcacaaccgatcacatctcacctgccggaaacattcacccagacagcccagctgcaaaatatctgaaggagcgtggcgttgaaaggaaggacttcaactcatatggtagccgaagaggaaatgatgagatcatggctaggggaacctttgccaacattcgtcttgtgaataagttcttgaagggtgaggttggacccaagacaatccatgttccatctggggagaagcttgcagtttttgatgctgctatgaaatacaagaatgaagggcatgacactattatcctggctggtgccgagtacgggagtggaagctctcgggattgggctgcaaagggcccaatgctgcagggagtgaaggctgtgatagcaaagagcttcgagaggattcaccgcagcaatcttgctggcatgggaatcatccctctatgctacaaagcaggggaggatgcagacaccctgggcctaaccggccatgagcgctacacggtccaccttccaaccaatgtgagtgagatcaagcctggccaagatgttaccgtgacaactgataatggaaagtcgttcacttgcacactcagattcgacactgaggtatgattgttcttttcaatgcataaatcgctgatgctgtctattgatgttttcgttactgatcaccttcacctccaggtggagcttgcttactacgatcatggtggcattctaccatatgtcgctagaaagatagcggaacaatagattgtaccgtcgagatggttgcgatgcttgcggtgaatcgtaattggtgtaaacggtttgtttagtagtacaacccatttttgcggactacttataataacctctgagtatctcagagtgagctgtctgaaatttgatgaactgctacaattctggtgcgccatgaggatgggatccttttgccttctatgttaataatatgctaacttctgcaataccagatatacatttggcagaagattttgcacgctgtaaatgacactagtattaacactgatgcggttcaaagctgtccttgttttgttatctgccaacaattgatgagcagattttgtttcagatttgtattacgaaccttttaccacgttgccatgtgcgactggtaatgactctgaagcaaccgatgggtgtaaaactgtcatgtaagccagaatctgaagctgctctttgcaaaaaaaataataaaagggaaatactgggggcaataaagctcgtgctgaagctagagcaacttgaaagagaac

SEQ ID NO: 12537 - DNA, 369 bp, Zea Mays
ttcagtatgattctatgccgcttttagaactgtggttcaaagaaggcgaggtctgccaatgggaatcagttcaagcaccgtggcttatagaataactattgctaatcatttccagagttgtattcaatgtttttttttgtgttcgtcttgattcaaggagccatgcaagagtgtatgagtttagttcggctaagtaattagctcatgagggcttgaattatcggttctttttgaggattgaggatttgtgcaactgaaacctttgatcagttgctcatgttgagaagctaatttcttgtcatatttacatgtaataaagtccctctactacagtaataaattagtatttcctctggtccaattaattaa

SEQ ID NO: 12538 - DNA, 1188 bp, Zea Mays
ctgtttcgcgctcccttccggtccaaaccaaaccgtgcgtccgtgtgcgactgcgacgagaagcttccagaacccaccagctaactacgtccgtcctccaccaatcccatcttcggacgccacgacaactcccctccctcttccccctgtggtgtgcacggcagctctgtgacttgtgaggaggaagggaggaagaaagcggatccatggcgtcgaagcggatcctcaaggagctcaaggacctgcagaaggatcctcccacctcttgcagcgcaggccctgttgccgaagatatgttctactggcaggcgacgattatggggccatcagatagcccatacgctggtggcgtatttttggtcactattcactttccaccggactacccattcaaaccaccgaaggttgcattcaagacgaaggtttaccacccgaatatcaacagcaacgggagcatctgtcttgatatcttgaaggagcaatggagccctgcactgacagtttctaaggtcctcctctcaatttgttcccttctgacggacccaaaccctgacgatccgttggtcccagagattgctcacttgtacaagactgatcgcgtgaagtacgaatctactgctaggagctggactcagaaatatgcaatgggctgacaagctattggtctctcatagacccttctgtaactgaaaccagatgtctaaattaatttgtccattcgtgcatcgaacttttgatatataatggaaggagaaacattgatagtacctcggtgttgtctgtggtccaatttaatttaatttaattttggtcttgtgggctgcttgcatggtcgatagttaggttcttcggctgttcctttgcggtcggtgttatctctgacatggagtcaatggtggtgcatgtcttggatgtgtcatcatagtgttaaacttgtcatcttgacaaggtagatatgttttgtcacactgatagttatcgttgattacgttgtcatgtataatatagttgttaaacagtgtagttgtttatactttataatgcttgcatgcacgttagtatgttcatgagtagctacaaggacgatggcatgcattgcatagcgacctcagttatggctactactcattgtgtagctactcggacacaggctacataattgcctcaagtacatctgctacctccagc

SEQ ID NO: 12539 - DNA, 197 bp, Zea Mays
gatgaatcatggcataggatcgaatgtcacatatttactaaataataggagttctgtacaaaataaataaataattacattataagagacaacggtccaacaacccaaagttgactgggagacgacggcctagacctctcacgaacacatcatagcatcctcaaagcgcctcatcctgtggtacctgctcttgacct

SEQ ID NO: 12540 - DNA, 1258 bp, Zea Mays
gttttctatgagaaagaggcatgttgttgtcagatgattaaaatatggtatactctgcgaaatgctgaatacaggctttcttttgaaagaaatcttgaactgtctgaagaagttgcagaatgccaaaaaagtgatgtcattgaagataatcatcatgacatcaatttgggtacacctgtcactatttttagattagcagaagaagacatgccccaggaccctgaaaaaactgatgacgaatcatcatatgaaaatatgggagaagagctcggcgacttaaccctgcaggcagaagagtatattattcagatgcaatctcgtttggatgccatgaaaaaagagctacatgatctcaggagaaagaattctgctctgcagatgcaacggtttgttggggaggaaaaaaacgacttgctggactatttgagatcactaacaccagagaaggttgctgaactatcagagtcttcatgtcccggcgtgcaagaagcaatccattctgtggttcatggtctgctggctactctttcccccaagatacactcaaaggcccctccaccgctagataacacttctggaggggtcttaaaccttgggggcgaggatgatgactgtgcagaacttgtggagaatgcttccctcccatttcagcccctaatatctgttccccgtgcatgctgctgggtcactacatccggggtctggagtaccggttagagcttgctcagcttctgcgaatatccagcgacgtgggttctttctctggtggtgatgatcatgttgtttgagggtaccacgtttactggtattcctcaccgggaagaatggaaagatctggccaagcaatgcagaggtggccgttacactgcgttccctctctgaaatgatgccccaagcccccaatacaggtggcgctgctgagctatatattagttgtagttcctgtaaattcagaaaacagtcactcgggtcgggtgtaaagctagtgttacatatgcacgtgaagcactttctttttttcttcctttgatgttgtgccgtataaaaaaggtttggtggttagttggtgtttatctactggtagcatgataggcttccttgtattctagttgtatgtatctggtggttgtgattgatgtccagcgtccatttagcttgtgtggcttcttgattcgaataaagtttaacttattttttggaactcacgagcacatactttcattggaattatatttacattgttgtccaatgtccattt

SEQ ID NO: 12541 - DNA, 538 bp, Zea Mays
tctgtcctttgtttataatagatacacttatggaacaacgagggcactcaaagaagagaaaattgctgctcgtagtgctatactaccgatgctccaagctgaagaggatgaaagatttgtcaaagagtggaagaagtatcttgaggaggaggcgaggattatgaaagatgttccagggtggaaggttggcgagagtgtgtacaattccgggaaatggatgcccccggccaccggtgagctccgccctgaggtgtggtaagggcctgttgtaggcattgagaatgcaatcatgtcatgagggcatgaataaggctatcagacatgggcatccttctttgttcactaaggatcagctgttcaaatacctgtatctattttactcttatgaaatctggctggttaataatatgaagccgacgctttgcctcatctatgctcgtgcattgatgtaacgtgtccttgtttgatattaagaaactactatggaatataagaaagaaaacagcctgcttcttgcatctccgtggcgtattttgtg

SEQ ID NO: 12542 - DNA, 1060 bp, Zea Mays
tcccatttgaaatctgctgtgcctagtgcttactataagctgaagaaattattagaatgtgcaggagcatggggaaggctgttattgttgctacaaatatgctcgaaagtatgattgttcatccaactccaacccgagcagaagtttcagacattgctatagctgtccgagagggtgctgatgcagttatgctttcaggagaaactgcacatgggaaatttcccttgaaagctgttaaggtcatgcacactgttgccctgagaaccgaggcaactattcctggtggggaaacacctgcagaccttggtcaggctttcaagaaccacatgagcgaaatgttcgcataccatgcaacaatgatgtcaaatacccttcgaacatcaatagtggttttcactaggacgggatttatggctatactgcttagtcactaccgtccatctggcactatttttgcctttacagatgaggagagggttaggcaacgattggctttgtaccaaggtgtatgtccggttcaaatggaattttctgatgatgctgagaagacatttggcaatgctttgtcttatttgctgaaacatggtatggttaaggacggtgaggaggttgcgctcgttcaaagtggtaaacatcccatctggagatcacaatcaacacacaacattcaggtgaggaagatctgatgcggaacgcacatagtattctgattgttggaggacatcgtttcttctagcaaaccgcaaggtcttgttacaatgataccacactggtagtaagtactggtattggtgagatagttggtgctgagctagtgttgtgattctttttcttacttgtgcactagtgctgttttccttccgtgtaaaaaggccaatccaattgccgcttggttttagctgtagctttgggaactgtaggcttgttgtaatacagttcgttctgtcaatgttaaggacttttgcctcgagagctaggcataactcgaagctcaccaaacagcaatctacctgcaaattgcaacgcattttgcgtctttacttccacgcttttggaacca

SEQ ID NO: 12543 - DNA, 539 bp, Zea Mays
gtggagggactcggccacggaccacccgtctcgccctcatctaattacgccccgctcgctgtccctctcagatctcttccttgttctcgcctcgtcgtccccaatcgtcgccgggagtctcccgatccttcttccaccacctcaccggtggtgtcagggccggctcgcggacggtgcttggactgcccccgtcccgtcatggatcgcgccgagctcaccaccgaacaggttctgaagcgagatattccatgggagcattacatgtcaactaagcttatctccggaacgtgccttcagcttttacggcgatatgaccacaaaccggagagccagcgagctcctttgcttgaggaggatgggccagcatatatccgagttttcctgaatatcctgcggagcatctccaaggaagagactgtggaatacgtgcttgcactcattgatgaaatgcttgcaacaaatcctaagcgtgcagcactgttttatgatcaatctttgtcgggtgaagatatttatgaaccgttcttaaggttgatttg

SEQ ID NO: 12544 - DNA, 890 bp, Zea Mays
ggcggacacggcgagtcagcacagcaacagcgcacagcagcacacggtgagttgaagaggatccttgttcagactactggcttggagcctgagaggcagaggctcttcttccgtgggaaggagaagagtgacagagagttcctgcacacggcaggtgttaaggatggagcaaagctgcttctgctcgagaagcctgcccctgccaacatagagcagaaggttgagcctgtgattatggatgaaagcatgatgaaggcatgtgcggctgttgctcgtgttagagttgaagttgataagctgtctgctaaggtgtgtgacttggagaagaatgtactaggagggagaaaggttgaggataaagaatttgttgtcttgacggagctgcttatgatgcagctgctgaaactcgatggcattgaagctgaaggagaagcaagggcacagaggaaggctgaggtgcgccgagttcagtcccttgtggagaccttggataagctgaaagcaagaaatgcaaaccccttcagcgatcataataaggctgtttcagtaacaacgcagtgggagacgtttgagaacggcatgggcagcttgagtgctccacctccccgtgtttcttcaacgcaagctaacactgactgggagcagttcgactaggctcagatgaagctgttgatgtatcatgaaatctgtgagatcggtatggacattcctttccgaggcagcgaggtgttgtgtatatgcaccacgtttgataacttttggcgtcccaagtgcctgtgattctgtgaatgttaccagatcgtgccactgccatactaccatgtgaattgcatcgctcattgagggtcatatttcaatatgctcctgccagtgccattcgcgtgctattt

SEQ ID NO: 12545 - DNA, 900 bp, Zea Mays
gcctaggagctgctggatctgcacgcttggcccgatgaatgttgaaaagctcaagaagatggcaggtgctgtgcgcactggggggaagggtagcatgcgcaggaagaagaaggcagtccacaagactacgaccacagatgataaaaggcttcagagcaccctgaaaagaataggagtgaacaccattcctggtattgaagaggtcaacatctttaaggatgatgttgttattcagtttgtgaatcctaaagtgcaagcttcaattggtgctaatacatgggtggtcagtggaactccacagacaaagaagctgcaagatctgcttccgtccattatcaaccagctcggccctgacaacctagacaacctgcggaggcttgcggagcaattccagaagcaggcccctggtgcttcaggtgcagaggctggcgccagcgctggtgctgctcaggacgatgacgatgacgttcctgagctcgtccctggagagacatttgaggaggctgcggaagagaaaaaggagtcgtcatgattttgccacatgcccgcccttttgaagggcttataagtaaatccttgcgtagaagggacatgttgaactctgacctaccttatttgtgcctgcttacggttatgtcatgaacgagaatttggtagtccagcgctggtccccctttttcacccatatccccgtgcttgtgtggtaaaagtcttgttaatgttaaaggccacacttaaaccaaatcaaggtaccatgtctccggtaccatgcttcacgaagatttacccctaggtaccatgcttcacgaagatgaataccagatgtcagttcacctgccatttgtttgcctggactgtaggaaatgtcatcatttcatgcgctcacgtttcatctgttat

SEQ ID NO: 12546 - DNA, 573 bp, Zea Mays
gccgggcagtcttcttcaggcgggtggatctctagcgctccttgagctggagcaggcaggcgtgccggtcttctctaggcatcttctccaggcaggcgtgccggtcttctccaacgcatcttcagcgtctctcgagctggagcaggctctatgctccgatgtactcatccctgctccacaccggctcaactgcatccaggtgggttcgacctttgcttatggtcatggaagaggcgacgatgccaaaactcttgcagagctcggattccaaatcggtgattacttgagcgttgcaatcatgtagacagtgcccgcaccggatgtaattgctgaaatgtcaaaaggtctctggttgcaacagtaaggtgtgattctctgttagcagtagaaactggaaccagaattggtctgtaatactggtagtatcaaatgtcaaaagggctcgggttcctatgaagtcaaacacaggaaagtttgcatcttggagccaaaccaattgggcaaatttttgttcggtaaaaaaattcagagcattatgcagaactgtgaatataggtgcttcacaaacggaca

SEQ ID NO: 12547 - DNA, 1255 bp, Zea Mays
gtttttgcagcttgaggaaaaagacgagatatgcctcgttatgatgatcgccatgggaatacacgcttgtatgttggaagattggcccctcgcacccgttcccgcgacctagaatatcttttcagcaaatatggaagaatacgtgaagtggagttgaagcgtgactatgcattcattgaattcagtgacccccgtgatgctgatgatgcgcagtacaacctagatggcagggaagtcgatggaagccgtattattgttgaatttgctaaaggagttcctcgtggttctggtggttcacgtgagtacatgggaagaggacctccaccaggaacaggtcgttgttttaactgtggaatggatggtcactgggcaagggactgcaaggctggtgactggaagaacaaatgctaccgctgtggtgaatcgggccatatagagagaaattgccagaacagtccaaggaatctcaggcgtgataaaagctattcacggtctccatccccacgtggtggacgtggccgcagccggagctacagcagaagccggagctatagccgatccagatccccatctggatctcccaggggtggacgccgtgaacgtgacgagaggagatctaggagtcttagctacagcaggagcgcaagccccaggcgttctgtctcacctgcaaaggaaaaggagcgcagtcgcacacccaatggcagtaggagcccaaggagccccagcccaagggctgaggtgagcccaccactgaaggataatggtgcacgcaatggctcagaccatgaaggcaaccctggtggtggagagaacagcaagaggagtcggagcccatctgatggctaccgtagccctgtggccaatgggcgcagcccgagcccgagggacgatcggagcccaagccccaagggcaacaacgaagatgacgagcgccgtggttcacctagaggaagtcagtcccccctgaactgagaaattctgatcaaatttgggccgcacgattcggttgtaactgttatattttagtttgagacaacaaactgtatttgctcatttctcatacagtcaggtttatgctttttgagctagaaaacatgtgtaagaatttgttaccttcaagctattcctggtttgtgatatggtaatacttgaactatttagcttgccaaatctgaatacttttaactatcaagtatcttgagttagtttgtctgttttgctaagctgcagcatttctcactaacgctttcgg

SEQ ID NO: 12548 - DNA, 76 bp, Zea Mays
cgcgccacaaagctgaatgggagatgccacctagatcaagtcaaatgcctcagtgataggcggctcctcttcgacc

SEQ ID NO: 12549 - DNA, 1373 bp, Zea Mays
ctaatgttcagtgacaccaagaaatgagcaggatgactatgaagttgtcaggaaagttggaagaggtaaatatagtgaggtctttgaaggcatcaatgttaacaacaatgagaaatgcatcattaagatccttaagcctgtcaagaaaaagaagatcaaaagggagatcaaaatacttcagaatctctgtggaggtccaaacattgtgaaattgcttgatattgtcagggatcagcattcaaagactcccagtttgatatttgaattcgtcaacaacacagacttcaaagttttgtaccccacattgacggattatgacatccgctactacatatatgagctactcaaggcccttgattactgtcattctcaaggcatcatgcatcgagatgtcaagccccataatgtaatgatagatcatgagcttcgaaaacttcggttgatagactggggcttagctgagttctaccatccaggcaaggaatacaatgtccgtgttgcatcgaggtatttcaagggacctgaactccttgttgatttacaagactatgattattctttagacatgtggagtcttggttgcatgtttgctggaatgatatttcgcaaggaaccattcttttatggccatgacaaccatgaccaacttgtgaagattgcaaaggtccttggaacagatgggctgaattcttatttgaacaagtaccacattgagctggaccctcaacttgaagctcttgttggaaggcatagtagaaaaccctggttgaagttcatgaatggtgataaccaacatctagtatcacctgaggccatagattttctcgataagctcctgcgctatgatcaccaagacaggcttactgcacgggaagctatggcacatccctacttccttcaagtcagagctgtggagaacagtaggacgagagcacaataatcatggtctgcactcttgaaatggagttgttgctagttcgtgaaaatcataggcttaaatccatgttcagtattcacatcgctccaggaatctgggccatgactccatggcaatgaatcaaaatagtacgagccgcatcatgtggacaaccttggcagatctttttattcttgtctttattgctgggagcactgtagctttaaacctacaagtagtgcttgaatgagatgagattcatatcatctcctgtggtggaatgtgaaattgtatgtgacctttagactaattaaaaagtacaatacagcgctaagcatactgcttgtattatgttgtgctattatgtatctacgattcttatttattttgggcgatagtcaccgtgatgaattactttttttggatctcacggatgaaattatgagttgtctctgat

SEQ ID NO: 12550 - DNA, 1363 bp, Zea Mays
gtttcggaacccccactccacctacgcctacgtcttcggagaggacgtcgggttcggcggcgtcttccgctgcacgacaggcctcgccgatcggttcggcaagagcagagtgttcaacacgccgttgtgtgagcagggtattgctggatttgccatcggcctagcagcgatgggcaatcgagctatcgcagaaatccagtttgcggactacatatttccagcctttgatcagattgtcaatgaagcagctaagttcagatatcggagtggaaatgaatttaactgtggaggcttaacgattcgaactccctatggtgctgttgggcatggtggtcattaccattcacagtcaccagaggctttcttctgtcacgttcctggactcaaggttgtcataccacggagtccacgcgaggctaaggggttgctgttggccagcatccgagatccaaacccagttgtattttttgagccaaagtggctgtatcgcttggctgttgaagaagttcccgaggaggattacatgctgccattatccgaggcagaagtgattagggaaggaagtgatataacacttgttggatggggagctcagcttgcggtgctgaaagaagcctgtgaagatgctgcaaaggatggggtgtcttgcgaactcatcgatctgaaaacactcgtaccatgggacaaggaaacggtagaggcctcggtgaagaagaccgggaagctcctcgttagccacgaggctccagtcaccgggggcttcggcgcggagatcgccgcgtccattgccgagcgctgcttccagaggttagaagcacccgtggcgagagtctgcggtctcgacacccctttccctctcgtgtacgagccattttacatgcccaccaagaacaaggtcctggacgcgataaaagccactgtagatttctgaaacatgttgcttgatcgatacagagtactctagtagtctagttagatgtgcacggtttgtgctggtctgggtctgtagcctgaggatgagcgatccacaaaccggcttatttgtattcaacaatacagcgataaataaagccgcaaggtgcaaaattgtaggatgtcatgatgtatcgaagtgttcccagcgaaattcgttgtatgtaattgtcgcactgatcagtggtatgttctgtctgagcttgaagtcttgatgccactacacgcacacgaggacacgacataggccgcgccatggctgtgtgttaggagtggctgccatgtggggctattgccagggagcaagtgggtttctacaactataaaaggacatttgtataggctaagaaggacatcatcaattatcagaatacaaacacaattatcatat

SEQ ID NO: 12551 - DNA, 2056 bp, Zea Mays
cccgtctctcggactctcggtgcggaggaaccagtctaagccaccacccaggcccagctcacctctttcctctcttctcatgcccacgcgctcgcctatctcatagtccttccccattccgcctctctagctggcctgtcgaggaccctcgccatcctccccaggcgcaccaccaaacggtccaaacccccagcggcggcgctaggatttgagtctcagcgcgccggcaccgccaccgccaccggcggtgatggcagggcaggagcgtaggacaatcgatctggaggagggatgggcgtttatgcagaagggtatcaccaagctgaagaacatcctcgagggcaagcccgagcctcagttcagctccgaggactacatgatgctctacacgacgatatacaacatgtgcacgcagaagccgccgcacgactactcgcagcagctctacgacaagtatcgggagtcgttcgaggagtatatcacctccatggtactaccttcgctaagggagaaacatgatgagtttatgctgagggagctagtgcaaaggtggtcaaaccataaagtcatggttcgttggctctcgcgtttctttcattaccttgaccggtacttcatatcaaggaggtcacttaccccacttaaagaagttggtcttacttgcttccgagagttgatatatcaagagattaaagggcaagttaaagatgcggtgatagctctgatagacaaagaacgcgagggtgaacagattgaccggggtctgttgaagaatgtattggatatttttgttgaaattgggctgggtcaaatggagtgttatgagaatgactttgaagatttcttgctcaaggatactacagagtactactctgtcaaggctcaaagctggattcttgaggactcatgcccagattacatgattaaggtacctagaactcatgcccagattacatgattaaggctgaggagtgtttgaagcgggagaaggagcgggttggtcactatttgcatattagcagtgaacaaaagttgttggagaaagtgcaaaatgaattgcttgctcagtatgcaaccccgctgttggagaaggagcattctggatgttctgctttgcttcgtgatgataaggttgaggacctttctaggatgtacaggctcttctccaaaatcagccgcggtctggagcctatttctaacatgtttaaaacgcatgttacaaatgagggcacagccttggtcaagcaagcagaagattctgctagcaataagaagccagaaaagaaggatatagttggcatgcaggagcaggtctttgtgtggaaaatcatcgagctgcatgacaaatatgtagcttatgtgacagaatgtttccagggacatacactcttccataaggcacttaaagaagcctttgaggtcttctgtaacaaaggtgtctctggcagttcgagtgccgagttgttggctaccttctgcgacaatattctgaagaaaggttgcagtgaaaagctcagtgatgaagccatcgaagatgcccttgagaaggtggtgagaatgcttgcatacatcagtgataaagacctgtttgccgagttctataggaagaagcttgcaagaagattactttttgacaaaagtgctaatgatgagcatgagagaagtattctgacaaagctcaaacaacagtgtgggggacagtttacttcaaaaatggagggcatggttactgaccttactgtcgctagagatcatcaaactaagtttgaggagtttgtagctggacatccagagttgaatcctgggatagacttagctgttactgttttgacaacgggattctggccaagctacaaaacttttgacataaaccttcctgccgagatggtgaaatgtgtagaggttttcaaggagttctatcaaacaagaacaaagcacaggaagctgacatggatttattccttgggaacctgcaacatcaatgctaagtttgatgctaaacctattgaacttattgttacaacatatcagtttttgacaaacgacttgttttgac

SEQ ID NO: 12552 - DNA, 2127 bp, Zea Mays
atgaccggaatgcgagatccggttgccaagcgagggagaggaaggaaggccgctcgggggagacgcctggaaaaccgccacctccgcgcgccgggataccccgcctcccacgcgcccccaccaaactccgccacgctcgctctggagacaccgccttcctgtcctccgctcactgtgcttatcctcggatccgcgactattgccccgctcccccaaatatcgctgacacagggatccaagcccctgccatctattcagccgccccgacgcccacagtggataccaactgacgggccaccaaccatgttgttccacgccctgggctgttgctggaagctgatcaatcacttgattggtctccggaaaggatccaaatcttttgaggaagcacgtgccgctggattcaccgaagagagcggaaccttgggcgatatttgggaaaccgtctccggcagcgatcttgtgttgctgctgatatccgatgttgcacagttcatcctgaaagttgcatctcactttctgctggctgacaactatgagaagatcttctctcacatgaaaccaaacaatatccttgttttatctcatggatttcttctgggacatttgcaatcactcggactcaatttcccaaagaacatcagtgtgattgttgtatgccccaagggaatgggtccatccgtaagcaggctttatgttcagggcaaggaagtcaatggcactggcatcaactctagctttgttgtgcaccaggatgttgatggaagggcaactgatgttgctttagcatggctagttgcacttggttcccccttcacgtttgctactactttggaacaggagtacaagagtgatatctttggagagcgaggaggtacacagaacaaggaatggatgaagagtcggcctacaaaaacactatcgagggcataactgggatcatctcgaaaaccatctcaaagaaattacgtgattattcatccttatgccaaccattgttggggatgcttgaagtgtacaactctttgagcgaggaaggcaaaaaggagttcaacaaggcttataatgcatcgttttacccgtgcatggatatactctacgaatgctatgaagatgtggcctctggaagtgaaatccggagcgtggtgttggctgggcggaggttttatgagaaagagggcctcccaacttttccgatgggcaacatcgaccaaactcgcatgtggaaggttggtgaaaaggtgcgctcaacccgtccggaaggtgatcttggcccgctccatgccttcactgctggagtgtacattgccctgatgatggctcagattgagatcctgaggaagaaggggcactcctactctgagatcatcaacgagagtgtgattgagtcagtggactcgctgaactcgttcatgcacgcccgtggggtcgccttcatggtggacaactgctccacaagaccacaacggctcgcctaggatccaggaagtgggcgcctcgcttcgactacatcctgacgcagcaggccttcgtggcggtggacaaggacgccccgatcaaccaggacctcatcagcaacttcttgtcggaccctgtccacggtgccatcgaggtctgcgccgagctaaggcccactgtcgacatatctgtgcctgccaacgccgactttgtgcgcccggagcttcggtagtcttcctagattgaggcaatgtgagcggagagggagagagaaagaggatttcgtgtcccgagttagaacagagtgttgtatgttttgtgcgactgtttgtaagtcaagtctgaactgtgaacctatgtgagcttctatcagaggacccggagaaagcctgggcatctgtttctggaataaaatggctccttccatggaatagatcgggagggtatgtgcgaaagtatgatgaacatgtgatctctcttcgcataggtttgcccatgtcagtgtttttttgtttcggtgacaatggccaggcatttgcactgctataccttagattattcgaaatgttgcctaggaatagactaacgggttgttttgttcgattggctaaagtttagtccgtgttatgggttatattgaatgtttgcatgtcaattaatatattaaaa

SEQ ID NO: 12553 - DNA, 712 bp, Zea Mays
ttgtgtttagtcaccgagaagcaaaatgaagagtgagatgtcagaatacaagaacgtcgttggggggaggctaaagctgaagggtaaggcactggacgtgaaggaaggtggagtcaagaagaaaaagaagaagcatcaactcgaagagtcgtctcagattgagcacgatgagctccacaaagggggagactctggcttaccaactgatcacaacaatgagcttattgaagctggcaaggtgggagatgaagaagggaatccacatcccgactatgaccatctgacaccggcggagcgacgctatatagaacagaagcggaagatcgacatgcaaaagctggccaaagttgccaacaagtcacacagggaccgcatccaggacttcaaccagtatttggcgaacctcagcgagcactatgacatccctaaagttggccctggctaacatacatagccaaactgttgtgtaggcacaaacaattgtatgctaggtgggcttcaaggacattaaaaataaataaataaatgtatgtttggtctatccagctttttgttagtatgttatgtatgattttatatttgttgtataatgacatggtcgattcatgccgtcaactgtcgcggtatatatatgtggattgatttgaattgattttatatttgttagcatgttatctattttccacttttcttttaaaaaacataatttatt

SEQ ID NO: 12554 - DNA, 3548 bp, Zea Mays
aagtagcagagtcaatatgtcgctcgatgttactcaagtactcttaagcgcgcaatctgctgatggcgcagtaaggaagcatgctgaagaaagcctcaagcagttccaggagcagaacctccctggattcttgctctctctctcaagtgagttggccaatgaagagaaacctgaggagagccgcaggttagctggcttgattcttaagaatgcactggatgcaaaggagcagcacaggaagaatgagcttttccagagatggctggcactggatgctggtgccaaagcacaaattaaaggattgctgctgcaaactctcacatctcctgttgcaagtgccagatccactgcttcccaagttattgccaaggttgccggtattgagattccgcagaagcaatggccagaacttataggatcattgcttgcaaacatacatcaggtccagccaaatgtcaagcaagcgacgcttgagacacttggctatttatgtgaggaagtttctccagatgctgttgaccaagaccaagtcaataaaatacttacagctgttgttcagggtatgaatgcttctgaggcaaactctgatgtcaggcttgcagctacacgggcattgtataatgctttgggctttgctcaggttaatttctcgaatgacatggagcgtgactatatcatgagagtagtttgtgaagcgacacagtctccagatgtgaagataaggcaggctgcttttgagtgtttggtggctatctcgtctacttattatgataagctggcaacatacatgcgggatatatttaatataactgcaaaagctgtgaagagagataaggagtcagttgcgctccaggctattgaattctggagttccatatgtgatgaggaaatcgacattctggatgagtacagcagtgaatttacagctgattctgatgttccttgctactactttatcaagcaggctcttcctgccttagtgccgatgttgttagaaactctcctcaagcaagaggaagaccaagacttggatgaaggtgcttggaatcttgcaatggctgggggaacttgtctgggcctggtggcaaggaccgttggtgatgacattgttcctctcgtaatgccttttgtggaggagaacataaccaagtctgagtggagacaaagagaggctgcaacatatgcctttggctctatcttggagggcccatcagctgataaactggctcctcttgttaatgttgcattgggcttcatgctgtccgcgctgatgaaggatccaagtaaccatgtgaaggacacaactgcttggacccttgggagaatctttgagtttcttcatggttcagcgcttgaaactcctcctatcattacggccgagaattgtcagcaaatacttactgtgttgcttcacagcatgaaggatgtcccaaatgtggctgaaaaggcctgtggagccctctattttcttgcacaaggctatgttgattctgggtctgcatcgccactatcccctttctttcaagatattgttcagaaccttcttatggtcactcacagggaggatgctggggaatctcggctacaaacagcagcatatgagaccctaaatgaagttgtcaggtgctccactgaggagacggctgctattgttatgcagttagtacctgtgatcatggtggaactccatcagacacttgaagctgaaaagttgtcaactgatgagagggagaagaggagcgaactgcagggcctcctttgtggttgcttgcaggtcattattcaaaagttgggagggatggagtcaactaagtactctttcttgcagtatgctgatcagatgatggaactgtttttgagagttttcgcatgtcgaaatgccacagtgcatgaggaggctatgcttgctattggtgcattggcatatgcagctggtccaaactttgcaaaatacatggcacagttttatcagtatttggagatgggtcttcagaactttgaggagtatcaggtgtgtgccattaccgtgggcgttgttggtgacctctgtagagcactggaagacaaaattttgcccttctgtgatggcatcatgactcaactcctgaaggacctgtccagtaaccagttgcacagatcagtgaaaccaccaatattttcgtgctttggtgatattgcactggcaattggggaaaactttgagaagtatttgatctatgcgatgcctatgctccaaagtgctgctgatttgtctgcccataccactgcaactgatgatgagatgctcgactacaccaatcagctaaggagtggaatcttggaagcctactctggtatcctgcaaggatttaagagttcacctaagacacaactactgatgtcatatgctccacatattattcagttccttgatgctctgtacaatggaaaggatatggatgatgctgtgatgaagactgcaataggtgtcttgggagatctggcagacacattgggtgtccatgctggccctttgatcaatcaatccacctcaacccaggcatttttagaggaatgcttggcatcagatgatcctttggtgaaagaatctgccgattgggcgaggatagcaatcagccgtgcagtttcgggttgatgccagagtcttgagtctgcacttgcattcatctacatatcatcatgcctgggtctttgattgcatcatgtccagacatgctcttgggagaaatccaacatttttacagcagagtctgagggtcctcactaactcatgcatcactacatgtgtcaacccgcccttcttgcttctgcgagaaaagagggttcaagctggccgtctgctaactttttctaaaggcatctgcaaccttcatttcttattggaggtgagatgtgagcttctattgtcgcatgacatgctgaccagtttccttggcatgtcaagcgtatgatctgtggcctatcatttccccttgcattcatctcatgcattgaacattggtcggatggtcacttgggacaacaggtccagttgcttgctgctgctccagtaagcaagagcgggctcaaacgcattgtcacaggattatttttgtatcgatcagggtggccaagtccatgctgatagtaggatgttaatttcctagcattcttttcctttcatccacttgcattgtctttgcatttcattcttggtcggattgttttgtaagagttattttagggcaaaactttgtcctgtctggtctgctaccgcacgctatttgtaagtcaagttcatgcgtgcattggtttatttacgggtgctattggagcagcgggtgtttgtgcttttttccatcttgtttttggtaatatacatacatgctgctccatttcggattatcaggagctgggcgggtgaagagacagttttataggtctttggagttgtttttgccggggcagaggcagttgagttggctgtgatatcttttgtgatttatgaagaaacaaagtgaattgagaataatatggtgaaatgtaaatggtcttcatttcacgcttgg

SEQ ID NO: 12555 - DNA, 1169 bp, Zea Mays
tgtaccttgttagtcatctgagcctggtgaaagtgaaggctgcactaaatagacaatctaaaactcgattgattgggccaaattgccctggtatcattaagcctggtgagtgtaaaattggaatcatgccaggttacatccacaagcctgggcgtattgggattgtatctcgttctggtaccttgacatatgaagcggtgtttcaaacaacagctgtaggcttggggcagtcaacttgtgtaggcattggtggtgacccattcaatggcacaaattttgttgattgccttgaaaaatttgtcgatgaccctcagacagaaggcattgttctcatcggtgaaattggaggtacggctgaggaggatgctgcaacgttcatccaggaaagcaaaacacaaaagcctgttgttgcattcattgctggacttacggcacccccaggccgtcgcatgggtcatgctggagctatcgtggcaggaggaaagggtactgcccaggacaaaatcaaggcactcagagaggctggtgttaccgttgtcgagtcaccagcgaagattggttctaccatgtttgaaatcttcaaacagcgtggaatggtagaatagacacagtggtacagtagagagacattgagaaaccgctttttgatgcttgcgggcaatcgcgagcaattcctcggtagatccttctccctggccacaaacaaaactactgaggttttcttttcgtacttgtcttatctttggaagatgtcctggccttcttcacttggataacctttcgctgagctcatttcaataagacgtttcggagccatggaaatgctatgtcgcttggagtcaatgtggatgcctaatttcaaatttttattcttcatacatttcattctaggtttacttttctgtttgcttgtattatattatcagcgctacattgcccacacagctgtggaagattgctttgcttgtgtcatgtttaataggtttctcacgactccgtgttggctgatcatcctcactgaatcattgaactgtctacaaatgtcctcattactgaatactccttccagaatgataagtgtattcttgttttccaccacgggaaagctgaatttcattatttgacagtaacaaaattacaaaggtttgtaactaagaaaaaaggaacta

SEQ ID NO: 12556 - DNA, 3133 bp, Zea Mays
tcaagtaaaactcctccagccccaccgccacctcccctcatgacaggaaagaaagcgcctgtgcccccacctccaccacctcaagcaccaaaacctcctggagttgtgcctccaccaccaccaccaagctcaaagatctcaaatgcaccagcaccacctccattattgggaaggggacgtggcaacacaactggaccaactaaaggccgtggcattggtttggcacaacaaagtaatcctcccaagaaggcttcactgaagcctctacattgggtgaaagtcacgagagcaatgcaagggagtctctgggctgatgcccagaaacaagggaatcaggctaggtctcctgatatcgatttatccgaactggagagcttgttctccactgcagttgtaaccagcacaagtgaaaagggggcaacaagacgtggttcagctattaacaagccagaaattgttcacctggttgacatgcgacgagcaaacaattgtgagataatgcttacgaaaattaaaatgcctctacctgatatgattaatgcaattttggctctggacacttccgttcttgataatgaccaagtggagaatctcattaagttttgccctacaaaggaagagatcgagatgttgaagggttataatggcaacaaagaaatgcttgggaaatgtgaacagttcttcctggagctgatgaaagttccacgtgtagaggccaagctaagagtttttgctttcagaattactttctcaacacaggtagatgaactaagaactaacctaaccaccataaacgatgcaacgaaggaggtcaaagaatctctgaagttacggcagataatgaagaccattctcacattggggaatgcattaaatcaagggacagcacgaggatctgctgttggcttcagattagacagcctccttaagctgtcggatactcgatctagaaacaataaaatgacgctgatgcattatttatgcaagcttcttgctgagaaaatgcccgaacttcttgattttgacaaagacctaatttatctggaagcagcttccaagatccaactgaaattgcttgcggaagaaatgcaagcaataaacaaaggtcttgagaaggtggagcaggagctagctgcttcagaaagtgatggtgcgatttcagttggctttcgtaaggcattgaaaagctttcttgatgcagcagaagctgaggttaggtccctcatttccttatacgctgaagtgggaaggaacgctgattcgctagctcagtattttggtgaggatcctgcacgctgcccgtttgaacaagtgacatcaattttagttattttcgtgaatatgttcaaaaaatcacgtgatgaaaatgctcgaaacgctgaggctgagaaaaagaaactggaaaaggaaaaagaaaaggcaagtgtgtctgctaaataagtataatttgcggcagtgcagaacctgctttgaaacaccttctgtacgtacagagatgctgtgccaggagtctcgctatctggttgccatccattaaatggtttcctttgcgaattccaaggtctaggagctttcgtgctcatgtacagtgggaatgtttgaacagatgactgaacaaacatgcccacgccacggctgctgtagtttttgcgtgtaaatataacagaaactggagtatagctgtctcgcctgtacataaaattagtccagggcccgaagcggggacgaagaaactacaccactgttcatttttttctataataacaactgtacaatgttgctgtattactaaagagcaaacaaatgacgagtacaaatcatttgcacttcatacttttatccattgcgaggcatgtagcatgttactctttatcccacttgtacttagattaggtgcaggtgtcatgttttacttgttgcacaccgtttcactgatgagtagctcccataccccataatttgactgatgagctaagataaggaatgaccaaccatttaacatcatctttcaaaccatcgacaaattttgtggcataatacagaggatcaacattgagctgataagcattcagttggtccacaagttgtgcaaactgctcaatataatcagagacaataaaggtttgtcttccagcttggcgtggagcacgacgatgtcattggtgtttgcggccaccgtcttctctagcgctccccaatgcatgtcctgtcctgtggctcaggccgatcacatagctaccagagaagcttggattgtatggcgatgttcttcgattgcgattcgatttgcttggactgtgtgctgccaacaccatcactatgctaggatccgacacaccatccatcttcgccattcatgtgaagtatatactagcataatagtcctagaattccgattcacaaatacgacatgtctgacagcatccaaatcagtacaaacaagtgttcaggtgacacactgtacatggattatggtcatatcaactcagcaccttatctcgtccgtccgtggatgaacatgctcccaacaatggacgattagtgatttaccaccatgcataggcaaactaggcatagatgacttcctctgcttcatcgacatcctctggtctccacaagaatatgtgctcacgcccagaagccgtacttgacaggtgtcccggtgggcttgagccacggctcggcgtgcaagaagttctgcacggtgaacttttcggcctcctccttgctgatcaccttcttgtagccgggccatgtgacgcggccggcggtgtcggcgccgggcccccggttggcgtactcggcgtaccacagcgtcttgagcccgaagtcgccattccacggcaggtacccggccttgtcgatgaacgcggggatgtcggactccatgatgagcgtgcgcgagaactcgcgccaggggcgggcgaggtagctccggatgggcgggcgggacgcgtccttgagccccgtctcggcggtgaagcggcagtactggaagacgaagcccgtgctctcgcgcccgtccgcgcggccctgcgccgtggcgatgttctgctggttgtccatgggccggcggaggaccaggatgcagttctggaacacggcggccgcgtcgccgaagatgaagtcgatg

SEQ ID NO: 12557 - DNA, 1885 bp, Zea Mays
gattaaccaccttgaacttggcgataaaattctggttgaaacaaatgttaactttgattctataagagcatggcagcttgtaacatggatgacagaaatctggaaaatctatgactgagatgactactgctgagagggaacttgatgctaacacaaattatgactggaatagaatacaagaaagtggaaaagacgctgagcttctgtttggacccggctatactggtcttgcgaatcttgggaatagttgctatatggcttcaataatgcaagtcatgttttcaatccatcctttcatatcaaggtacttcgagaaacagagtttgaaagctgcatttgcaactgcacccgctgatccaacagtagacctaaacatgcaactgacaaaactagcgcatggtttgctctctggtaaatattctgctccagcaaaggaggggcaagaagggatacgttctcgcatgtttaagtcagttatcactgcgaaccatcctgaattttcaagcatgagacaacaggatgtccttgaattcttccttcaccttattgacagagttgagaaggcaaaccctggagaccgtgagctaaatcctttttccggtttcaagtttgttgttgaagagagggttcagtgcccttctgggaaggtttcttacaacaaacgatctgacaacgttctttctttgagcataccactgcatgaggcaactaataaagagcagctagaagcttttaatgagaagaaagctgcaatgaacttggatggaaaagaagtgtctaatgaggatattgtcaggcctagagtcccattggaggcatgcttgtcaagtttttcagggccagaggagattccagatttttatagcactgcattaaattcaaagactaccgtcactaagacagctggtttcactacctttcctgattaccttgtgctgcacatgcgtaagtttgtaatggaaacaggatgggtgccaaagaaactcgatgtttatatagatgtgccagatacaattgatatcacacatatgcgcagcaaaggattacagcctggggaagagctgctacctgaaggaggttctggtgacgacagtgccgagcctgctaatcctgttgccagtgaggatattgtaacccagcttgcaagcatgggcttcaactaccttcattgtcagaaagctgctattaacacatcaaacacaggagttgaggaagcgatgaattggctcctctcgcacatggatgatccagatataaacgacccaatatcaaaagattcacgtgcttatgagccatctgttgacgaagcaagtgttcaaactctcatctcctttggattccaggaagacattgccataaaggccctgaaagcttctggtggtaatatcgagaaagctacagactggattttcagccaccccgaagcatctacctcagcatctgctgattcttccactagcaatgtaaatgctgatgacacatatattccagatggaagtggcagatacaagctgatggcgttcgtgagccatatgggcacctctacccactgcgggcactacgtagctcatgtcctcaaagacgggaggtggacaatctttaacgacagcaaggtcgcagtatctgttgacctgcccaaggaaatgggctacctctatttctttcagaggattagcaactaggcacgtcacacacaatggaaagaatggtgggctgttaggatactgtcttgctgattttaaagcgaacgtttactcacatcctgccatgctggttactgaatggtcaaccgggatatttgcttttttgttccttgagacctcgattggcatcttccggttacataagaacaaaatcgcaatgaaagaaagtagacaataagaca

SEQ ID NO: 12558 - DNA, 453 bp, Zea Mays
tgcaaacataaccggccgttgtttctcttcttatctgtgtggattgggatacttctgtccgtttatctcttcttccactgcctccccaccacttcgtcctcgccggctcgcaactccttgatggcggccacggcgagtctcactaccactgctccctcccctccagctctcctcaaagcatcagctcctttgcttatctcctttcgccccgtctcccgccactgcaagaacctgtgcatcaagaccaaggccacagaaaatgatcagtctgctaaaaagcatcagaaggtgaagagcattctttgccaggactgcgaaggaaatggggcaatcgtatgcaccaaatgtgaaggaaatggggtaaattctgttgactattttgaaggccgatttaaagctggatctttatgctggttgtgcaggtctctaaacttggttttggtgtcatcaaag

SEQ ID NO: 12559 - DNA, 1697 bp, Zea Mays
ccctcggactggctggtctctgttaggtcacccatgcgtggacttgctagcgagggagacctttgcatgctcctttggttgaagattgctactttgcaaagaaggcatggaatgcacagaaagcaggagcagcagcaatccttgtcgctgatgacaaagatgaacctctaattacaatggacaaccctgaggagagtggcaacacagattatctagagaacatcactattccttcggcattaataaccaagagttttggggacaagctcaagaaagtaattgacaacggtgacatggttagtgtgaatttggattggagagaggccctgccccatcctgatgagcgtgttgagtatgaattttggaccaacagcaacgatgaatgtggcctgaagtgcgatagccagattgattttgtcaagagcttcaaaggagcagcacaagtacttgagaagaagggctatacagagttcactcctcattacattacctggtattgcccagaggccttcattctgagcaagcagtgcaagtctcagtgcatcaatcatgggagatactgtgcacctgacccggaacaggattttagcaaaggatatgatggtaaagatgtggtggtccagaacttgcgccaagtttgtgtctttaaggttgctaaggagcacaagaagccttggttatggtgggactatgttactgattttgcgattcggtgtccaatgaaggaaaagaagtacacaaaggagtgtgctgatggtgttatcaagtctcttggccttgatcataaagcaatagataaatgtattggtgatccagatgctgatgaagaaaaccctgttctgaaagctgaacaggatgcacagattggcaagggctctcgtggtgatgttaccatcttaccaactctggtaattaacaatagacaatacagaggtaagcttgacaaaggagcagttcttaaagcactttgtgctggttttaaggaaactactgagccagccgtttgcttgagtgaagatatacaaacaaatgagtgcctagagaacaatggtggctgttggcaagataaggctgctaacatcactgcatgcaaggatactttccgtggaagagtttgcgagtgtccaattgtgaaaggagtaaaatttgttggtgatggctatagtcattgtgaagcttccggatctgggcgatgtgaaattaacaatggaggatgctggaaagataccaagaatggtcggacatactctgcctgtaatgatgatggctgcaaatgcccagatggattcaagggtgacggtaggcacaaatgtgaagatattgatgagtgtaaggaaaggactgtgtgtcaatgcaaagaatgcaaatgcaaaaacacatggggaagctatgagtgtggctgcagtggaggcttgctttacatgaaggagcatgatacatgcataagcaaaagtggagcatcagaagcaggttggggcttcttgtgggtcatcttctttggccttgttgcagcaggagttgcaggatatgctgtgtacaagtacaggatccggaggtacatggactcagagatccgtgccatcatggctcagtacatgcccctggacaaccaaggagacgttcagagccattctcatcacattgagatgtgaggacaggaggatgcagacttgacgaaggggggggggggggggggg

SEQ ID NO: 12560 - DNA, 1086 bp, Zea Mays
aaaacgtggcgggcttcaccgggcccgggccgggctgccggtttggccatctctacccacatctgctgcagactcgaggcgatcgaagcgtcattggcggcggctgcggcaatggcggggctgtcgctactgtgcggtgactgcggcgcgcagctgcgtagtgtggaggaggcgcaggcgcacgccgaggccaccaaccacgccaacttcgtcgagtccaccgaggccgtcctcaacttcgtctgctccgactgcggcaagccatgccgctcccagaccgaggtggacctgcacaccaagcgcacgggccatacggagttcgcggacaagaccgcggaggcagccaaacccatcgatctcgaggcgccgcttaagccggcctccgaggatgtcatggacgtagacacgtcggcttcggcgagtggggagccacaagagatggttgtcccggaggtgaacaaggagatgctcacggaccttgagggcatgggtttctcgacagcgcgcgccaccagggtgcttcacttctccggtaatagcaccattgaaggtgctattaactggctttctgagcaccaagaggacatagatattgatgagatgcctctggtaccagccaactcaaaaacggaggataacaagcccagcctgactcctgaggaaatgaagattaaagcacaggagctaagggatcgtgctcgtaaaaagaaagaggaagaagagagaagaatggaaagagaaagggagaaggaaagaatacgaattggaaaagaacttctggaagccaaaagaattgaggagcaaaatgaaaggaaacgcatgatagaactgcgaaaacttgagaaagaggaggagaaaagagctagagaaaaaatccgccagaagttagaagaagataaggctgaaaggagaaggaaactaggactgccaccagaagacccagcagctgccaaaccaagtgcaccgcttcctgttgaagagaagaagagtgcattgcctgtccggccagctacaaaggctgagaggatgagggattgcctaagaaatcttaagcaacagaacaaggtagcggagaactcatgcttg

SEQ ID NO: 12561 - DNA, 873 bp, Zea Mays
atgtggagaggctgcttcgaatccgagacatagtaacttagctgatcttgccaaggttgatagaaagaggacaccctggctcattgtgttgttgcacgtaccatggtacaatagcaattgggctcatcagggtgaaggcgacagtatgatggcttcaatggagcctttgctgtacgctgctcatgtggatatggtaatagcaggtcatgtccatgcttatgaacgtgcggagcgagtctacaattccagacctgatccttgtggcgctgtccacataactatcggcgacggtgggaaccgtgaaggcttggcccgcaggtaccgtaacccgaagccagcgtggtcggtcttcagggaagcgagctttgggcacggcgagctaaagatcgtgaactccacccatgcccactggacctggcacagaaacgacgacgaagagccggtgagaaccgatgacgtgtggataaactctcttgctggttcagggtgcatccaggagggcagccgtgaccgtgagtcgaggaagatcctgatgtctccttgatgcttagcagtatagcttgggcctgcgatgtactgtgtatataatgcgtgctacttgataatctaacacctagtaaaagttaatgcgtcgtgctgcttgcctgcgtgtatactggagactggtttgatctggcgcgtttgctgctcttgttgtgttgtaccactatggatgtttgtagcaaagtgacatacgacggtgttgtaatggactgaagatgaatagatgatgttccagtaaggagtgttttgccgtgtctaggaagatacatcaaaatataaatcactccctccttatcaaaatacagttttttcttgctttcttttttttct

SEQ ID NO: 12562 - DNA, 759 bp, Zea Mays
catgactcgaacggccgtcgagcccaaacctagcgatcgcagagagttgcgcccggaccccggaccgcgccgacccggctcgcaaactcctccacaaccctcgtcgccgccggctgctccacccccgccaccgccatgggtaaattccgcaagcttggccgcgattactcccaacgcatctgcatgctcaggacgatggtgtcgcagctggtgaagcacgagcgcatcgagaccaccgttgccaaggcgaaggaggttcggcggaaggcggatcagatggtgcagctagggaaggagggtactcagcatgcagcaagacgtgctgctgcctttgttcggggtgatgatgtcgttcataagctatttactgagctggcctttcgctacagagatcgagctgggggctacacaagaatgttaagaaccaggatacgtgttggtgatgctgctccaatggcatacatcgagttcgtggatagggagaatgagcttcgagaggccaaacctgcaacgccgccgcctcctcaacgagtccctcttgatccatgggccaagtcacgtgctagccaacagtgggcaggacctaaaatcaccaagagctcggaaacggacggcttatgagctaattgcaaggctgtgtccaaacaggaggaagtttggaacgagagagatgtatctctgctttgcttattggagttgtaacagatccaactacatgatcaaattcgtgtatgcatcaaaaaaaaaaacgcacaagaa

SEQ ID NO: 12563 - DNA, 95 bp, Zea Mays
ttctgcaccctggactgggcagcagcagttcgccttccctggcacggctggagggcgcctcctccgcagagctggaggatggtttccacccccag

SEQ ID NO: 12564 - DNA, 1432 bp, Zea Mays
ggcaaaccgtattgttggctccgcctagggttttagcacctgccgccgcaacctcccttctacttctactgccgccgcaacctccccatccttcgaatcccatccgacctaaccccgcaacccgccggacgacgagtggcgaggcccccggccgagatggaccggtaccagagggtggagcggccgcggaacgagtcaaccatcgaggagaacgagatccgcatcaccgcgcagggcctcatccgcaactatgtctcctacgctacctccctcctccaggaaaggagaattaaagagattgttctaaaagccatgggacaggcaatcagtaaatctgtagctgttgcagagattatcaagaaaaggatccctgggttacaccaggataccaacatcagttctgttagcatcactgatgtctgggaacccatagaagaaggccttgtcccattggagatgactcggcatgtttcgatgatttcaattactttgtcccccagagagctggacaagcacactcctgggtaccaagctccagtgtacattgaacaaccaaggcaacagcaggtgccaccaccacagcgccaaccacgcagaccaccagcacaattccagcagctggagtatgaagattcttatgcacggggtcgaggaagagggcgtgggcgtggaaggggctggggtagaggtggctacggtggctatggtggatatggaaacaaccaaggtggctatcatcagggtggtgggtattatgacaatcaaggtggatataatggctatgataatcaaggtggatatagtggctatgataatcaaggtgggtatggtggtggatatggctataaccaaggcagatatgggaactatcaagaaaatggtggatataaccgaggaagaggaagtggtatgcgaggaagaggcaattggggttaccgaggaggcggctatgaaggtggcaggggagggggctatgaaggaggcaggggtggcagtgctcagggtggaaggggttacggtggccgtggaaggggtagaatgggtggtcgcggacgagggaactagtgcagttctggcgtttccttcaaaatgcatgcctcacctataccaggggaaacgacaagttatctgagcattttatgtttgaagccatgtgactgtgaggtctgttattttttcccctgagcgcgaggtttggttgtgagcataatgcatttgcaaagttttatcttgtacgtcatccttcaacgtttcaaattttatcatgtacgtcatccttcaatgtttctgctgccagaggttttcccagtgatcgttgagtgctgagcatgttgtccaatgttcatgcctgcagtattaacagatggccactcttttcctgtgaaattgttaattgcatttgagcaacaccaaaaataccaaaaaaggaaat

SEQ ID NO: 12565 - DNA, 1509 bp, Zea Mays
cttttgaccgcactatgaccaccaacagacgacacagttggcagcacgacaggaatgggtctttgtgcttagcttgatcggtctcgttcctcttgctgagcgacttagctttctgactgagcaggttgcgttttacatagggcctactgtgggtggactgttgaatgcaacatttggaaacgtaacagaggtcatcattgcgatctttgcactctatcaaggcaaggtagtggtggtgaaatgctccctgctaggctcagtcttgtccaacctgttgcttgtccttggaacctcccttttctttggtggcctggctaaccttggaactgagcagctatacgacaaaatgcaagtagatgtcagcacaggacttctgattcttggtgtgctatgccactctctgccactgatgctgagatatgctgtgagctccggggagcacgcagaatcctcttgggattcaggactggagctgtcccgagcatgcagcattgtcatgctccttgcctatgtagcctaccttttcttccaactgaaaacccaccgccaactatttgaaccccaaccccaagaggttgaagatgatggtgatgattcggtctctcaagacgaggcagtactgggattttccagtgcaatgatttggctgggagtcatgaccctgatgacagcactcctatcagagtttgttgtgagcacaattgagaatcttgttaacacttaacaggcagcatcggaatcttgggagctatctgtcagtttcattagcgtcatcttgattccaatagttggtaatgcagcagagcatgctggtgcagtgatatttgcgtttaaaaacaatctggacatcaccctcggagtatctttggggtccgctacgcagatttccatgtttgtggtgccattgagtgtccttgtagcatggatcatgggagtcccgatggatcttgatttcaacttgcttgagactggttgtttgtttcttgcaatattagtaacggccttcacgctccaggatggatcatcacattatctgaagggactgctgcttgtgttttgctacattgtcatctccttatgctttttcgttttgagacagcatggaaatggaagcaacgatgatcagctgggtgtagcaagcaagccatggaggatttagggcgcctgagctggcagtagtttctcaacaagtagcgtggactttggtttgcacgattttgcatggaacactggaggggagacccgtgaagtttgactaaagtatgtagactgcgggaagatgctgttcagctgatgtgtgaatgtaagtacatacaaagactatagatgaaaactgatgttgcgtgagagactatttgtgtgtgtttttcttgttctttccaccaagcaatggctagaattcggttgagctgttgaaattgtctcctgtataaatcagtgacatgtcatactattttccaactggacttaacagagcctttatccttctaattggttacccgcatggtc

SEQ ID NO: 12566 - DNA, 1771 bp, Zea Mays
gcaagttctatgagatcacaactacaagaatcatgatatcatagtattcagggtttggatgatcaaaatggaaatggtacacctagtttgccagtttctgatacttcaaataatagcaaccattctgaagacgtagatggaaattctggggacattttaagtgacccaaaccttggctctaattttcttcagtatgctgaacctggggagcaaaatagcttaatgcttaatggaactatcatatcaaatgcaaatgctggagatttttttgataattccagccacagtgatgggtttctagagctgaaggattttggagatgctgcaaatctggatttccctttgggcaatggatcatccatctggcctttggattgttgggcatggaaaacacctgactcagcggaatctttaaatggaactaatgatgagattcctccacttcctgatgaccagactttccagccagatgagctggaacaactgttacagtcaatacaagaagattcccatttaggctcaagtatcattgaccccccacattcttctatgacaaattcagttctgcctgatgaggattgtttgatgttctatgatgcaccgttcgattccaccatgtgtgatgatgggtttgcacagaatgggatccttggctctgcagcaaccaatctatctggtattggcatggtggacgatggtatgccatactttgatgcaatggatggtaatttatttaatgacattctgggctccatacagcagccagatggtagcagttcccatgcttttaatggcccagtccttacccaagaggtcaacaataccatgtttacatatagtccaactcaaaaggttttagaacctaatattgtagttggcgcaccatcgtctgctaggttacctgaagctggtagtcagttaaattgtgttgttttaccagatggtcaggctaagagtagtactattggaaagggatttgtaaggattttggattcgatctctgctcccccagcttttgcaggagagttcccatctaaccaccgcaaatccttggctcgtatttctggagcgcgccccaacacactccatgtttctgctgaagtgatccatataggaagtttagctgttccttctggcgcagataagtgggcgctgcaaaaggatcaaggcatggagctgctcttctctgcagattttgaacctgatgcccgtatacattgtggctgcaacaccattaccgcggtgctgcgtggtggcttctgccttttcttcgtttcagcaataatgctcttagtgagctacgaggtgggcatgtgcatctatggcaagtagcaacctggtactggtctaagataaatctcacagcatttaggttaatcctatgttttgaggcagactcaactggggtctggggcctcctgctagcttttaagtgtgccgcattgcatggcatggacctgtggggtgtttagcactagcagtaccattttgcagctcgagagctaatggtgtatgtatgaattcagtgctatttagaaatactatgagaattgcctcattggcgtgtgatgatgccatttgccatgcttgtggtcgcagtggtcaatgttagtgcaaaatattgtatatatatttgagatccaccataggaatcatgatgcttgtgcagtacagttgtgttggtgttttgagtgtttgcaggtttcaaaatgaatgttaatcgtgttgcaagccatgaatgaaagttttgaagaaaacccaagttaaaaaa

SEQ ID NO: 12567 - DNA, 258 bp, Zea Mays
tgttgccgggcacgtccgtcacgacaacaacgacgacgacgacgactatggcggcgcatccacggtgacggcggcggcctcagttgggacgatgagacctccggtccccgcggcccgggccccccgacgcctgcctgcctccaatgcaagagccaaccaacctggcaacctgcttgctattctcgcacgtacggctcccggagcacgcgaatacaggttccaactacagggtccaggggcaggggaggtggtttgctg

SEQ ID NO: 12568 - DNA, 373 bp, Zea Mays
aggccactaggtcatcgaaggttgcctacgcatacgcaaccttatcatcatccgcccttgggttttctatccgatagaccggggacgcacaggcctctcgccctccgcgcggctccacaggagagcaaaaatggcgaccctctccatggtctccgtccccatcgcaccctcctccttgtccctttccacccggggccgcagctcctccgcatccttccccgctaagaaacgtttcaaccgtgtggcgattgagaggctgaaggagattaggtgctacaagggcatccggcacaagcttggactcccagttcgtggccagaggacaaagaacaactgccggacacttaagggaaagagggcttcagttgtggtt

SEQ ID NO: 12569 - DNA, 1200 bp, Zea Mays
atcctttcacccttcagcccgcgtgccctctgtttctctcccggttcttcccctctcttgcgacgacagggttgggtaacgccgctcgccgccgccgccgccatacgcaggtgccgaggccttcgtcgatctcttagccgtcgacaagcacccaagagatgcaggatagaatgagacggcaggggcaatatggtgaagcggatattaactctatggttgctgcccagttgcatcactaccaggcacagcaaagggtacagaaacaccctgagaatagctacactggaagagatcctgcacaagcttctgcggagcatcagtacactccccctaaagcaagacagagtcaatgggatcgaggtggaccaaatgcgccaagccaggttccatcatatgcatataacgaagcccaaggtgctggaggtgcgcaatccttttatgatgggcagagatctgatacaaaggttggtctagaaaagcagcccagcaaggagtctagggagcaacctcgtactgaacgaactgaaacaagatacgagaattataatcttcctcggacattcgaaggtcttgaacaaagtttccatgaagacattattttgctatccaaggaactacaggaggcagaggatgctgaaaattctagacacatggagagattgaaggatataaatacacagtaccaggagaaactattagcacttagagctcggcaagcgaactatagagatgagttcctgcgcaaggaatctctagcacgccagcagcaataccagcacgccagcatgagccattacgctagcaattccacggctggggagcagcatggttataacccaacggcagcaggcacgcctcctgttgctgctggaggtgcttatggtgaggctcatcggggttatgcttctggccagtatgaatcatttagcgatcgtccagattatccagagttccatgatgggggcagaggtcgtggtcgtagttctgagcagcgtgctcaataccctggtggtcgtgcttataattccggtggccggcgattctagatatgctttgaactttgaaggacgatctatcactctgtcaagcgagctcatatcacctgatgtcagtgtgctgtaccgtgctatactcgaccgagaaacctaagcgctcataaaacttgttctacaattcagcggcggtcttttaagaagcatt

SEQ ID NO: 12570 - DNA, 156 bp, Zea Mays
ttgcagctattctaaacaaatttaccaggtttgcaggagaactttttggaatgttaatcacaattttgtttatgcaagaggcgataaaggtatgtaatttacatctgttaaatctgaatgatttagttttagctgctgatcgcataatatgccata

SEQ ID NO: 12571 - DNA, 525 bp, Zea Mays
gtttattggaggaagaaggctatgcgcatagcataaatatatgtgccattgctgtaattactaatatgatccaaacaacaagaagataataatctgcgatgagaaactgaagaagatattcggagggcgtgaccgcgttgggtttctcgaaatttccgggctgctgaacccccacttccagaaatgatagggccttttttgttttgttttgttttgttttgtagatcactctcctctgttgtgctagctgttgctgatgtacgacgagcacatttagctgctaaacctgggctaaaagtggtctctgtctcttgacggcggtttaaggaaggcaaatgcgttccctgaagatgcatgtgattgtgatattcgccgttaatggtgtactagcagttgcttaatcattcatgcttatatcctatccacacacctaccgtcgtagacctgagtggtggatcatcgcattcttcgactcattatgtgtggatttttattatccttgtctttgggttattaatggttgcg

SEQ ID NO: 12572 - DNA, 1799 bp, Zea Mays
ggggcagagctggcaagtggcaaggctgcgcagagggactttttgtgtaaaatgcggtgggaaggtgcgctgcacctgcaagcagaggtgtgctctactgacagagtttgaactcaagaggaggcgaggcagaaccgcaatcgcgaccgcgacccgcaggtgacatacatacggtgcgagcgccggaagccggaagcaccggtgacgaagccttccgtgtcatcactcatcaggatctcaggttgcgatttgtgagctcccattccaccccatcagctcagagtggctaggaggacatggtgggacttgcgtgatacgtggttgcgtacctaaaaagatactcgtgtatggtgcatcattccgtggagaatttgaggattcgaagaattttgggtgggagattaacggagatattaacttcaattggaaaacgctattggaaaataagactaaagaaattgttagattaaatggtgtgtatcagaggatccttaccagtgccggtgtgacaatgattgaaggggcaggcagtctagttgatgctcatactgttgaagttagccagcctgatggttcaaagcaaaggtatacagcgaagcacattttgatcgcgactggtagccgtgctcaacgtgtcaacatacctggaaaggatctggctattacttctgatgaggccttgagcttggaggagcttccaaagcgcgctgtaatcctgggtggcggatatattgctgttgaatttgcttctatctggagggggatgggtgctgaagtagatttgttttatcgaagagatcttcctctaagaggttttgatgatgagatgagagctattgttgcaagcaaccttgagggaaggggaatcaagttgcatccagggacaaatctctctgagttgagtaaaacggctgacggaataaaagttgtaactgataaaggagaagagctcattgcagatgttgtcctatttgcgacagggcgcacaccaaactcccagagactgaacttgcaagctgcaggcgttgagattgaccgggttggagccatcaaggttgacgaatattctcgtacttctgctcctagtgtatgggctgtgggtgatgtaacaaaccggattaatttaacacctgttgcattgatggaggcaacttgctttgctaaaactgtgtttggtggccagcaagttaagcctgatcacagagatgttccttgtgctgttttctccattccaccactatctgtagtgggcctcagcgaagaacaggccttggaggaagctaatggtgatattcttgttttcatctcatcattcaacccaatgaagaacagcatatccaagcgccaggagaagactatcatgaaactggtagttgatgctgaaactgacaaagtacttggtgcatccatgtgtggaccagacgcacctgaaattatccagggcatcgctattgcggttaaatgtggagccaccaaagcagacttcgacagcactgtcggaatccacccttccgctgctgaagagttcgtgaccatgcgcaccgtgacgaggcgcttgagcccgacatccaagccaaagacgaacttgtaagcaagaaattggtattctggggaaatgttacaccggacaaatactctggtttcatcacgttggtaatttttacgtcattggaactggaaccatgtatattgaaggaataagttgtttttttcatggcaacacaccgaaaataatgagaccgtggactttcttgatacaaataatgagctcaagcagagaacgtttatggttggttctc

SEQ ID NO: 12573 - DNA, 1579 bp, Zea Mays
ccgggatgctcccactccagcccgtctccagccacgccgccccccgcaccaacccacccccaccacacggaaggcggaaatcccccacgcgcaagcgtttgccttgttgcttggcgtccgtctgccgaaacaaaagtcgccgtcctcccccctcgtcgcttcatcacctcacctccgccgtcgcctcccctcatccctccaccggcccgtttgaccctctccctggctcgctcgttctcctcctcctccgtacccgtcctagtaggtttagcgctcaacagaaccccaatcaccaccccggcgccccccgagagcagttgccttgccgcttgctgcggttccatatggtgccccccgcgtcggcgtgagggctgcgcgcgctcgtgctgtttatcgggaggagatagatggggcccgccgtccgcagtagcgtcgtgatcagggccactgtggtagggctcgtgctggttggcatcgccctggccctgccgctggccgcggcgctgcggccgctccgggagcacgtcgcgtccatcggagccgcagcctccgctggttcgtggggcgatgagcatgccttctacaaaagggatgagaacgatataggcccatattcatggaatattactggaacatataaagggagctggacttttgctggtgccacaaatggttcgtctagatttcttgagtttgtggaatctaaaggtgattcagttttggaattgttgagcactccaacaaagataagcggggtgcattatgttcagggttcagttacattccatgatgtcattgacaatgcccacaatggtggagtggctcaaataaggttagaaggagtttacatatggccttttagacaacttcgcatggtagcaaacagtggtgcagatggtgaaccactccaggaagaggattatttcttgtcaaatccataccatttattgcggattttctcctctcaagtgtttcaagaatcttctgaagagaagaaccgaaggaagaattctctcacatatgacatggagaaacattgcaacacagaaatagctgctaaggtggttcgtgtgtcatctaacccaaatgatggagaacacgagaagtaccgtttggagggtttgatggagagtccagccgtcgatgatgatggggaatgcttctctcctatcttattgaatgcaacttctttgaatgttgaagtttattacaacaaagcagtcaactacacactgatggtcacttttatctctttccttcaagttttgctgctgattagacaaatggagcatagcaacacacaatctggagctgctaaggtttctattttaatgattggccaacaagctatcatggatgcatatctctgtctacttcacctgactgctgggatattggttgagtcactcttcaatgccttcgcaacggctgcattcttcaaatttgttgtattttctatttttgaaatgaggtaccttctcgccatatggaaagcaagtaggcctttaaacagtggagaaggttgggagataatgaggcgagagctgtctgttctttacagccgcttttatggcatcca

SEQ ID NO: 12574 - DNA, 1864 bp, Zea Mays
gaagaggcaacacgcgaacgagaacgacgaagccaaagcaacacaccagcgcgcacgcacgcgcagcgtccggcgggcatcaccacctcctgtcctcctccctcctgccccgatccgccctccccgccgctcgccgcacccgatgtcggccgccgacccttccgcggctccggccgcggccgccgacccggacggccctgactccgtgcggctcacctggaatacctggccacggtcaaaggtcgaggccagccgctgcgtcgtgccgctcgccgccaccatctcgcccactcgcgtcccggatccctccgcggcatccccgccgccgctcccttaccctccgctccgctgcaagcctccctgttccgcgctcctcaaccccttcgcgcgcgtagacttcgctgccaagatctggatctgcccgctctgcttctcccggaaccactttcccccgcactatgctgccatatctgagtccaacgtccccgccgagctcttcccgcagtgctccaccgtcgactacatcgtcggcggagccggcatccctggggtaggcggcgcgccgccgcccccgccgcccgtatttctcttcgtcatcgacacctgcgtcatcgaggaggagctggagtacgttaagatggccatgcggaaggccgtcgcgctcctgccggagcacgcactcgtgggcctcgtcaccttcggcacgcaggtgcacctgcacgagctcggattctccgatctcagcaagatctacgtcttccgggggaccaaggagatctctaaggaccagattttggatcagcttggcctggcgggtgctgggcggccgggcttccccaagatgccacagcaaccgggcgggccacaggtgaatgggatgcatccgccgtccacggccggggtcaacaggttcctgctcccggtgtcagattgtgagattgctctcagcacgttgctggacgagttgcagcctgaccaatggccagtcgaggctgggaaccgtgcgatccgttgcactggtgttgcgctcagtgtagctgctgggttacttggtgcttgcatgcctggaacaggtgcaaggatcatcgcattgctaggtggtccgtgtactgagggacctggaatgattgtttcaaaagatttgtcagaaccagttagatcacataaggatcttgacaaggatgcagctcctcacttccagaaagcagttaaattttatgatggtcttgctaagcagttggtcagtcaaggtcacgtgttagatgtttttgcttctgctctcgatcaggttgggctagctgagatgaaggttgctattgagagaacaggtggccttgttgtcttgtctgaaagttttgggcattccgtattcaaggattctttcaaacgcatttttgagggaggtgaacagtctctaggactttctttcaatggcataattgaaataaactgttcaaaagatattaaagtccaaggtattattggaccatgcacatctttggagaagaaaggagccatgtgctctgacacagttgtcggtcaaggaaatacatcagcatggaaaatgtgtggtctcgatagaaatacttctcttacagtattttttgatgtctcaccgagtgaacgatcgagccagccaggaaaccaaaatccccatttgtatatacaatttgtgacaagttaccaacacccagaaggtcaaatgaggataagagttactacgatatgcaggaaatgggtagatggttccactaataccgaggaattagttgaaggttttgaccaggaaactgcagctgttgtgttggcaagatacatctctttgaaaatggagatggagcagatcctgtattcaatcccccta

SEQ ID NO: 12575 - DNA, 1363 bp, Zea Mays
gcaagatattgatttgagggaaaaagatggtgttcctgatctacgcctcggggctaggtctaaatatgcaagtgtagcttcgcctgagatcaaagatccagtaaagagtatgctcaaagatgaaagagagtttgatgatgctttactggcagttgtcatccgaaacttgaaattggtgaagggcgattcaaaagtcatagttatggattctaatggagctcgatcaaaagccattgctaggttactgaagaagctcggtgtgcagcgaccttaccttgttaaaggtggtttccaagcatggtcaaagaaccttcgtgtcaaagaactgaaacctgagactgcattaacgtcaataaatgaggatgttgaggaaatcctagaacaaataaagcccaccccaactcttgtgtttggatctcttctgaatgggagatgactttgcaatacatagctgttttaagcgttgggctgactatctacttgcgattctctacatatgaggactccgaggatttggagaaagacctaaagctgttgctgtctccagtaagagtaggcgcagacgccttgtcatgggcagctaagaagatagagccaaacaaggtgggcctgccaacgtctccttccacgacggcggtgaaagaccgggttcttcaggccgcggcgaagcacgagtcgcagccatcggatgccgacgagtcgtcggtccaaacagccgaggcatgacacgcgccgaaagcttgggagccagtcgagcggtcccgccgaatcctcaataagagcactcggtgggcgctccctggtaatttgtgaagtccatgtcgtttatgatgtaaagcactgtaaagcggttgtaaattaattgcgtgagcagcatctgtaagttgacatcaacttggttggttgtgtgtgtgtagattatagagaaagaggtgtcaatgtaacgttaattcctgagcctgtctgcgatcttgcccgtctggtactgctactctgcttgcttgcttgtttggcacgcgatcaaggtgaattaagtaaaaatggtccgtggtccaagtccagccccacaacttggctgtcaggcgtagtgtaacctttgttggtacggaaatgaaatcctggagtacggctgtttttaaccaccatagtgcctgccgaaatgctgctcggtagtaaacgggtacagaatttaatcccgcatcatttggaagctccaccccaatagccacagcccacaggccccagaagacgaaaggaaacgatgcgctcgctgctcgcataggatcaaagggacgggaatcccaatgtcttgttttcaaaattttatcgtattttcttaaaaacagtataaaaaacatagaaa

SEQ ID NO: 12576 - DNA, 119 bp, Zea Mays
gatttatgcattttcaaactaaattttacgacacttcttgttgtgttttatgtttccattaaaaaacagtcttactgcgttttacgccaaatttatgacactttttgatgtgttttaca

SEQ ID NO: 12577 - DNA, 3041 bp, Zea Mays
agcaagcgcggagtagagcaaatggctagcgaggagcggatcttggtgtcggtgcgactgcggccggtgaacgcacgagaggcggagcgcggtgatggctccgactgggagtgcacgagcacgaccaccctcatgttccgcggcaacatccctgagcgcgccatgttccccgcctcctacacctacgacagggtgttcaacccgaagtgcagcacgcgccaggtgtacgaggaaggggctaagcaggtggccctgtcggtgctcagcggcatcaattcaagcatatttgcgtacggtcagacgagcagcgggaagacgtacacgatggtcggcatcacggagcgcagcatgtcagacatctacgactacattgacaagcatcccgagagggaattcgtcctgaaattttcggcgatggagatatacaacgaagccgtgagggatctcttaagacctgatgcaacacaactaaggctactggatgatccagagaaaggaactgtggtagagaaactcaccgaggaaactctcaaggacaaaggccatctcttggagctccttgcagtgtgtgaagctcaaagacagatcggggaaacttctatgaatgaagcgagctccagatctcatcagatactcagattgacgatcgagagttcagcaaagcagttcatgggacgaggaaactcaagcacccttctggcttgtgtgaattttgttgatttagcaggaagtgagcgtgcctctcagacacaatcagctggtatgaggcttaaggaaggcagccacattaacagaagcctgctaactttgggaaaggtcattcgccaactcagcaagggaagaaatgggcatatcccttacagagattcaaagctcactcgcatattgcagtcatctttaggcggcaacgcgagaactgctattatctgcacaatgagcccagcacactgccatatcgagcagtccaggaacacacttttgtttgcaaattgtgctaaaaatgtagttactgacgcaaaggtcaatgtggtgatgtctgacaaggtgttagtgaaacatcttcagagagaaattgcaaggctagagaatgagttgaagtttcatggatcagcctataccagcaatcatgctgatgctttgagagaaaaagatgagctgatcaaacagctcgaagaacaattgaaggaattgatggggcagaaagaaaccgttcagtctcaacttgacaattttcgtagagttgcaatagatgaaaattttgatgaccatgcaataagacaatgggatcaacgaaataggtcttcagagtcccttccacataatgtgtctgaagatgctctttcttcttttgatacttacgatgttgtttatggagaacaagatggtctaggcccaaaagcatttgatgtacatccaatatctatcttgcatcaaccaagaaaccatatttctgataacattcagatatatcaaccaaataaggaggcttcctcagaggtctctgaggagcattgcaaggaagtccagtgcatcgaaacaaatgagcttaggaggagtccattattctttcctgttgatcgatatcatgttggcacaaacattgatgaaggaaagcatgatgaaaacataacggacacatcagacagtgccatcaaattgtacacatgtgattctgagccatcttctgataccgaaaaaacaaataatgatgaatctttagccctgaagaggtgcgtgataagctctagggatagtgtactaactagaagcagaagttgcagagctagctttatggtcattccaaatagttggtttggtgattcgttggatatgagaatgacaagaccaggtgacattttcaaatattctcaaagaaggccaaagaacgttaggagtttgtatcctgaaaatggtcattgttcaaatgatcttacattcacttgtaatgaagaagatgaagacgccatcaacaatgtcgttggcataacaaaagtggaagagaagttagaagagtgttgtacatcccagctagagggcaatcaggatgacgttactgaagaaattttggacataaaacatgccaatgatgttgataaagatatatcagtgaccagtgtcgactctccttcacggtggcctattaactttgagaaaaaacagaaggaaatcattgagttgtggcatgaatgcaatgtatctatagtacacagaacatatttcttcctcctctttaagggggacaaagaagacaatatttacttggaagtggagcacagaagattatccttcattaaaagttctttcagtgttgcatctgaggctaatgctgctgctacatcaagcttgagaaatcttcggcatgaaagagacatgttgtacaggcaaatgctaaggagactcaatcttttggaaagagagagcctttacaacaaatgggggatcgatcttaattccaaacaacgaagactacagctatcacgtcgcatctggacacagactgacatggaacacgtgagggaaagtgtcgctcttgtcgcaaaactagtagaacacctggagaaggggcaggtcatcaaggagatgtttgggttgaccttcacactgaacccacaagctgaacgaagaccttttcagttgtgttagtgctcattcctaaactaagcattgcgataatgacaattatgatggttgaatgtctggatgagacaacaacaatggcataatggtaaacgatgaatacatagtaatatagatctcttgtcgggtctgaactcatcccaacattggttttcaccaatgtctgcatataattagtatcacttattatacagacgtgcatggtgatgccaaccctttgcacctaactatatgatgtgttggactatggtactatcaaaagcaaaccacatgagatgacaacccttgcacccaattgtatgatgtattgctattctgatattttctacatcaaatatatatctaatctacttgattgttttgtaaggtagagcaaatgctatgaaaatgccaacatttgttgt

SEQ ID NO: 12578 - DNA, 1493 bp, Zea Mays
ctgtgttccagatttttattccacggagaagctcagaacttctgttcaagagatgataccatcttttgtggtgtgtttgacggccatggaccttatggccatttggttgccaagagagtaagagatctgctgcctctaaagttaggagaaggtttgacgacggaagatggtagagtaacatccactggcaacattaagctcaacacacatgatgtagcttcaccagaacacatagacaaaggaagtactgccatttcctctgaagctcagcagaatggagagtatccagagaccttcccagcattgagaacttcattcttgaaggcattccgtgtaatggatagggatctcaaattacataaaagcattgactgctttttcagtgggactacagcggtggcagtgatcaagcaggaacacaatcttataattggcaatttgggggattcaagagctgtcttaggcaccagagatgaaaataaccagcttattgctgttcaattgacagttgatctcaaacctaacattccaagcgaagcacagagaatcaggcaacgcaggggcagaatattcgcgcttcccgaggagccggaggttgctcgtgtttggcttccaaagtacaactctcctggactggccatggctagggcatttggagacttctgtctgaaggaccatggtgtaatttctacgcctgacgtctcctatcaccacatcacggagaaagacgaatttgtggtgctggctactgacgggtctgggacgtgctatcaaacgatgaggttgttagcactgtctgccgagccacatctcaggcctctgcagcccggtttctcgtcgagtcggctcaccgcgcttggcggactcggttccccacttctaagatcgatgactgcgctgttgtctgcctgttcctgaacacagacaaagcgagcgaatcgtcgagttctttggccaagaacttggcagatgctgtagaagctagcagtgctgggcgcgccacaactgtccaggtgagcgctggtgcatctacagatgttgccgccctggtaccagtaccagatgggaacgaggtgtctattgctgaaaccatcacaaagctggtcacgctcatggatttgcccaaggatggttgaggctcctgtgattgggacctgaacgaagatataccacatcggtgggtttctgcttgcagttttttttcctgaacgcaagtgtggctagaatttgcagttttgcttcgtgtaaagtaccgcgtcagtttagcgtgatttgttccagtttttgtaatatttcaattcatgttagtattgatgcgtccgtgcgtcgtcgagatcgtagtattctgtaggaaggaggctactgagtttttgtgcttcctgtaaatatattcatcattctatctctggtgtctgatctatatcatcattgctttgggggtcggtcttattaatataaataaggattatataatcatatcggacgaagtgact

SEQ ID NO: 12579 - DNA, 2213 bp, Zea Mays
ggcggcccagcccatccgtcagtgcagtcaagtagtcaccggttcacgcaaaccctagtaccaggccgccagtcccgacctccccggctccagcccccgcgcacgaccagctctgacgaccccgctcctgcctcccacctcctccggtggcctcgcgcctgactccctcctccggcacccaggccagccgcgccccgcctctcgcacaggacggaaatgatgccttctcctttttgttagctgattctgatcaaactggagcacttagagcaaccatgggggggaaatcggagcagaagtctcgaaaagagaggcggaaagaggcgagatcagagaagcacaagctgcgatttctttcttgggttgggcatcagggtggcaaaaagaagaagccgtcaatgtcagtagtagagccaagttcggttgaggagaagccaaagaaagagcctgatggcatgatgaagaagaagagaaagagggaagcagagggtaagcggaagcccaggtccaacttccaggaatatcttgagatggagatgggtggacctgtgagcatggaggaggatctagagatggagaggaagcttgcaaaaaagctcaagttgaagaaaggaaagttgggaggtcctgatgatggtatggatgacctttttgcggaccttgggtttggtggtgactttggttcagatgatggtgaaacaaaagcatatgattggaatgtggtggaggacactaatttagacaagagaaaaggtaaaaagaaaaataaggagaaaaaggatgacacagtgatggaggaaccagatgacattgatgaagagaatggtcggaaaaagaagaaaaaaaagaagaaggatggtatggagaaggaggaactggttgatgtaggtgaagagaatggtcagaaaaggaaaaagaagaagaagatgaaggatgactcagagatggacgaaccagatgatgaaggtgttcacatggatgaagagaatgatggagcagtcctggaatctgaggatggagtgtctaatgtggttgaactgcccaaagaatcaaaagggaagtatgtacctccgagtctgcgtaatgcttccaattcagaatcagaagaaattgcccagatgcgtcgcagagtaagaggacttctgaacagactttcagagtcaaatgtggagtccattactcaggaaattgccacactttttcgatctgttccacgaagtgatggctcccagataattggggatgaggttttggctagttgttcccgaggacctcgtggcaatgaacagtatgccgctgtctttgcagcctttgttgcaggtatggcatgtttggtcggtgttgacttcagtgccaagatccttgcatctattgctaagtcatttgaggatgagtattcaaaagaagatggtctatctttgagaaaccttaccttactcttctgctatttgtgcatatttggtgttacctcaagcgatcttgtgtatgatcttctgtcgattctgagcaagcgcttgacagagctagatgtctctacagtgttgaccatcctacagtgctgtggaatgaagctgcggggagatgatccatgtgctatgaaagattttgtccttagtattcagaactctgtgaatgatcttaaattgcactctggtgttggagcagacgggaagactgatatacgtagcagaagaatggaatttatgcttgaaaccatatgtgacattaagaacaataagaaaaggcctaaagaggatccttcacaccatactcgaataaaaaagtggcttcaaaagcttaaggcagaagatgtcctcttgcgtgggttaacatggagcaggcttttggaccctgataagaaagggcagtggtggttgtctggggatgttccatctacagtagctaagattgaagatgttgcagctgttataagcaaggatgttgcagagacaaaaaaacttcttcagcttgcagctgctcaacggatgaacactgacatacgaagagcaatcttttgtattataatgagtgctgaagactatgtagatgcttttgaaaagctcttgaggctgggcctttctgggaagcaggaccgagaaattataagggtcattgttgactgttgtctgcatgagaagatgttcaataagtattacacagtccttgcttccaagctatgcaaccatgagaaaaaccacaagttcagcttgcag

SEQ ID NO: 12580 - DNA, 1379 bp, Zea Mays
gtcaccggctacctcactggatcatatgtggcaggttcatgaccacgtattcccccatttcaaatcataagcgcggctgtcaactcgcagtcaggggaggaggttgcgatcaagaaggttggcaatgcgttcgacaaccacatcgacgccaagcggacgctcagggaaatcaagctgctgcgccacatggaccatgagaacatccttgccttaaaggatgtaattcggcccccaactagagagaactttaatgacgtgtacattgttactgagttaatggatacagatctccatcagatcgtacgctcaaatcagccattgactgatgatcattgccagtacttcttgtatcagttgttacgagggctaaaatatgtgcactcagcaaatatattgcaccgcgatctgaagccgagcaatttgttcctaaatgcaaattgtgacctcaagattgcagactttgggcttgcaaggaccacttcagagacagatctcatgacagagtatgtggtcactcgttggtaccgggcaccagagctgctgttgaactgttcacagtatactgctgccattgatgtctggtcagttggatgcatactaggtgaaatcgttactcgtcaacccctgtttcctggacgggattacatccagcaattaaaattgatcactgagctcataggctctccagatgatgcaagcctgggatttcttcgaagtgataatgcaaaaagatacatgaaacaactaccacagtttccaagacaggacttccgcctgcgtttccgcaacatgtctcctggcgcagtcgatttgttggaaaggatgcttgtgtttgatccaagcagacggattacagttgatgaggctctgcatcatccatacttggcttcacttcatgagatcaatgatgaacctacctgccctgcacctttcagctttgattttgagcaaccatcctttacagaagcgcatataaaagaactcatctggagggaatctttagcatttaacccagagcctccctactaatatcaaaaggatgatgagttatctgctagaggcatatgaagatctctaggtccagcggacgcaagaacttatgtctgtgtcagtgtgcgttgattatttacgtgcggtttgttgggcatacgggcatgggttggtgctgcaattgcaactctattatggcttgtgagagcaaacaaacgtctgtattcattttcagatgcctgaacccaggcttgtattataccgcttgactccataaattattcttgtgtatctatgcttgtaattttgcagacaattacttgaacgccccttgtatatctgagttgacatctcttttccaatgaaaaagcaaaactggaaaaaaaaca

SEQ ID NO: 12581 - DNA, 946 bp, Zea Mays
cctggattgtgcggttgcttcatcttgctgtgtcatggcttgccttgtgggctatatgttatgaggaggccaagaagaggatgtatgcttttagtacgacgacttatgttggttttcaggctgtaatgaccgaggaaatgtcagaaaaatttcgcggtttgcctggagtagttttcattttgcctgattcatatctatatccagaaacaaaggagtacggaggagacaaatatgacaatggtgtcatcactccaagaccaccacctgttcattatagcagaccatcaagaactgacaggaaccgtaactaccgaggaaactaccaggatggccctccacagcaaggaaattaccagaacaaccgtcctccaccagaaggtggttaccagaacaacccgccgcagcaaggaaactaccagacataccgctcgcagcaagatggaagaggctatgccccacagcagaattatgcacaaggtggtcaggatggtagaggttttggaaggaatgattacacagaccgttcaggctacaatggaccacctgattttcgaagtcaaactcagtaccaagggcatgtaaatccagctgggcaaggtcaaggttacaacaacccccaagagcgtagcaacttctcgcaagggcagggaggaggttttaggcctggtggtccttcagcacctgggtcttatggccaaccatcagcacctggatcttatggtcaacctaatacacttggtaactatgggcaggtacctccatcagtgaatcctggtggtaacagagttcctggtgtgaatcctagttatggtggggatggcagacagggggctggaccagcatatggtggagataactggcaaagaggttctggtcagtatcctagcccaggtgaaggacaaggaaactggcagcgacacagccgacacttaatcgtttgccgttg

SEQ ID NO: 12582 - DNA, 91 bp, Zea Mays
ctcgggcagggccgagaccttctcaggcttgggcgtgtcgtcggtcttgactgagggttgatgtaggtctcgggagaagacgtccggggga

SEQ ID NO: 12583 - DNA, 120 bp, Zea Mays
ttttttttaatctcaacaaccattcccagtcctccctctcccctctctctcgtctcaacggacgccgcgacttcacttcctcgccgtactaggccgaagcacagagacagcgcccggcgg

SEQ ID NO: 12584 - DNA, 1468 bp, Zea Mays
ggggcttgcaagttgcaccctttttgtttgtactgttttcagatctgaaattgctgcttacctgggtatagaactcggcaagatcctgatcaagcgctttgctgatggagaaatttatgtgcaactgcaagagagcgtgagaggatgtgatgtgttcttgatccagcccacatgctctcctgtcaacgaaaacctcatggagctcttcatcatgattgatgcatgccggcgggcttcagcacggtctattaccgttgttattccatactttggttatgccagagcagacagaaaggctcaagggcgtgaacccattactgccaaacttgctgcaaatttacttactgaagctggtagtgaccgtgtcattgtatgtgatattcattctacgcaagcgttggggtacttcgatattcctgtggatcatatatatggacagcctgtgattctggattacctggccagcaagacgatatctgaagatcttgtggttgtttctcctgatgtgggtggcgttgttagagcacgtgcattcgctaagaaattattgaatgcccgtttagctattgttgataaaagaagacagggtcacaacatgtcagaggtcatgaatttaattggcgacgtgaaaggaaaagtggctatcctgattgatgacatgattgatacagcagggacaatcactagcgcagcggctttgttaaagcaggagggagcagaagctgtatatgcttgttgtacacatgctgttttcagccctcccgcgattgaaaggctttctggaggcgtctttgaggaagttattgtgacaaactccatcctgctgccggaagacaaatgcttccctcagctgactgtgctttcgatggcgaaccttgtgggggagacaatttggcatgttcatcgcgatggctccgtcagcagcatcttccaatagcagaaacgagcgcgtagcatcgtcacctcgtcttgcgttcgtgtgcttggtatagagaaggcacccagtgcctgtgctgcttgcgtattttcgtagggagtcaattttggcggcaaggtataataaggttgtattgcccgatgtacggggtgataaataaggtggttattgccagtgtacgtgggataataaggttgtatgctggtgtaggtgttctgcaggctgcagcgtgttactaattaagtgcatctcttgtcctattatgtattgctgaggtagttgttgtcgagttgaagtttcagtgtctcagatacatggggatagtgatgtacccagcactcggtcactagtgaagtcctggtcattggaaatatgggagcaccaatttctgttttaaggtcggcattgtagctcaagctgttaatactcaaaattgcctgattgtctatgagcaccctgcaatatttactggtgtgatgctgcatatttgctcatatgagtgtcgtccaagattgaatatgcaaacagcgc

SEQ ID NO: 12585 - DNA, 941 bp, Zea Mays
gaaaggaacttagggtgtgcctttggaatactgaccgagcaaatgaaatcttcaagaaaattgaagatctcaagtctattaggggaagaaatcaagatgccatattagccgcatgtctatatattgcttgtagacaagaagatcgccctagaactgtgaaagaaatatgttcggttgctaatggggccacgaaaaaagaaattggcagagccaaagaatttatagtgaaacaactggaagttgagatggggcaatctatggagatgggaaccattcatgctggagattttctgaggcgtttctgttcaactcttggaatgaccaatcaagctgttaacgcagccaaggaggcagttcagcgctcagaggagcttgatataaggaggagcccaatctcaattgcagccgccgtcatttacatgataacccaactctcagaggacaagaagccacttaaagatatccttggctactggtgtggcagaaggcaccatcagaaattcgtacaaggatctgtatccctacgcctcaaggctcatcccgaatacctacgccaaggaagaagacctgaagaatctctgcacaccttaggaagctttactttttttcccttctgttatataaatcggaattagatttgtcaaagaggagtgagtgaagttgttcctgttgtgaccgactgtactgagcaatgtgtcgtcgccggcgcgcttaactttgtggatggaccaatgagaacataagttgtcatcatcagatcgaatttcttttcagagcacctgccacctgaagatttttttgggatagcaaaggtgtcgttttcgtatactccctttgggaaaggatgtagatagcaagcagtccttggaagtgcacaagattttatttaaaagaacaggattctgttccccatcttcagaagaaaccgtcatttatccatc

SEQ ID NO: 12586 - DNA, 992 bp, Zea Mays
cctcccttatgattagttttatttatcggatcccgcatcgtggaatgcttgccaaagggaggaaggtagctggaaggcgtgaagaaatgtctgcaaattatgcgtttggaccacaggatgatgatgcgattattaaacacaggcttctgactaggacaacgaccaccaggggtgaaccgccactaaagaagcttcagaagaagttcatgtcctttgcaactgagatcgagaaggatgcagataacataagtgactgtgaaagactgtacaaggcctttctacatgaaattaacacctttgagctacctcttctgaaaagcaaggctgtggttgatgcaaacattagggagaaagaaagctttaatgagctgcaggttgagattgagcggcagatcttgcatgctaagactgatattgaggaccttaagaagcaacttgagcagagcaagattgagaggcagcacaaagaagagtgtgaagccatccggaagctgattagtttgcagcctccacggtcagaaactgaaaaactcattgcagaccttgagaaggagataactgatttgaaggcggagaatgtagcatgcataaggactttggaactgaggaagaagcagtttgcccttcttctacatgtggttgaggaattgcagatctcgattgaagatgagcagaagagtatagcagatgagctgagagctattgctggagagcagaagatgagcatggaagaagggagcgtcggtgcttcagattccatggttgttgactgatcgagatacattcacatatgttgcagacctgcttgccaaaatccatcacatggtttttggacaatatggcgatttggtagatgtcttttgcggtgtctttgtacctcatgtaaattgaactgtatgctagtatgaagtgaaattgaagtacacgttgttgtgtaacaaagtcagttcttattgatgaattcagtcaatatatgttacttcacaagcata

SEQ ID NO: 12587 - DNA, 931 bp, Zea Mays
actcctcagcaccgcacccatacataggtgccggactcgtcccagcgaagaaccggacgagcgagcaagaggcctcctcctcaagcttcgaatcctccccttccgcgctttccctccccctcctcctcctcccctttccagtccccaccccagcgaagcttccaaagccgccccaaccccaacggccgcccggcccgatcgagcagacagctgccgcggccctccccgccccgcacgcgacctcggagccatggagaagtacgagctgctgaaggacatcggcgccggcaacttcggcgtggcgcggctcatgcggaacaaggagaccaaggagctggtcgccatgaagtacatcccccggggccaaaagatcgacgagaatgtggcgagggagatcatcaaccaccgctcgctgcgccaccccaacatcatccggttcaaggaggtggtgctgacgccgacgcacctggcgatcgtgatggagtacgccgccggcggcgagctgttcgaccggatctgcaacgccgggaggttcagcgaggacgaggcgaggtacttcttccagcagctgatttgtggcgtcagctactgccactccatgcaaatctgccaccgagacttgaagctggagaacacgctgctggacggcagcccggcgcctcgcctcaagatctgcgacttcggttactccaagtcgtcgctgctgcactcgaagcccaagtcgacggtcggcacgccggcgtacatcgcccccgaggtgctctcccgccgggaatacgacggcaagctaccgggaaacagtgcctgcatttcgttgtatcgctcccccaacaaacctataccagtctactcttctgcttccgtttctcctttccagcactgcaaaattggttgcatttgcttgtcagaattcagaaacggtatgatgcct

SEQ ID NO: 12588 - DNA, 498 bp, Zea Mays
gcttgtgttccctccgcccagaactcccgaaaccagcccaacaccaaagctcattccacgaggcgacaaccttccttccataagaacagagcggccacgctgaggagtgaggaggaaggtaggaggagaaccgtgagcagagagacatggcgcgccaccaccagcagcgggcgctgctcctgttcccactcgtcttcctcctcctcctccttgccccgcccctcgccggcgcgtggggaaaggagggccacatcatggtctgcaagatcgccgagaagtacctgtcggagaaggcggcggcggcggtgcaggcgctgctgccggagtcggcgggcggggagctgtcgacggtgtgcccgtgggcggaccaggtgcgctggcactaccactgggccagcccgctccactacgccaacaccccccaagtctgcaacttcaagtattctcttaaaattgtctatctaccatggagatgccgcggatgaacatcgatgcctc

SEQ ID NO: 12589 - DNA, 1429 bp, Zea Mays
acagcacctcgatccatcgttcatctcacagcccaacccagcccagcaaccgcgaatccgtgttcatctccctactcgatcggcagccgcaagagctgaccctccgcttccccccaaaaaccctagccatcccaggttgctccggccgcatccccgccgaccgccgaccgccgacgatgcctcccaaggccaagaaggacgctgcgccgtctgagcgccccatccttggacgcttctcttcccacctcaagatcgggatcgttgggttgccaaatgttggcaaatcaacttttttcaacatagtaacgaagttggctatcccagctgagaattttcctttctgtaccatcgaaccaaatgaagcacgggtgaatgttccagatgaacggtttgattggctttgcaaactttacaagccaaagagtgaggtgcctgcatatcttgaagtaactgacatagctgggcttattagaggtgctcatgctggggatggtctgggcaatgcattcctctcacatatacgtgctgttgatggaatcttccatgtcctaagagcatttgaagacgcagaaattactcatgttgacgatacagtagatcctgttagagacatggaaactattagtgaagagctcagactaaaggatatagagttcatgaaaaagaaacttgaggaccttgataagtcaatgaagaggagcaatgataagcagctcaaaattgagcatgaattatgtgagagggtcataggccatcttgaggaagggaaagatgtccgtttaggagattggaaagctgctgacattgagatcttgaatacattccagctactttcagctaagccagttgtctatttggaacatggtggtgaaaccatacttcctttcagctgtgcttttgaacagaaactagtggatatgccagaagatgaagccgccaaatattgtgctgaaaaccagataacaagcatgatcccaaaaattatcaagactggttttgcagcaattcatctgatatactttttcactgctggtcctgatgaggtaaaatgttggcagatcagacgccagactaaagctcctcaagctgctggtgcaattcacactgattttgaaaggggtttcatatgcgctgaggtaatgaagtttgaagatctgaaagaactgggcagtgaatctgctgtaaaggctgctggaaaatacaagcaggaggggaaaacctatgtggtccaggacggggacatcatctttttcaaattcaacgtgtctggtggcgggaagaagtgaataatgtatgaagatggtagcatcaacagtgttttacgtcttaccccgaatttctcattcaacagtgtttacaccttgccccgtatttccacatttttgagaaggcaagataagttgaataatattggagctgttagtgcaat

SEQ ID NO: 12590 - DNA, 654 bp, Zea Mays
aaccaacatctgggcaaggaacagataaggactgcaaaccttgtcactttgtcagggcttcggggacagccaaagaagacggacggacccagtgaggcgagcacgggcgctcaccggcgatggcgacgagggcatgggtggccgcggcggtggccttgaaccctcaactgctgcctctccgctcctgctcgcccacgaagtcggtctccccagcgcagcgctcggcgtcgatggggctccggctgcgcagcggccggccgtgcctggggaagttcgtgtgccgccgcgccaagaacgcgggatacgaggactacaagttcccggaccccatcccggagttcgccgagcaggagacgagcaagttcagggagcacatggcgtggcggctggagcagaagaaagaggactacttcggggaccatgtcgaggagatcgttgacgtctgcaccgagatcatggggacattcctggagaacgattaccgtggaccagggacgctcctggttcacccgttcctggacatgaagggcgagatcaaggagagggggctccccggcgcacctcaggcggcacgggcggcgatagcatgggccgaaaagaacgtggacaaggactggaaggcctggactggggaatactagcactagaagaggg

SEQ ID NO: 12591 - DNA, 1221 bp, Zea Mays
gttagccgcattgcagtaacccttgatgggatgtccatggccagtattcagacctccttcgattatttgagtatggtggctatccaccagatgcaaattatctgttcctgggtgactatgttgatcgggggaaacagagcatagaaacaatatgccttctcttggcgtacaagataaagtacccagaaaacttctttcttctcaggggaaaccatgaatgtgcctcgatcaaccggatatatgggttttttgatgagtgtaagaggagattcaatgtgcgtatctggaagatattcactgagtgttttaactgcctcccagtggctgcacttattgacgataagatcttttgcatgcatggggggttgtctcctgagctaaagaacatggatcaaatacgtaacatttctcgtcctgtggatgttcctgacgttggtcttctatgtgatctgttatggtcggaccctgataaagagattgttgggtggggtgagaatgacaggggtgtttcctacacctttggagctgacatagttgctgagtttcttcagaaacatgatctagatttgatctgcagggctcaccaggtcgtagaggatggctatgagtttttcgcaaatcgccagcttgtaacaatattctcagcaccgaactactgtggagagtttgacaatgctggtgcactgatgagcatcgacgactccctagtatgctcgttccagatactcaagccttctgaaaagaaaagaaaagcaggagctgagaacatgccaaagcccggtacacctcccaggaagataaaaataagtgttacccgcatttagccagattctcgttatcaaactggatttgagaagttgtgattaaatgctccccaaacttgttatggtaggttttttggtgagcttaacacggtgttaaactgtggagtgtggaccaccgtgcttatgtcttgctgatctgaagtcatgcaaatgtatcctggcgttttgccaaacaaaaaagatcatgctaacagaaacttctggattttttttttattgtggacctctgttcttattccccaacagatgcaacatgtttatgaatgggtagcattgcttgcattggagattgtgctttcttttgtactacttaataaatacttaatagcatgtataaggtctgtatttggaaacgctaactaacagtaacagcacatgccctttactgatgtttatg

SEQ ID NO: 12592 - DNA, 136 bp, Zea Mays
caccaattggcatgcttgatttcgctttagtccatgtggtatctggaactgaatgtgttcttggaagctgcccatcttgtgtttccctctgactttcaacaacatcatagatgtcactttctgcatgatgctcatt

SEQ ID NO: 12593 - DNA, 74 bp, Zea Mays
aggatcgaatgtcacatcttcatatataacaagagttctatacaaaataaatagataattacattataaggaga

SEQ ID NO: 12594 - DNA, 603 bp, Zea Mays
caagaggctctcaagtgctgtccttttcaatcagtcatgcatccttgatagacctgatggctatcgcagagagctgtgttgatgcggtggtcatggagatggtggcagtctactgcggtggcctctacaccgccaaaccagagcttgctgcccgccgcatcgaggccatcggcttccaagtcgggcaccagctctctgagagatataccatggagcgccctcgatttagtgatcatcttgaagcaatcaagtttatctgcaaagatttttggtcagagctgttcaagaagcagattgacaatctgaaaacaaatcacaggggtacctttgtccttcaagataaccgttttcggtggcttactcgtgtttctctagatccacgtacagagaacacagattcaactgaaaatgattctgcagcattgggtgatactgcagcccaaacgactaccatgcttctgtatttcccatgcgggttgataagaggtgccttgaccaacttaggaatttcgtgttctgtctctgctgacatgtcaaaccttccagcatgaagttcgatttaagatactactacaatatgtaatctagtagcgagggctatac

SEQ ID NO: 12595 - DNA, 4352 bp, Zea Mays
ctcgaatcctactgctggtgccgctgttttcttgcttcgttgcgtgctggcggagcaagaggcggacatggccaccaccaccgacgccgccccagtcgcgcccgtggaggaagggaacgccgccccggcggccgccgaggaggagccgcccaagaaagtcgaggcagccgtggccaccaccgacgccgccccagtcgctcccgcgtccgtggaggacgaaaatccggccctggcggcggcggccgaggaggagctaaccgagaaattcgagtcggcagcggcggcggcggcggaggaggaggatggagaggcggccgcttctgtgtcagcgccagtgtcagaggtggagtccaagtcggagaacggtgaatcgggggagggggatccttctctggcttcccctgatgcgccggaaagtgatgagaagggcgaattgcaggaggaggagcagcatgatgaggaaagaggtgctgcagtagaggtaaatgttgtggataagatagcagaggatgtcgagtcgcctgtggctgaagaggagaaactggtaccggaagttgagaagggcgaggaggtaggttctgggagtgcagttggtggcgagttgagtgatgaggaggaggttgaggtctctccctctcctctgggcgaggaggtggcagaggtggcagaaccacaggataaggtagcccatgtttctgaagctaatggtgaattgggtgatgggaaagaagcgagtgatgatgtggttgctctgggaggtggagaagccactaacaaggatgctgttggtgatgatgtggtggctctgggaggtgaagaaaccttagaagaatcgacaaacaaggatgctgatggtgatgattctctgggaggtggagaagcttcagaagaatcggctaacaaggatgctgatggtgatgatgtggtggctcagggaggtgaagaagccctagaagaatcgaccaagaaggatgctgatgttgaagatgaggccatcaggcctgagccaccgagtgaggcaactgcagtggttatgaatgatggaagcatagaggagcttgcccctgcaagtgctgaggagatcatagacagtgtgcgtgaggatagtcctcagaaggagcagagcgctgaagaccaggccgttgccggtgaagtggtggaagatgttggtgttgacaagcccacagaggttgaaaatgttgatgctactagtgctgatggtatcctctctcgagaattggctccagaatcaatcaaagaaactaatggtactggtgagattgaaggtgccactgaggttgttgatcatgaagaggaggctgctgataatgacataattgaggctgtgccagatgatgcggatggggatggtaatgaggctgaggacgatgacgacgggacaaactctgacacgagtcctgcacgggttgcaattttagagagctctgaagccgcgaagcagatcatgaaggagcttgcagaaggctcctctagtggtagtatctcaagagacttcaccaatagcatggatgggcagattatgcttgatgattctgaggatgatgatgatgataatgatgatgatggggatgagaagggatttgattctgctgccctggcggcccttctgaaagcggcaactggtggatcctcaggtggggatatcacagttacttcacaagatggttctagaatatttaccatggaccgacctgctggtcttggttcatcagccccttctctgaggccgactgcgcctcgccaatctgcccggtcaaacctattcagcccctcagagctagcagttacagctgaccctacagaagagatgacagaggaagagaagaagctgcatgacaaggttgagttgattagagtaaagtttctgcgtctggtttacagattgggagctactcctgaagaaacggttgcagcacaagtgctgtaccgtctgagccttgctgagggtatccgacatggcaggcagacgaaccgagcattcagccttgataatgcacggaggaaggccttacttcttgaagcagagggaaaagaggatctgaacttctcatgcaacatacttgttctaggaaaaactggagtcggcaaaagtgcaactatcaattctatatttggtgaagagaagtccagaactgacgcctttagctcagcaaccacaaatgtgcgggaaattgttggtgatgtggatggtgtcaagattagaatcattgatacacctggccttcgacctaacgtgatggaccagggatcaaacagaaagattcttgctgctgtcaagaactataccaagaaatgtccgccagatattgttctatatgtggatcgtctggatagtctgagccgtgatctcaatgatttgcctcttctgaagactattactgctgttcttggctcatccatatggttcaatgccattgttgcactgacacatgctgcctcagctcctcctgaaggcctcaatggtgctcccatgacatatgaggtcttgatggctcagagatcccacatcatccagcagtccatcaggcaggctgctggagatatgcggttgatgaacccagtagcacttgttgagaaccatccttcgtgcaggaaaaaccgggagggccagaaagtgcttccgaatggccaaagctggaggcatcagatgttacttttgtgctactcctcaaagatattatcagaagccaactcactcctgaagcttcaggatcctaatcctggaaagctttttggtttccgtttccgctccccgtctcttcctttcttgttgtcctcactcttgcagtctagagcccaccccaaactttctgctgagcagggtggcaatgaaggtgattctgatgttgaattggatgactattctgatgtagaacaagatgatgacgaagaagaatatgatcagcttccacccttcaagcccttgaccaaagctcagcttgcaaggctcacaaaggagcagaagaatgcttattttgacgagtatgactacagggtcaagcttctccagaagaaacaatggaaggatgagatccgcaggttgaaggagatgaagaagagggggaaaactgatctggatgattatgggtatgctaatatcgctggtgagaacgatcaggatcctcctccagagaatgtatcggttcccttgcctgacatggtgcttcccccttcatttgattgtgacaatcccacataccggtaccgctttttggagtcaacctcgactgtcctagcaaggcctgttttggatgcgcatggatgggatcatgactgtggttatgatggagtgagcgttgaagagacactggctatccttagcaggttcccggcaaatgtagcagttcaggtcaccaaggacaagaaggaattcagcatccatttggactcttccatcgcagcaaagcatggagagaatgcatcatcacttgctggttttgatatccagactgttgggcgccagcttgcctatattctccgcggcgaggcaaaaatcaagaacatcaagaagaacaagaccacaggaggcttctcggtaactttcctgggtgacattgtggcaactggactgaaggtcgaggaccagctctcccttgggaagaggctgtcgctagttgccagcactggcgcgatgcgagcccaaggggaaactgcatatggagctaacttggaggcacgcctgaaggacaaagactatccgattggccagtccctctcaacgctgggtctctctctgatgaagtggcgccgggaccttgctctgggcgcgaacttgcagtcccagttctccatcggaagggggtcgaagatggcagtgcgacttggtctgaacaacaagctgagcgggcagatcacggtcaggacaagcacctcggagcaggtccagatcgcacttctgggtctcgtaccggttgcagcctccatctacaggagcttccggcccagtgaaccgtccttcgcttattagcctgtcaggagtctcagtccaattacttcataaccatgtggtttctcttggcaattttcttcttcacatgaaccatgtttcttgctgtttcagtttactcccttgtaattggcagatcgtttcctaccataattttggctgaagagggttgtgcgatttatctggaactgtagctgaataaataatgtcgagaaatgtaccatccttgtgtttatcaatatctattgcagcgtctattctgattattcttgtggctatcaatctattaggccccgtttgtttcgttgaaattgaattccattttaataattataatttagacaaaactaattaagttcacatatttatactaggtgtgtgcccg

SEQ ID NO: 12596 - DNA, 76 bp, Zea Mays
ccgttctcagtaggcaaataatgagggggaggagccggtccctgagaataaaactttcctcctcgtctatgttacc

SEQ ID NO: 12597 - DNA, 1622 bp, Zea Mays
cactccaacagcatgcgttgggcgggcctctactatgaatctcatacaggaggacaagaccaagtcgtggaagaagctagtgaatgttgctgtgtcaggcgcggccgggatgatatcaaatcacctgctgttcaaactcgcttctggtgaggttttcggacaagaccaaccaatagcacttaagctactcggctcagaaagatcgtttcaagccctcgaaggtgtagctatggaactggaggactcgctgtatccactgctgagggaagtcagcattggcatagatccttacgtggtctttcaagatgtagattgggcccttcttattggcgctaagccccgaggtcccggcatggagcgagctgcgctactggatatcaatggccaaatctttgctgaccaggggaaagcacttaatgcggtcgcctcgcggaacgcgaaagtcttagttgtcggaaatccctgtaacactaatgcgctgatttgtttgaaaaatgccccaaacataccggcaaaaaactttcatgcattgacgaggttggatgaaaatagagcaaagtgccagctggcactaaaagcaggtgtattttatgacaaagtatcaaacgtgactatttgggggaaccattcgacgactcaggttcctgatttcttgaatgccaaaattgatggaagaccagtgaaagaagtcattaaggataccaagtggttagaggaagagttcaccctcacagttcaaaagcgtggaggtgtgctcatccaaaaatggggcagatcatcagctgcatcgaccgctgtttcgatagtggatgctattagatccctcgtaactcctaccccagaaggtgactggttttctacaggggtttatacgactggaaatccttatggcatagcagaggatatcgtgttcagcatgccatgcagatcgaagggtgatggtgattacgaactagctagtgatgtgttgatggacgattttctctgggaacggattaaaaagagcgaagctgaattgcttgctgagaagaaatgcgttgcccatcttacaggagaggggaatgcattctgtgatcttccggaagataccatgctaccaggagaagtgtagtttagttacagaagcaacagcagcggaatgcatttgccaatacattagctgagacttgaaacatctgcttgccagatgcagcaactacttttatatatatatgtgtatattcaataattgtgccacacgaatttgactatgatgcaaacctcttacacaggtaagtcttttttttttccgtaaatacgagaaagactgcttcaaattcatgatctggtgattcagtgagataatcctcaccaatccgctaggcgtgtgccgttcagccacaacttgcattcatcgttacgttgtgaaccatcatgactcccatggaggatctgaaatatatatacatgattttgcactatcatcgccactgcaactagaagcatggcaaatgacatcatcacaccaatgaggcgattcgcatactattattaaatgctctctccattctaagttataaattatgttattaagagtcgaagcatcttaaatttagtcaacattatagaaaaaaaaatacaaa

SEQ ID NO: 12598 - DNA, 86 bp, Zea Mays
ctcaatgggagctagctctaaaaaatttgaaccttcagttgaagacttgccaagcaccttcgagcatattgaaagcgaagttgagg

SEQ ID NO: 12599 - DNA, 2164 bp, Zea Mays
gggaccgggagccacgccacgcaggcacgcacgcggaggggagcgccggccgtccgcggcggattgggatctccctcgcccgcccgtccactcgagactcgacggcacccgccgcatttgagctgagctgaggaggcgtgggggacggcgcggggatgtggcgcctgcggatcgcggaggggggcggggacccctggctccgcacgaagaacgcccacgtcggccgccaggtctgggagttcgacgcctccgccgaccccgaccccgccgtcgacgccgcgcgccgcgccttcgccggcagcaggggccacctcaagcacagcgccgacctcctcatgcgcatccagttcgccaaagaaaatcctcttgagcttgaccttccagcgatcaagctcggtgagcacgaagacgtaaccgaggaagccgtgtctactactttgagaagggcaatcagccgtctttctactctccaggcacatgatggacactggcctggggattatggtggccctatgttccttatgccaggcttgatcataacattgtatgtgactggagcactaaacactgtcttgtcatcagaacaccagaaggagatccgtcggtatctttataatcatcagaatgaagatggtggctggggcttgcacattgagggtccaagcaccatgtttggctcagcactgacctacgttactttgagattgcttggagagggaccagatagtggagatggagcaatggagaaaggccgaaactggatcttagaccatggcggagcaacatatataacatcctgggggaagttttggctctcggtacttggtgtatttgaatggtctggtaacaacccggtaccaccagaagtatggctactgccatatctcctgccatttcacccagggaggatgtggtgtcattgtcgaatggtgtatttgccaatgtgctacatctatgggaagaggtttgttggtcgaatcacaccactcgtgttggaattaagaaaggaacttttcaaagacccttacagcaagattgattgggacaaggcccgcaatctatgtgctaaggaagatctgtactatccacatccatttgttcaagatgtcttatgggccactctccataaatttgttgaaccagttatgatgagttggcctggcagtaaattgagggagaaagctctggagacagccatgcaacatgttcactatgaggatgagaacactcggtacatttgcattggtcctgtaaacaaggtattaaatatgcttgcttgctggattgaagatccaaactcagaggccttcaaactccacatcccacgagtctatgactacttgtggcttgctgaagatggcatgaagatgcagggttataatggtagccaactttgggatacagctttcatagttcaagccattgtggctaccaaccttaccgaagagtttggtcccacccttaaactagcacacaactatatcaagaaatcacaggttcttgacgactgccctggtgatctgaatgactggtaccgccacacatctaaaggcgcatggccattctccaccgcggatcatggttggcctatatctgattgcactgctgaaggactaaaggcttcattattgttatcaaagatttctcctgaaattgttggtggaccgatagaagctaatagattttatgatgctgtcagttgtctgatgtcttatatgaatgataatggtggttttgcgacttatgaactcacaagatcctatgcctggctggagctgatcaatcctgctgagacctttggggatattgtgattgattacccgtatgttgaatgtacatcagcagcaatccaggccctgacatcattcagaaaactataccctgggcaccgcaggaaagaggtggacagctgtatcagcaaagctgctaatttcattgagagcattcagaaaagtgacggttcatggtatggctcttgggctgtttgtttcacgtacggcacttggtttggtgtgaagggactaattgctgctggtagaacatttgagagcagtcctgcaatcagaaaggcatgcggctttctgttatcaaaagagcttccttccggtggctggggagaaagctatttatcgtctcaagaccagatcgcatcattttatctgaa

SEQ ID NO: 12600 - DNA, 428 bp, Zea Mays
tacacaatgaaggaccaacgtgcaaaacacagttccatccttatccgttctactttgtcacttgccgacccctctgctttatataagctcgaaatttcgctgacgcgaaaaaaaatcaactgattcgctgaaaaacggagaatcgaaagcgaatgctgtctcccaccacactgcggccgctggttccggcggcggcgccagcgcaccttaccgcctgcttcttgcccgcgtcggggcggcgtgcgccggcggcggcggtgcgcgcggtgcggaactacgactccatcccgaagcgggagcccttcacctccaaccgcagcaccctcgacgagttcctccggctggacaagccgctcgtccagcgtaccaaggaccagatcacagtcggagggccatgtaactagcatgtattaatactgaatcggaaa

SEQ ID NO: 12601 - DNA, 2618 bp, Zea Mays
ggcttggcagattgggatcccctcccctccctcctcccacccccttgccttgagctgggggttcgttcaggaagctgatctgagagctcgcgaccgcaaccacaaccaacccaaaaagctgcagcagatccatccttctcacccgaaacaatcgatcccctcttatagacttcgcctgcctccaacccttaatcttcagctatggattcagccgccgcgcgacccgacgaggaggaggcgcgccgccgccggagcaccgactgcatctacttcctcgcctccccgttgacctgcaaaaagggaagtgaatgcgagtaccgtcatagcgatgctgcgaggatgaatcccagggactgctggtattggttccatggcaactgcgcaaatcctaaatgctcctttaggcacccgccattagacaacatggccggagcaccaacgactccacgtccagctcaacagtctgtaccccatcaagcttcagcttctgttccagctcagccccagggatctgttcctgccactgccaagcagggtgttccatgctattactttcagaagggcatgtgcacgaaaggggacaggtgtgcctttctgcatgcgccccggtctgctggaaaccctgctccacagcctccggccaaggtcttcaccacccctgccttgcagcctaatctccatccaccgttgaacaactcgtggacaaaacccaacttgagtgctcctgcagtagccgtagttgacaagccaaaggccagcacttatcatgatggtaaaccgcttcatcacaaggaaaatctgacgagtaggaccgaaaacccatcaagagtagtttatcagaatcacagtagttcttatgcacagcccggtgcaccaaagcgttaccagcctcagccttcagcccgagatggcttaaccgacaatggtatggaggctggcgaatttgcgagagaaccatccgccggttcttgtgtaactgccggttttaatggtgctggagggatgacgaggcaaacacatggtggctatgaaccagaaaggtcatacagaaattcagcagagaggtcttcgtcagagaaaaggattccccagagagagcatatcccctctgtggctgccggcagttcggatctgcgccataggctactgaagcaaagaaagtccaataataattcaaggtcggctgaagccctgggcaggcatgatacacatcttgaggatgagcgcaatgaccaacatcgtccgcgaggtgaacagcaggatggcctctcacggtctcgactgcatgatagaataagactacctggggagacagcgtttgacagtcttgggtcacggtcagaggagtgggatagagggtctagagccagattgtcgccaccaaaatcctcagatcttcgagggaggcttcatgaaaggctaaagggtagattgggtgaggagataccgggtagcagtgcaaaaggtttggcagtgaaggcaagtagcagtgaggatactgaatcactgaactttgctggtccaaagagccttgcagagttgaaggcaaagaaaggtgtcggcaggtcaggagaagatgccgtcgtcaagggcttaggttcttctcgtatgacttcagaaatagtttggagcagggaggctgcttcgtttgaaggtccaaagcccctaagtgccatactgaagagaaaaagagagccagcttctgaaatccccgctgcccagcctggcatcacacaggaagcagataactacgccgcaggagctgaagaagaaatccaaaccctagcaaatgacacggttggggagaacatggaggggattggagaagaagaggaggaagaggaagctttccatcctgaagatgatgtggcgtacgacgataacgccaatgaagctgcagtggcccaagagctggatgagtatgaagacgcagatgcggcagcacaagactatgacgatgaagctgcagctgcccaagaggtggaggagcatcaagacggagaggcagcagcagaagactacgactatgaggaggcagacgtcaacgccgaggaagagaatgagtaccaggactaccaagacgaggacgacgacgatttggaggatggggacgacgattttgcacgaaaagtgagcgtgatgatctcctgatagcgacagaaagcggttcattccccacaaagtgtttatctcctttggcgcgaggtactttttagttcactgcgcaaaagacagagactaatataggtgggagaagagagatagaagaatggacattgttgagaaaatgagctcctccatccatcggagagctcgcttgttgacctgtctgtctgtactgtactactcacgcaaatgtgatgcggcttctctatagactcctgcatgtatttttagttgacatgagaacagtactgtatccgtatttgctgctgcttctttttttttttgaagaaaacatattgctgcctggtagaagatacatctacagttcattctacacgaacccttgcctccagatgtacagtacagtctgtttattcgatgtcaaaagcctgctcagcccgagaagaagtagtaaatgggagacgagtatgtcggcctaactgacaagcatg

SEQ ID NO: 12602 - DNA, 1626 bp, Zea Mays
ctgccccgccgcgccccctcgcgtccgttcctcccttcctttccgtgtcggtctccggcgcgcccgacgtagcgcccgcatccgacggccgtgggggcatcgacggccgggcgacgcgacgcgatgtgaccatgacccgtcagtcagcagtacaaaatggcgatgatggtggatcctccgaatggaatcgggaaccaaggaaagcattactactcaatgtggcagaccttatttgagatagacaccaaatatgtaccgatcaagcccattggtcgaggagcttatgggatagtttgttcatccattaatcgtgaaacaaatgagaaagtagcaataaagaagatacacaacgttttcgacaaccgtgtggatgcactacggaccttgcgggagctgaaactccttcgccatctccggcatgagaatgtcattgctttgaaggatataatgatgccaatacacaggagaagctttaaggatgtgtacttggtatacgaactcatggatactgatttgcaccagataatcaaatcacctcagggcctttccaatgaccactgccagtattttctttttcagttgctccgaggactcaaatatctccattcagcagaaatactccacagagacctaaaacctggaaacctgctggtgaatgcaaattgtgatctgaagatatgtgattttggtctcgcacgtacaaacagtagcaaaggccagttcatgactgaatacgtcgtcacccgctggtacagagctcctgagctgctcctctgctgcgacaactacggcacatccatagacgtctggtctgttgggtgcatctttgctgagctccttggccgcaagccaatatttccaggaactgaatgcctgaatcaactcaagctcatagtgaacgtcctcggcaccatgagtgaggctgacctagagttcatcgacaacccaaaggctcggagatacatcaagtcccttccctatacccctggtgttcccctcgtaagtatgtacccacatgcgcaccctcttgccattgatctgttgcagaagatgctcatcttcgaccccaccaaaaggatcagtgtcaccgaggctctcgagcacccttacatgtcccctctgtatgatccaagcgcaaatcccccagcccaagtgcccatcgatctggacatagacgaaaacatcagctcagagatgatccgggaaatgatgtggcaggagatgcttcactaccaccctgaagttgccacagcaataagcatgtcatgagagattccacagcccccaggacatcagcgggggctcacctcttctttttttgtctttgataaaagcctactgcgagtagccgattattgcggcacctagctgttatagtacacttaatgtctgcttggaaccaattatggcgcctagctgttgtagtacccttaatgtctgcttggacacttccgcttgtgtaaatacgcgcccaataagagcggcgtatggatagatgctgtcactatggaccattacttgttgtatgcactgtatatctgtggactgttgtggtgttgtattagttcatgaaccatgaagctttgaagtaaaaatcccatgcatgttaagtttgtgaaaaaaaaa

SEQ ID NO: 12603 - DNA, 76 bp, Zea Mays
tgaaactctgtctctactaaaaatacaaaaattagccaggcgtggtggtgcacgcctgtaatcccagctactcagg

SEQ ID NO: 12604 - DNA, 415 bp, Zea Mays
ctattcctcggagagggagaagccgccgccgcagcaatcacagcagcccggagaaagcccaggtccgacaagatgcagatcttcgtgaagacgctgacagggaagaccatcaccctcgaggtcgagagcagcgacaccatcgacaatgtcaaggccaagatccaggacaaggaagggatcccgccggaccagcagcggctgatctttgccgggaagcagctggaggatggccgcacccttgcggactataacatccaaaaggagtctacgcttcacctcgtgcttaggctccgcggtggcatcattgagccctcgctgcaggcgctcgctcgcaagtacaaccaggacaagatgatctgccgcaaatttgacactgaagtgtccctaacagccaaacctccatgctatctcatcg

SEQ ID NO: 12605 - DNA, 1134 bp, Zea Mays
gacgaatccgtgcgacgcggggctggatctcagtggatcgtggcagcaaggccactctgccacttacaatgccccgtcgcgttttaagtcgtctgcaaagcattcagcacgccgcccgttgggaagggagcttcgaggcggcccgccgcggcgcgtcggccgggcgggctgagccaatggcacgggcccttggggcgcgaatgccctaacgtgggtcggggcgggcggcgagcagaggcgccggttgctagcttggattctgacttagaggcgttcagtcataatccgacacacggtagcttcgcgccactggcttttcaaccaagcgcgatgaccaattgtgtgaatcaacggttcctctcgtactaggttgaattactatcgcgacgcggtcatcagtagggtaaaactaacctgtctcacgacggtctaaccccagctcacgttccctattggtgggtgaacaatccaacacttggtgaattctgcttcacaatgataggaagagccgacatcgaaggatcaaaaagcaacgtcgctatgaacgcttggctgccacaagccagttatccctgtggtaacttttctgacacctctagcttcaaactccgaaggtctaaaggatcgataggccacgctttcacggttcgtattcgtactggaaatcagaatcaaacaagcttttacccttttgttccacacgagatttctgttctcgttgagctcatcttaggacacctgcgttatcttttaacagatgtgccgccccagccaaactccccacctgacaatgtcttccgcccggatcggcccggcgaggccgggccttggagccaaaaggaggggcggtgccccgcttccgacccacggaataagtaaaataacgttaaaagtagtggtatttcacttgcgcccggaggctcccacttatcctacacctctcaagtcatttcacaaagtcggactagagtcaagctcaacagggtcttctttccccgctgattccgccaagcccgttcccttggctgtggttttgctggatagtagacagggacagtgggaatctcgttaatccattcatgcgcgtcactaattagatgacgaggcatttggctaccttaagagagtcatagt

SEQ ID NO: 12606 - DNA, 1534 bp, Zea Mays
gatggctacaagtcagtggactactttgatttcaccttggcacacagaatatcaaggaagaaaccttctgatcttaaatttcttcacagtattctttttgggaggaaaggcaaggctgtcgattttaaaggacatatactccagttctctggatttgtttggcatgaaagtgatgaaaagcacagagtcaaggcaaaagaaaagcttgacaagtgtgtaaaagaaacgctgttggacctttgttggacccttggcattccaactccaaaagcaaacattagaaaggaagatattgtgtcaaagctgttggactttattgctgaacctcactctgcagctgattctgggctctctgatgaccagggttcaaattctaaaaaacgcaagagaggaggtgaaagtgcacgtaagactcctgatagcacacctagtaggtcaaggaagaaatttatcaatgacagcacttctagtaaaaggcagaaaaaagcgctcgagtatgatactgatgaggatgaatccatgaagtcagacagtgaggaaaacagagatgaagattcagatgaagctggtgacaaacaggaaggtgactatgtatctgggaaagaaaaggcagggaagttctcagaggtaaaagaatcttcaggcaaaaagaaggcaaacacagggagtggccaccaatcaggtcctccaaagaaaattatcagaagtccggtaaaaaaagtatcatccaagattcatgaggaaaaagaaagccccaataatagtgcaaaggttttttctaggaagaagaaacccacagcagaaaaggagatcaaagaaaaaaagtcatcaggcaaaaaggtgacaaagggtaaaggagaatccgttgaagcagttcttcccagcaaggatgatctgaggaagaccattactgaaatcctcaagaaagttgacttcaacacggcaactttcagtgacatccttaagaagcttgacaatcactataaaatggatctggccccaaagaaagaagccatcaaagttatgatccaagacgagttaaccaagttatcagaggaggacgaaggagagggagccggagacaccgagaagaaacagcagcagcctcaggcgaaggagatcgaggcatctcgttgattatcgccgcaccaactcgagaacctcacccctgatcgtgtatgttatggggcatgatgtgtaggcagcctccacacctttttagctgactgatcggagagttactcctaggcaactcttgtttctagatttgcaaatggtgtctgaaactctgcgtttgctgcggcagaacgtgtacttaattgttcgtgataggtctgaataacacatggatggtatcagtctgtagcttattttttttacttgatccgtttcttctgtgggttgtgatttgtgaatgaccaaaagatggatgctgtattccagtttctgttctctcagagtaggcatgcaagaataacagctgaaccaaaccgagaaacagaacagtggctatctcctatctttagtagcttcc

SEQ ID NO: 12607 - DNA, 1206 bp, Zea Mays
cgttctttgccgtttctgcacacaagtactagtcgtctcctagtcctctcctctgtactagtcgtcgagtctgcttccattctgttcaagttagcgccgctaatccgctccctattcaccatccaatccaatcggcttcccccaggcacccatggcgacggcggtggaggttcccgtggaggcgccggtgaggacagtgaaggtcaccaatgtctctcttagtgcaactgtgcaagacattaaggagttcttttccttttcaggagatattgatcatgtggagatgcagagtggtgatgagtggtcccaagttgcatatgtcactttcaaagatgcacaaggcgcagaaacagcacttcttctttcgggtgccacaatagttgatctttctgtcatcattgcacctgctccagagtatcagccacctcctactgcctctgctccaccaatgagtggaaccagagttccagttggtggtggagacaacaacgttgttcacaaagccgaggacgttgtgagcactatgcttgccaagggtttcgtgctaggcaaagacgcggttggcaaggccaaagcattcgatgagaagcatggcttcacatccacagccggtgctacagtggcctcaattgacaagaagattgggctgactgataagatcacgacaggcacttccttggttagcgggaaggtgaaggagatggaccagaagttccaggtctccgacaagaccaagtctgcactcgctgccgccgagcagaaggtgagcagtgccgggtctgccatcatgaagaacaggtacgtcttcaccggcgcgtcatgggtcaccagcgcgttcaacaaggtcgccaagaccgccacggacgtcgggacgatgaccaaggagaagatggccgccgaggagcatcacaagggctctggcccgtcttctggcggccactcgtacacgcccatccgatgattcatgcattggcttgctgttacgtgcctcactcaaacggtgttgtactgcatattggtggatgtaaaacatggtcttttagtcccaactcttattatgttgtggttagctagagttgaaacctaatagaaaccacaagttaaggttcaagcacatgaatacctattttccatacacatatatttaaagttaaattttgtactcttatcattttaagtcttctttatcattcaaaaaaaaaaaaa

SEQ ID NO: 12608 - DNA, 83 bp, Zea Mays
gtggatgatctgatcaagtaccaggatggagatgctcaccaagtgatcgtcatctaacaacactaacgtagtgtttatcccag

SEQ ID NO: 12609 - DNA, 99 bp, Zea Mays
ctgagtacgttgatgtgtactcacccttgctttacacaccacccccaccccaggttgtccccattgtacttagtgctcaggaggtgatgctggcaacat

SEQ ID NO: 12610 - DNA, 461 bp, Zea Mays
cgtgtatcaaagtggagttaataatgtgaccatatagtgggcgatgacgacgatgacagtgatagctcagatgacggtgatgacacatcgatggtggctgatgaagaggctgggccagaagagatggcagtggacaggccaaggccccccaagcctactccagacgccgatgggtggactgttgtgcctcctaggcgtggtggtcgcagcaagaaatagagtacatggtagctgctggcttttctcgcggaatgtttgttgagtgctgcggttccatattcacttgtatcgctcgatatttgacccgacatggatgttgtgagtgtgtagtatgtttggtttgccaccgcccaccaatttggtgtaaacaaggtaattattatagatgcatcctgtgatcaggttttgagtgttgcagagtcatcgtttacgtgctgcccgtcccacaaagagcttattct

SEQ ID NO: 12611 - DNA, 654 bp, Zea Mays
atgtctaaactcggcttaacgcgtatcgggtgcccattggccactggcccctagccctcgccctcccttttctattgctccgaagcccgagttgcgagctgtctcctccactcttctccttcactgtcgcagccgccccttgtagaagcttcgaggctgctgctgctgcgcccatggccgcggaaggcaagacgccgtccctcgccgaggagtattcacttccaccacaggaagttccagtggaaaaggcagctgaggagaagccctctagtggtactgagtctgaagctgctccctcaaccaatgatgaaactcctccatctgtagaagacaagaatggaacttctgaagtacaagatgctgctgaaaatccagaggcagaagaaactaacactgctgcagaggaaacacctgctgtagaggaagcaagtgagactaccgaggaggaagaggctgagaaacctgagatcaagatcgaaacagctccagcagattttcgtttcccaacaacaaaccaaacaaggcattgtttcacacgctatgttgaatatcacaggtgtgtggctgcaaaaggtgaggatgcacctgagtgtgataagttcgccaagtactatcgatccctgtgcccaggtgaatggctcggctgaattgtgt

SEQ ID NO: 12612 - DNA, 119 bp, Zea Mays
ctctggttgaagtcttcgatcgaacgcttgatgagcgacgaatcggaacgtcgccttcttcagttcagcatccaactggcgagtactagagcagcatcagacgacctgatagcttgcac

SEQ ID NO: 12613 - DNA, 1152 bp, Zea Mays
cattggcgacagttgggctgtggggtgtcacttaaagttgtgcaagtacggcagtcaaatgtcaacagatttaagtgcaatagcatacgaagtaacctctttgataggctaacaagggttgtcaggtcctacgcaaatgcagttctaagttcgtttgaagaccctgagaagattctagaccaggcagttctggagatgaatgatgacttgacaaagatgcggcaggccactgcacaggtcttggcatctcaaaagcggcttgagaataaatataaagctgcagaacaagcttctgctgattggtatcggagggctcaacttgctcttcaaaagggtgacgaggatcttgctcgtgaagcccttaagcggcgtaaatcatatgctgacaatgcaagctccttaagatcccagcttgatcagcagaagggtgtagttgaaaatctgatttcaaatacccggcttcttgagagcaagatagcagaggccaagcagaaaaaggataccctaaaagctcgtgctcaatcagcaaagactgctacaaaagtgagtgaaatgttgggcaacgtgaatacaagtagcgccctttctgcatttgagaaaatggaggaaaaagttatggcgatggaatcccaagcagaggcactcggccagttagcaactgatgatttagaaggaaagtttgcactgcttgagacttcatctgttgatgatgatctttcacaactgaaaaaggaattgtctggaagctctttgaaaggagagcttcctccaggcagaacagcagtcagcaactcaggtgctgggcgccctttccccgacctagagattgagagcgagctaaacgagctgcggaggaaagccaaggaatattaggttcattccttgtcgattcagcaggcctgacggaatctcatttccaagaaaatatagtgcagctgcagattgctccattgcgcgtttcgaaagttgaaacacaagtgcgcattgactgtttgttaaagagtatggaatcggctaatttctcggcattttccccctcgagtgacatttgtacagctatccataaaattgttgtaaatcactactctctctagagcctttttttcatactatatataaagtcaaagttcgaagttcccacgccgtggtttt

SEQ ID NO: 12614 - DNA, 786 bp, Zea Mays
ccccaccagttcaccactactacacacatatgggtatggctgatgctattgtggatctcgtgagtagcggaacgaccttgcgtgagaataacctaaaggaaattgatggtggagtagttctggaaagccaggccactcttgtagcaagtaggaaatctctgcacaagcgtaaaggtgtgctggaggttactcatgagttgcttgaaagattagaagctcacctaagagcaactgcagaattaatgggcccgactgtaagtcctgtctatcgcagacgtgatggaaaagttgatgtggaatactatgccattaatgtggttgttccacagaagttgctttacaaatctatccaacaactgagatcaattggtggcagtggagtcttggtaacaaagctgacctacatattcgacgaggagacgccaaggtggcgcaatctcctctcggagctggggttgtaacttgggcgcatggtcaacttcgggtctcttctacaagttcccatatgtactgcaccacattcgtttgtcagtaccgaagcatgtaaacccatatgcagaagtgagaccgtgtggtatctgttttgtacctcttcgcttcaggaaattttggcctgtatcttgaccatctgagatgtattgatagagttgggtaatgctgttgggcgtatgtgtatttcttgtgcggttgtgcctgacttctcttgccggggcactgaataatcggccatgtttgaataaagaaagccggtatggttctcattcatgaccctctgctaaatttgca

SEQ ID NO: 12615 - DNA, 1562 bp, Zea Mays
ctgttttgtgcccaaagttccaataaagtattgttgaaattcgatgagcaaaaccatggaccagcaccgccggtatcccgttcccaattccacagatttccgctccccactccgcactcccagtacttaaaccacctaaaaaccaagcaaaatcccacctcccgaaccctggactcatagacaaggaattgggagattcgatttctgctattcagcccacgcccactggttcaaccggtttcttcaaatctcaggcttcaaggccgcaacttttcccccgttggggttggacttggacagctgccgtgcttgggaggcattgccggcaacgggaggtccaatcatcgatccttcgatagattgtatataaggaccacggttcagattactgtcaagcatgtctctactttcaaagttgcgcttgatcaccgtggatgttactggtacactgattgcttacaaaggacaccttggggattactactgtatggcagcaaagtctgctgggatgccatgtcctgactataaccgcatgcatgagggcttcaagcttgcatacactgagatggcaagacagtacccttgctttggatttgcagctaagatgccgaacatcgaatggtggaggacatgtgttaagaattcattcgttaaggctggctatgattatgatgaagagacatttgagaaagtcttcaggcgcatttattctgcatttggctcctctgcgccatactcggcgtttcctgattcgcagcccttcctaaggtgggcacgcgaaaagggactcactgttggcatcgtcagcaatgcagaataccgctacaaagatgtaatcctgccagctttaggattgaatcagagctccgaatgggactttggggtgttctcaggtgtcgttggcgttgagaagccagacccaagaatttacaagatagcgctggagatggcaggaaacgtcgctccggaagaagcgctccacataggtgacagcatgcggaaggactacaccccagctaggagcatcgggatgcatgcgctgctcctggaccggttcaagactgccgacgctgagagctggaggcagtcaggcgccacggtgctcccggaccttgtcgccactcaagagtggctcaccaaggatcagaatgacgaacaggaggaaacagtggcagcacgagtgctgaagagaatgtccgaaaagctatagatgggggctttaaccatgcattaattctacgagtgttcctttatattatctagctatggactgaaggtccaaaagcaacttatgctgatgagaggttggtgacgattcttggctactggctactgtaattagcttgagctactattctggttgcagcatctgtggctgaacacgagtaccatatctgagtgtcataagtcatgttgcgaagaacatgagtagcatatttcagtgtcatgagtcatgttacgaagatctcgagttgtcttacattcacctgcgtggagcagtagaggagcaagtggaaatgaatctgaacatgagcacaataataaaggacgaagcagtgaat

SEQ ID NO: 12616 - DNA, 1152 bp, Zea Mays
ctcgtgtcgtgtcgtgtcgtaattagttagttaagcgtttcctgcacatgcctgtgtgtgttgttttctgaagcgggatttgggctgttgctgtcgagacaaagaagcagatctcgtgctctatgcagttgacaaaccgaacagatgactacatcggctttaaggttaagacgacgagcccgaagaagtactgtgtccggcccaacagcggcatcgtgccacctcggtccaccagcgatgtcattgtgacaatgcaagcacaaaaggaggcgccaccggacatgcagtgcaaggacaagtttcttgtgcaaagtgtcgttgtggcggaagggaccttagtcaaggacatcactggcgatatgtttaccaaagaatcagctaatgtggtggatgaggttaagctgaaggtcgtctacatcccaccacccaaaccgccatccccagtgcatgaggaatctgaagaaggctcatcaccccgaccttcattgtccgatggaattaacttgaattatcaagagatgcagacaacgagggaatctgatgagtcactgttgttctcggctgtaaaaactcatatagatcaaaaggactacacctccgagacatctgctttgatttcaaagttgacagaagagagaaactctgccattcagcagaacaataagcttcgagaggaactggaccttacgaggagggaagccaacaagcagaatggtggattctcctttgtggtcgtggtggccattgctctcctgggaatgctactgggatatatcatgaagagatagatgggctcataatgactcggcctcatgttagaccgttttcctcacagtattgaatattgtctaatgcacttatcacatgcacactgctactccatagcatattcatctggtgtcttacgtgatctgtttcgtgcttgggattgggatgactagtcaccagtcgcaacacaggctgtcaaacaatggtctgtgtgcttaatcttgttttagctgttatgttagtgtgtgcaactaaaactgggtaattaatgatgtcgttttggtcgaccgtttgtgtaacagcgaagtcaacttgctgtgggacagcttttgtttcatgactagaacttgccattgccgccaattaggcatgccgcaatttgtt

SEQ ID NO: 12617 - DNA, 584 bp, Zea Mays
acttttattggaccgagtcaccgagggagtactcggaatgaagagaaatccacggcaaaaaatgagtgataacctgatggaaaaggttagcgcctttggtgagcgcctgaagatcaccgggacggaggtcagcaagaagatgacggccggaatgagctccatgagcttcaagatgaaggagttgttccaggggcagactcccgctgataagattgttgaggacgccacctcggagaatctggacgggcctgattggaactcaaacttggagatttgcgacttgatcaacacagagaaagttaacagtgtggaacttatacatgggatcaagaagaggatcatgatgaaggatgcgagagttcagtacctctcattggtcctgcttgagactattgttaagaactgtgagaaggccttctcagaagttgcggccgaacgggttcttgatgagatggtcaggttgattgatgatcctcagaccgtggtgaataacaggaacaaggcccttatgctgattgaagcatggggagagtccggtgatgaactccgctatctgccagtctatgaggaaacgtacaaggctt

SEQ ID NO: 12618 - DNA, 574 bp, Zea Mays
tgtcaacactagcttagctggctagatcagagtgccgaagcaaagacttgatgaggccatcgagatcttggaatatgttgttggaatgcgcgaggagaagctaggtacggcaaacccagatgtcgacgacgagaagcggaggcttggggagctattgaaggaggctggccgggtgcgaagcagaaaggcaaagtccctggagaatctgctcgagaccaacccatatatcgccaccaagagaaatgcagttgctgcatgaatcactgttctgaagatgaaaggcgaggattgttactaaggtattcaattggttcgttcagatgggggtaacgggaatattggtgcttacctattaagaaaatatgaaatgatcaaatcactgatctcaaattctttgctgtaaagttttcaaatactattaccgttacatgtacagtgctcttttataccgttcttgagaaaacgagtggtgggtactgattctctttctctagctcaggtgcgagcttgcattcatcagttgtaccttggtttttattacattaaaaaaagttaatgccacggctaattcgat

SEQ ID NO: 12619 - DNA, 1488 bp, Zea Mays
gaagaatcccaacaaactaattagtgccatgtgcttcagggaaggtggaggctggactgaagaagtacaagccagacatcataattagtgtccatcccctcatgcaacacattcctctgtgggttctcaaatggcaaggcctacagaacagggtagtctttgtaactgtgatcacagacctcaacacatgccaccctacatggtttcatgctgatgtgaatagatgttactgcccttcagaagaagttgccaagcgggcagcactggatgatctacaaccatctcaaatccgcgtgttcggtcttccgattcgaccatctttctgccgtgcagttcttgttaaggatgatttgaggagggaacttgaattggatcctgagcttcctgcagtactgctcatgggaggtggagagggcatgggtcctgtcaaaaagactgccagagccctaggagaatcattgtttgacaaagagcttggaaaaccaattgggcagcttattgtcatttgtggccggaacaaaacgctaagctcctcactgcaggcagttgaatggaaaataccagtaaaggttaggggatttgaaacccaaatggagaagtggatgggagcttgtgattgcattataacaaaggctggaccaggtaccattgctgaagccttgataaggggtcttcctataatccttaatgacttcatacctggacaggaagttggcaacgtaccttatgttgtggacaatggtgcaggtgtgttctcgaaaagccccaaggaaactgctagtcttgttgcccgctggtttggtccagattcagaggaattgaaaaaaatgtcagaaaaggcactgaaattggcccaaccagaagctgtctttgacattgtcaaagacatgcatgagctctcccaggagcaaggtgtcatatcacagatatctagttccttgacttcatccttcttcttaccatcgcctgaaagcacccctctccaacttatctgaaaccatcaagctaggattgatattgttgacatcgtgaacttggcattgtccctacagtgtgggcgtgctttcggctgatccgctcacatggtagttatgggcagggtcgtttgactgacaggttctcgcgtgtgatgatgtttgccttcatgttaacttttgtaaaaaaaacattcattcatattatgtttctggctcccttcgtcatcaaaggggaattggtggtggtggtggcttgtaaaatacactcaaattttgtgcatggacatgtcagacccttatcatgtatactagctgatgtgatccgttcatgtaagtggaagatgtgtataatatgattacagattgttggagtggaaatttatctctctctctatctctatctgtttttagtttggtatatggtcggctgttgtacgagtattttggtggtgaactgaatgtgccttttgtcctgcactgcgctcttacagcaggcattgaatctctatct

SEQ ID NO: 12620 - DNA, 774 bp, Zea Mays
tccgccctcgccgatccgttcgttcgacggctggccatcgattccatggtgcagtttacggagttcatacagaagaacctccacctgtaccagttccgcaacaccatcccgctgtcaaccgccgctgccgccaacttcacacgcggcgagctcgccacagcccttcgtaagaatccatacatggtcaatgttattctcggtggttacgataaggatgttggcgcctcactgtactacatcgactacattgcgaccttgcacaagatcgacaagggcgcttttgggtacggatcgtatttctgcctgtctctgatggacaagctgtaccgcccggacatgaccgttgaggaagcggtagacctcgttgataagtgcattaaggagatccggctgcggctggttgtggcgccccagaacttcgtgatcaagatcgtcgacaaggacggggccagggagtacgcgaggcgtgaactcgtcggcgacagtgcacctgctgaagctgcagctacggttgccgcctgaggcatgaaacttgtttgtgttagttgtttgtttctcagcgaggctactatgtaatcaaatggatactggtgggggtcccacagctgttttttaatcaattttagcccagacatgtaattctgtttctgcactaattcatgtcttcgccgagtacaagttgacacggagtgtgtggcgcttgacattgctgtgcaccatttctgatcactgaaatgaacataaaatctgtgccaacgtccaacggtgcgcagc

SEQ ID NO: 12621 - DNA, 1078 bp, Zea Mays
catctatgtaggataaagcactgctgttgctacctgccagcctcaacgtgtcgccgcccctctcctcccacatgtggtgctcaagatgccatccccacaaatgaagctatgaagaagcaaatagttgtagcatcgaaggctatgcctttttactgcgctcttccaactttatctgaatatatgattgagagcggatggactcggagctacttcgatatcagcgaaattggtttttctatgtacctctgttatatggctatgtatctcatctttgtggagtttggaatttactggatgcacagagagttgcatgacataaaaccattatacaaatatctgcatgcaacccaccatatttacaacaaggagaataccttgtctccatttgctggacttgcatttcatccactggatggtgttctgcaagcaataccacatgtgttcgcgctcttcctctttccaacgcacttcaggacacatattgcactcttgttcctagaggctgtgtggacaacaaacatccacgactgcattcatggcaagatatggccagtcatgggtgctggatatcacaccattcaccatacgacataccgccacaactatggccactacaccatctggatggactggatgtttggtacgctcaatgagccagaagatatcctcaagaaggcttgagtttctcggagctgtggtattcctatggtgctggtgctggaactgctcgatctgttcccagtgtttctaatccgttgagcctgttcagcactgtctgtttatgtaggcatcagtgtgttaattagtttgctaggttcatatggctttgtgcttattctgtaatttagcgatgtttgtctcatgacgcaacggagttcaggacgaataaaactttgctagacacattctggattccagctgcttgtacaatgttgcaactcaactgtcaatataggatgtaaaacggattccttctagtcttgtacctgatgagttatttgtggtttctgtgcatgcattgctcagcctatgaatgttgcttatgttttgtggtcaagccaaatgaaggtcacatttg

SEQ ID NO: 12622 - DNA, 812 bp, Zea Mays
ctttacttttatggagaagatggggttgagagtaacgtaatagaagccagaaaaaactcaccgggaagaaggaaccagaagctaaccggcacgtcgtgaagctaaccgggattccgggaagcagagacgtccgcccgtcgcccgtcgtccgtcgtcatggccgccgtggaggtgtgcgtgaaggccgccacggggaagcccgacacgctcggcgactgcccgttctcgcagagggtgctgctcacgctggaggagaagaaggtcccctacgaggtgaagctcgtcgacctcgacaacaagcccgaatggtttctgaagatcagcccagagggtaaggtgcctgtgttcaacggtggtgatggcgaatgcattgctgattctgatgtaatcacccaaaccattgaggagaagttcccaactccatctctggtcactcctgtagaatatgcatcagtgggatcaaagattttcccagccttcatcacattcttgaagagcaaggatgctagtgatggttccgagaaggcgcttctggatgagctgcaggcactggatgagcatctcaaagctcatggcccctacatcaacggggagaacgtatcagcagctgatcttagcctggggccaaagctcttccacctccaggtcgcactggagcatttcaaaggctggaagatcccagaaaacctaaccaacgtccacgcctacaccaaggctcttttcagccgtgaatcttttgtcaagactaagccatccgaggagcacgtgattgcgggatgggcgcccaagaggttcggtgtggtagacctctt

SEQ ID NO: 12623 - DNA, 797 bp, Zea Mays
agctaaagaacgagcttaagcggttacaaagaaaagcttgttgatatcagggaagagattatgcgcaagcgcagagctgggaaacttcctggagatactgcatctgtgctgaaagcttggtggcaagctcattccaagtggccatacccaactgaagacgacaaggcacgactggtgcaggaaacgggattgcagctaaagcagattaacaactggttcatcaaccaacgcaaacggaactggcacagcaacccaacatcctcgggtgaaaagactaagaagaaaaggtgatattgatccagagcaatcttgacgatgctaaacgtccactgtgtactttatggcgaagtacattaccctccctccgtagccaggagcggagatgtgcatcttgggtggcccagtggtcacttaatgccccaagtttgaccacgttgtgggactggtgctagtagtgacctctgcagtatagtaatattcactaatgttgtgggaatcatgtggtgtataaccggcgaacgggagggagtaatttatgttttattgtaattgtctatctttaccttgtaatgatattttagggagaatcccaagatctcagaatggccgttcactgtattgtcggtggtaaaagtggtgggcaatcatcgtgttcagattacctccagaagggtatgcaatggctcgaatgttccatgtcgtgtttagctggttgtcgtttgtcttacttcctgctgagttggatacttgattccttcgaagatgtaaagcacccatcgatgcagattttgtcgttc

SEQ ID NO: 12624 - DNA, 981 bp, Zea Mays
aacctgattgcacacgatattttctaggcaaaaacctctcatgctaccttttgtttttcgccttcttccctataaataacggccaaattgcccacaaagaaaccacccacccgcgcgccgtgcctcggttttagggcccttccctcaccgccccgcggccatgaagctggaggtcatgcccaagcccaaacagcgggtgctggaggcgcagcagagggaggaggccatggagatgagcggcctggacctgtggaagcacgagaagccgccaaggatctgccccttgcccccgtcgctcccgccgccgccgccagcgttcgacgaggcggcgctcgtgccgccgctcaacttcgccgtggtcgacgacggcatcttccgctccggattcccagggaccgccaacttccggttcctcaagtccctcaacctccgctccatcgtgtacctgtgcccggagccgtacccggggacgaacacggagttcctagaaaagaatgggatcaggctccaccagttcggaatcgaggggcgcaaggaaccatttgtcaacatacccgacgacaaaataagggaggcgctcaaagttgtcttagacccaagaaaccaacctctgcttatccattgcaagagaggcaagcaccgaactggctgtgtggtcggatgcttgaggaagctgcaggaatggtgcttgtcttcagtcttggacgagtaccatcgctttgccgctgcgaaagcgaggatcactgaccagaggttcatggagctgttcgacgtttcaagcttgaagcacctgacaccctcacactgttaaccaaggcgtgtgatcgattggtcccccaactctagtacatctcaaagcctatcttccgtcagctactgaaccgattcagttgtgaataattttggaatccgctagagtccgtgaggtagtgatgaaaccattgcaaaacgtttgtgcttgaatggtttattttcctccac

SEQ ID NO: 12625 - DNA, 616 bp, Zea Mays
gaaacactttcaacaaaaaaaaaaaagaactaaaatcgttttctcctctttcaggctcctccacgtgccgatgtggtcaataatctgagaaacagtatcgtgcttaacgttgttggaatggctgctgcagttctgggcctgcaggcaactgtaggtgctttggtaggcaaggcactgactacctcattagtgccctactaccaggggataccacctggacagagtcccgttcttgctttagatatcttccttgttcaggcttcagccaacacgatcctttcgcatttccttgggctatccagctcactggagctactacggtctgtaacattgtctcaaacagaagctgccccagtgccaaaaacggcatgagcgagcccgcaaatcctcctgacctgaagagtatatcaccagttttgttgttgttctcatattgtagtccaatgcggatctattgtatccatggatctccgctcgttttgaactacatgagcttaaaacaatctaagcgtctgtttggttggactgggaaaaaagttattgtggtcgcgtgttctgaaaaaaactgttgtatgttgtaagctattaaaagactaaaaattatttggtagaaacc

SEQ ID NO: 12626 - DNA, 1662 bp, Zea Mays
ccgattcagatctcgcgcacagcacgcgagccgagggggacaaatagtaggatttccagagagacagaaacaaacggagacgcagagaaaccctttccacccagattcgttcggttcggttcggttccgaccacgcgggcgcgggagagagtggggagatgagcgcggctgcggaggacgcggctgcggccgaagggggatccggaggcgggagcagcggcgcggggtcgtcggaagggggcgcgcggcgccggttcgacgacaagggcctcgtcgcccgcacctcgctcatcctgtggcacacgcaccagaacgacgtcggcgccgtgcggaagctgctggaggaggacgccgcgctcgtcaacgcccgggactacgacagccgcacgccgctccacgtcgccgcgctccacggctggcacgacgtcgccgagtgcctcgtcgccaacggcgccgacgtcaacgcccaggaccgctggcagaacacgccactagctgatgcggagggcgcaaagaggcagcccatgattgagctgctcaaggagcacggtggattgacatatgggaaaactggaagccattttgaaccaaagacgattccaccacctctaacaaataaggctgactgggagattaacccacttgaattggacttcacaaaagcaactgttatcggaaagggctctttcggtgaaattctgaaagcaaattggcgaggaacacctattgctgtcaagcgcattcttccatccttatctgatgacaggctggtgatccaagattttaagcatgaagtcaacttgctaataaagctgagacatccaaatgttgtccagttccttggagcagttacagaaaccaagcctctaatgctaattactgagtttctacgaggaggtgatcttcatcaatatctgaaggacaaaggtgcactcaacccacttaccgctgttaattttgcactggatattgcaagaggaatggcatatcttcataatgagcctaatgttgtgattcaccgagatttaaaaccaagaaacattcttctggtgaattctgctgccaaccacttgaaggttggagacttcggccttagcaagatcatcaaagcgcagcatgcgaatgatgtatacaagatgactggagagacaggaagctatcggtacatggcccctgaagttttcaagcaccggaaatatgacaagaaagttgatatcttctcttttgccatgattctatatgagatgctggaaggtgattcacccttctccaactacgaaccttatgaggctgctaagtacgtggcagatgggcatcgtccggttttccgtaaaaatcataccactgagttgaaggatttggttgagctatgttggtctggggacatcagtctgaggccatctttcttggagatcctcaagaggcttgagaagctcaaggagcattattcacacgagaaccactggcatttgttccagtagcagtgcgtatatttttttactatgactgttgtcatgattggggatttctcgggagatctgacattgatgaatgtacaaaattgggtgcctctagaaaggtccactgagactgaaaatcttcttgctgttttacgtttatgctatttctggtaaaaaaaacagaagctttctttgtaaataa

SEQ ID NO: 12627 - DNA, 1273 bp, Zea Mays
attagatgcagtgatgctcctctcaaatcattactattctcattgggctataagcgtttcttcaaacgagttgccctggaaacatcagactatcttaaagatgattgccttttagtgaactgcaccgttggtgttgttcaatcacatactgaaggaccaaagatatacacaattccagtaccacggtccaacatggctctacatattggtcagctattgacaagtgggaagaggacagacattgcatttgaagttgatggagagatgtttcctgcccacaaggtgattctttcagcccggtctcctgtttttagggcgcaactttttggtccaatgaaggataaggacatgaagtgtataaagattgaagacatggaggctccagtattcaaggctttgctccatttcatgtactgggatgagttgccggatcttgaagagcttactggtgtaaatacaacttgggtatccaccttgatggctcaacatttacttgctgctgcagaccgttatgcattggagagattaaagttgctctgtgaacttaagctgtgtgaagatgttgcaataaacacagtggcaaatactttggcactggctgaacagcaccactgctatcagctaaaaactgtttgcttaaaatttgtggctctgcctgagaatttgaaagctgtcatgcaaaccgatgggtttgattatttgcagcaaagctgtccatccctcctgaccgagcttcttgaatatgtggccaagataggagagcactccgtgagcccctgcctgtattcaactgaagtccttgatggtggagatgccaatggacgacgcgtgaaaccaaggatctaacggctgcccagatgagcctagaagagggagttccttgtcttttttttttgttgttgttgtaaagtgattccaatgacgggcgccttctgtggtgccataatcatgcatgttgtagcgttggtttgtgtgtgttgtgatttccccagccccattgctgctactgtagagggactgatatacatcctactgactagactgcgttgctgctgcaaagcagcttttcatcatatgccaaggatggtctggtgcaaaggtttgatcaatatgttctgcagaagttttacctttcgctaggccagatttgtcgattcatggtcatctgtattgactgtattcaattgaaatgaaatgtatccgttgaacattcactttcatactgatccgttcatctgtcctacccttaaatctcaaataccttttacctgtg

SEQ ID NO: 12628 - DNA, 1281 bp, Zea Mays
caacaggccacctagtccaacgagccccattccaattcggcaattcccatttccccttcccaacaggccaaccccctctacctatctttttcctcagcaaccgtgctcggttcctcctccctcgaaacggctcccacccccgcgccgcgataagaaaacccaccaaaccctaaccctagcagcggtgccacaaccgcccgcgttcccggccggagaggaagccgagccagcaaggatgccgcccgggtcggcgacgcaatttcggtacacgcagacgccgtccaaggtgctgcatcttcggaacatgccatgggagtgcaccgaggaggagctcgtcgacctctgcaaacccttcggccgggtcgtaaacaccatgtgcaacgtcggcgctaaccgcaaccaggcattcgtcgagtttgcagatcaaaaccaggcaatttcaatggtgtcctattatgcttcatcttcagaacctgctcaagttcgtggtaaaactgtatatatccaatattcaaacaggcaagaaattactaacaataaaggcactggggattcttctggcaatgttctacttgtcacttttgaaggtgttcagcctaatgatgttaccatagaagttattcatttggttttttcggcatttgggtttgttcacaagatagctacttttgagaaagcagctggtttccaggcacttatccagtatactgatgccccaactgctcttgaagctaaaaactcattggatggaagaagcatcccaaaatatttacttccagaacatatcggtgcctgccacatgcgcataaccttttctgcgcataaggatttgaatatcaaatttcagtcgcatcgcagcagggattacaccaatccttaccttcctgtgaaccaaacagcaattgaggggattgtgcagcccacggtgggccctgatgggaaggtaaaggagcctgagagcaatgtacttttagcatcaattgagaacatgcaatatgctgtgacagtggatgttctgcacactgtgttttctgcttttggagctgttcaaaaaattgcaatgtttgagaagaatggtggaatgcaggctctaatccaatatccagagaggtgtcggagttcgtgaaggcttaaaatggacatctgcaactttccacagctataaagttgtttttaatataactaccgcagccgttgctaaacaagctttggagggacactgcatatatgatggtggttactgactaatgaataacgaattctgctcaattagtaaaaaaa

SEQ ID NO: 12629 - DNA, 1276 bp, Zea Mays
acgacgctttttctccatggtttggtgtgcatttcctctctcctgtccccacttgacacatccatgtcccaatctcccccaacctcagatcaaggagggggggagggggttaacttccaaggaaccagttcattgctggttctgctagcaggaggttggatttcagaggcagaagctttcagccaggcgggctcagggcgcgggcacatcaatggctggcaaggaaatcctccacaaggtgaaggacaaggtgaaagatgcatttagttcatcaggaccagaaacagggaaaggcaagacaaagttatcaggcaagcgtgtcaagcatggttaccatctggtgaagggcaaatctaatcatccaatggaggattatctagtggcagagtaccggcaagttggtgaacatgatttgggattgtttgctatattcgatggtcacctgggccacactgttccagactttttgagctcccatcttttcaataacatcttgagtgagccagaattcttgagtgatccagaaactgctatccgaaacgcataccaacttacggatcagaagatattggaaaacgcagcagagttgggaagaggtggctccacagctgttactgccatcttaataggaagtgacaagttcgtgaaactagttgttgcaaatgttggggattcacgggcagttattagcaagaacggtgtagcgaagcagctttcagttgaccatgaaccaaacatggagcgacaaacgatcgagcagaagggtggctttgtatcaaacctaccgggtgatgtgccacgtgttgatgggcagctggcagttgcaagggcatttggagaccggagcttgaagaagcacctcagctctgatccatatgtggtcgagcaaactatcgatgaaaatactgagtttttaattctagcaagtgatggcttgtggaaggtgatgtccaaccaggaggctgtcgacgagatcaaggattgcaaggacgcgcaggcagctgccaagcacctgacggagcaggccgtgaatcggaagagcaaagacgacatttcagttatcgtagtcaagttcatgtgctagcacatcgtcaggttaaatggtctcccgattgtataccgtgttaaattatcttttaagtcttgtgctcgctggtgtcggacattttgtttaccttctttggttttgggaccccacaaagagggtcaaggcttgtaacatattgttgtttgtttaaggctccaaataaagcatggtaccaccatagtaatttca

SEQ ID NO: 12630 - DNA, 289 bp, Zea Mays
acaaagaatgggcttgctactgtataagttggcagtaaaaagaattcccagaagaagatgaaattcaagaagtagtttctgaagaggagtctgctccagtgcctgctcatcaagtggatggagctatctaactaaaggttgggtagaaggatctagaacctcctcactgcaacaaaggtgatgagaagtactctaagtgttcctgtggctggagggcgtttccagttctgggggaggattagttaggcttgtgtataagctttggagggttcctaccttcctgctattg

SEQ ID NO: 12631 - DNA, 98 bp, Zea Mays
ccgtaggtgaaccggcggaaggatcattgccgtgacccttaaacaaaacagaccgcgaacgagtcacccgtgccgccgggctccggcccggcacgctg

SEQ ID NO: 12632 - DNA, 1684 bp, Zea Mays
tcttaatcagtgtcttctggtttctactccagcttatctcaagctatatcaccagggaatttcataggctacaggcaaaaagtaaaagacatagtgcaaggtgctctgtttccagaggttggtgtggataaaaggactggatctgctggtggaactggcgggcaagtagttgttcgagacattgaacttttctcctattgtgagtcatgcttgcttccattcagcatacagtgccatgtcgggtatgttccctcaggtggaagagtggttgggttaagcaagctttctagagtatctgatgtctttgccaagagattgcaaaaccctcaaagactagctaatgaaatctgtggtgcactgcatgctagcattcaacctgctggtgtggctgttgctctgcagtgctggcacattcctttaccagaaaacttggaatgcaagactttggaaggttggattagaacttcacattcatctcgctctggagtctttgaaggtgaaagcagcactttctggagtgacttcttggctcttgttaagcttaggggcatagacgtggaggctaaggaccgtactgtttctattccttggtgccctttaaggtctcatgaggttccactctctaacgggctctgcaagaaaaactcaactaatggcatggtttctgctgttacctcgatgctcttatcactcggagaggaccccctcaggaaagagcttttaggcactcctcagcgttatgtgcagtggctgatgaagttcaaagcatgtaatctactagacgtgaagctgaatggttttacacttagtaatgttagcttatatgagaggacaggtggaggcacaactgatcatggagcaatcagatcggagctgcacttgccattttgtgctcaatgtgaacaccatcttctgcccttctacggagtagttcacattgggtactttggcaatggaagcggagaaggcattgatcggtcgcattttcaggcgttggttcatttctacgggtgcaagcttcaggttcaagaaaggatgacaaggcagatagctgaagcggtttattcagtttcgcacaatggggccatggtcgttgttgaggccaaccacatttgcatgatctcaagggggatagagaaaataaggagcaacacggcaacaattgcagttttgggccagtttttggccgacccttctgccaaggcgtgcttcttacagaatgttttggattctgttggttctgcggtatgaatcgtatcgcaagcagcaaagaaaaaaatgtctagttggagtactatccagcaattgaaatttttagcaatctactggtctagcatgattcttctcgggtgcaaatttgtcacctgtgggactgtaccgaggatgtcacaagaaagcaccaaaagggttttggttctctcgtgttgtaccatgtcacttgtaaggcacttcaaataaaaaagaaatagtaatagttacaactgtgccaagaaggatatagtcattcgtacttttagatgttgtcaaaattgccatttgttcttgaaattttagtggagattactctggcttttgttgttgtaccgttgaatttgatgttacgccgatcgagatcagtaaaaaaaaaaaactcagatatctgttcgcttgaccatggtccaacgaaatgtaattcgttcttgca

SEQ ID NO: 12633 - DNA, 1009 bp, Zea Mays
cagcgagccacagtgaactcgtcgcgtgccccgccttatttaacgccctctccccgcagcagcagcggcacctccggacgaaatctgacccgggccaccgtcggcactgctctgacatggcgatccgctccaaggcctggatctcgctgctgctagcgctcgccgcggtgctctccgcccgggcggaggagcccgccgcggcggaggctgaggccgtgctcaccctcgacgtcgacagcttcgacgaggccgtcgccaagcaccccttcatggtcgtcgagttctacgccccatggtgtggacattgtaagaaccttgctccagagtacgagaatgcggccaaggaacttagcaagcatgacccaccgattgttctcgctaaggttgatgctaacgaggagaagaacaggccgcttgctaccaagtacgagatacaagggttcccaaccctcaagatcttcaggaaccaggggaagaacattcaggaatacaagggccctagggaggctgatggcattgtggattacttgaagaagcaggttggccctgcgtccaaggagatcaagtcagcagaaggtgtggccgcccattttgatgacaagaagatctatatcgttggaatcttcaaagaattcagtggcactgaatttacaaacttcatggagcttgctgagaagctgagttctgattatgactttggacacactttgcacgcaaaccacctcccacgtggtgatgcatctgtggaggggccattgatcaggctgctgaagccttttgatgaccttgttgttgacagcaaggattttgatgttgctgctctggagaagtttattgatgctagcagcacccctagagttgtcacttttgacaataatcctgacaaccacccatacctcatgaagttcttccaaagctcagctcccaagttgctactggacatcaactcaatttgatcgcaagctaccatggctgcatctagctagctttggtgtgccatgttaattgt

SEQ ID NO: 12634 - DNA, 974 bp, Zea Mays
gagcgcgtccacccccttcctcctccgatcgagccagggccaggcaacctggtgctccgcccctcgccgttaccgcgacgcttcggcctctggctccaccgcctgcctccctggctctgtgaccgtgacgagacacgtcgccgagaggccaccccgcttgggattgtgaggtaaagcgtgatggcagcgccaccggcgagggcccgagccgactacgactacctcatcaaactgctcctcatcggtgacagcgcattgacttcaagataaggactgtcgagttggatggcaaacggattaagttgcagatctgggacactgcaggccaagaacgtttccgcacgattactactgcttactacaggggagcaatgggcatcttgcttgtgtacgatgtcacagacgagtcatctttcaataacataagaaattggatcagaaacattgagcaacatgcttcggataacgtgaacaaaattctggtggggaataaagctgatatggatgaaagcaaacgggctgtgcccacttcgaaggggcaagctctcgctgacgaatacgggataaagttttttgaaacgagtgcaaagacaaacctgaatgtcgagcaggttttcttttccatagcaagggacatcaaacagagactttcggagaccgattccaagcctgaggatcgaactatcaagatcaaggctgaaggggaagctgaggcagcggcggcggcgcagaattcagcttgctgtggctcctgagcacttgtcaccgcaagatagtggcgttctcgcgcatgtaattttcatcgtttcattctttgccagcgactctctccttgtgcttcttgagctatcgcagttgctgtggcctggacaaatgggtgttaactgttaagtcagagcagttacttgctgtattgtgggaactctacccatggtgttctatggttttgtataaaaagaaccccgcaattattg

SEQ ID NO: 12635 - DNA, 1202 bp, Zea Mays
cctgccatcactaccctgcaccagatcggtacagggcacccaagatgcccgacgaccggcgcgccgaaagagagggagagccaagccgcctcccgccgcgacgcacgatggatcgcgcgcagttgctcctcgtcggactcccggccttgctcttcttctccgacctcactcacatcttcgcgccgccgcctccccacctccgccacccccatcaccaccctcctcaccaccaacatccgcatccgccgcatcatccccactcgcctcatccccatccgcacccgccgcatcatccccacccgcacccgccgcaccaccaccagcaccccgacccctccacggcaatcatacaggagccacgtgtggatgaggctggattcggcagcacagtggagctgcaattctgtgcctcctgctcgtacaagggaactgcagtgaccatgaagcgcatgctggaaacctcatttcctggcattcatgttatcttgcataattatcctcctccattccccaagcgtgtactcagcaaagttatcccaattgttcaagttggagccgttgcaacaataatggctggtgaccagattttccccagaattggaatggttgctcctccatggtactactcgcttcgtgccaatagattcggaaccatggcaacaatctggctatttggcaactttgctcagtcctttctacaaagctctggtgcctttgaagtttactgcaatggagatttggtattctcaaaacttgctgagcagaggttccctagcgagttcgagttgcgggaccttgttggcagcagattgcctgggtctccatttgggaggaatccggggaaaaccctgacttgatgatgaccccggaaatcagagctcagaatgccacaatttattatgttgcttttaaggtattagtagatagtaactatttggtattgatctatcgaggctgcagcttgtctgtaaacacaactttccagcttgtataatggatcaacggatcacctgacatgtgacggtggccgaagtactacgaactctaatgacattggaacggtaaagatattgtgatggcctgttagtttatgggaggtgtactgtttggcattgatctcgatgtaaacaaacaatgttagcattgtcccatggggaagattaagcgagcaggatgttaaagatacaatcattggcatcaag

SEQ ID NO: 12636 - DNA, 753 bp, Zea Mays
accgaacgttgcaggtgcctagttcattccgacgttaaagtagcccctacatcggacttcaaggacagtagcaaatctgaaacttggaggatcaagatgctctacgacggtgattgccctctctgtatgcgtgaggtaaacatgctaagagaaagaaacaaatcctatggagcaataaagtttgttgacataagctcgaaagattactctccagatgacaatcagggccttgattatgaaacttccatggggaggatacatgcggttctttcagatggaactgttgtcacagacgttgaggcatttagaaaactgtacgaggaagtaggacttggatgggtttatgctgttactaagtatgagcctgtagctagcatggcaaatgcagtatatggtttgtgggcaaaataccgtatgcaaattacaggtcgacctccgctagaagagatcatggcatcccgaagagctgcaggcgaatgtaaagatgacaaagtatgcaagatgtgagcataaagatgttatactgtgctacatacctcgcctctagccatgctttatataggctaaggctcgtatatatggctttaacagtacaaataatcgcagttgtattagaaaaaaaaaggtgaatagcttatgtaatggtttatcaaagtacatatgattgtacatttgtatgtacactgtactggttcacgcatgtaaaaacgatccaccacagatcgagctgactcacattgtctgttctaccaa

SEQ ID NO: 12637 - DNA, 1181 bp, Zea Mays
cactggataaactgtatccagttgtctataagactggacctggtctgtgggttgtaatccctcagctgtgacttctgaaggttcacaactttcagagttccagcaagatgtgattgctcgtaactatattattacttcagtggaggaatccattcaagtaatcaattcagcaattcagcaattggtaatagagcggactactgaaaaaggcttcaaaattttcaaggctcacgaaagtaagatggttgagaagtacaatgccgttgttagcttgtggagaagagtatcggctatgtccaagggattgcgatatggtgatgcagtaaaacttatgtcaatgcttgaggatgcttcaaatgggttttctagtgctgtgaactccaccatttcaagtctgcaccctgtccaatgcacccgcgaaaggaaggtcgacgtgcagctagacttgacaacacttcctgcttttctagctgtatttttgttgctttggtttcttctacgtccaaggagaccgaagcctaagatcaactgaacaccgagccaatgagcagcataggccatagagtttttgtgaatacgcgcatggattacagatggcgctggagcatggcccgggaattccaaaggtccaaaacaccgggtggcagggaacaaggtttcagaagattgcaatcctgacacatccccaagttgtagcagagttggaatgtcatgaaaactttaattcattcagtcctgtcctcgttccgggtttagccaattcttcctcgttccgggtaaggccttgttcgtttgtgtcggattggtgggtcggaacaattcccggccggattgcttctctaatttatataaactttgattagccggaacgattccgggtgcaatccgacgcaaacgaacaagccctaactgagattaatttgtccttgctgtaatgtttagccagtcctgccccgatccggggaactgagagattgtctttatcgcaacattaacggctagcggttagtatcatcttccagtcacctggaatgttactagtacaatccaattgtctgtttcctgccgcttacatgtaaaagtccatactcaagttttacagaaagaaacatgttctgtcatttattacaaaataaagccaaatagtaaaatgttatgtgtacgtagggacagtatgatta

SEQ ID NO: 12638 - DNA, 1271 bp, Zea Mays
caaagacaatcaattaattgtcgtgttggccagccaccaaatactgaaaacgatgatggtgtcacagcattgttatctgctgttgctgcaggttccctcccatgcttggaggtcctaattgaggctggtgcaaacccaaatgtcaaggctggtggagcaaccccattgcatattgctgcagatagtggaaatatagaagtcatcaaatgtttgcttaaagctggagctgacccaaatacctgtgatgatgatgaattgaagccagttcaggttgctgcttggagaaataaccgtgaagctgttgaacttcttttaccgttaacatccccaattccaggtgtttcaaactggaacgtagatgggattatagaacacatgctccctaaagagtatgaggaaaagtctcaactgaaggaagcggcatctctgaaatcaggcctaacacaaactattgaggtgtcatctgaagcaaaaaagaggtccttggaagccaaatcaagaggtgatgatgccttcagaagaaaggactaccttgtagcggtggatgcttatacgcaggctacagagttggacccaactgatgcaacagtgctctcaaacagaagcctgtgctggctgcgggcagggcaagctgagcgtgctctggaggacgccaaagcatgccgtgcattgagaccagattgggcgaaagcctgctacagggaaggtgcggcgcatcgtctgttacagaggtttgaggaagccgcaaacgccttctatgagggggtgcagcttgagccggagaacacggagctcgtcaacgcattcagggaggccatcgaagccgggaggaagttccatggcgtcaacacgccaaactcaacacaatgagactttgctgtttggttggataggtagatgatgaagcggatggacatgaacgttgtcttagttggaagttggtgagatgatgaatgagatgataatgaaatttgaaagagcgaatttgcagatttattttgtgttttgtgattgttttcttaaacttgttttcttgcgtcgtcccggactcccggtccatgtgtgctctttcttgaattgcattttaatcagtgttagggtctgggtgatttagctgggaaagggagaagatatgctagggctatggaaaacagatcgtgcatatggtgatgatgcaaaacgatgtttacagtgtgaagtttaaaataggagatgtgaataagtaagctattggagacaatattatagagactatttgagacacctttttc

SEQ ID NO: 12639 - DNA, 1372 bp, Zea Mays
gaagcaacaccgagcacgagggcattcgacgacgacttcctctctctcacgctagagacgcgcagtcgcgcagagtcctggctttttgcccctttccggctttgccccccttccccccaaaccacaccgatcccaatcccgccgtatccggcgaacgcgcgccgcggccatgtgcagctgctgagagaaggagcgagcgcaacgacgccactggccatggacgagggctattccaacctccccaccagccacctcctcggctccgtccccgctgtgacacaagatgacaggaaattgggtccccccgccgcccaagttgcagatgcagctgccacctctcggttgcaggagttcccacctggaggtggtaatgttggagggtatcggccaccaggtggccctgcagatggagatgttgaaaaccaagcagattggaaaggatacttcaatgttgcatcttatgctccatacttcaatgttgatactgatgttgtagttgacaggctcatcagttcagtttatccaatggatggtttttacaggaaaattgatgctaatcctgacatgtatgggcctttatggatcaccactactctgattttcatgcttgctgtgtttggtaactatgccacttatctggtgcaaactaaaaaggatatggacatatggaactttgatgttggttatttcagttgggcagcatcagtcatgtatagttatgctatcattgtgcccgtcgtgttctttttcctgtttcagtattttggatcacgcccaagtcttgttcgattttggtgtatgtggggctattctctgtttatcttcatacctgcatctgtacttttgcttattcctgtgggatttcttcaatgggtcatcatagctcttgctggtggtgcatcatcttggttcatcactttaaatttgaaggaatgcactgaaggagctgatctaatggttctgatggctagtgcatcagtgctgcaatttgctctggcactgttcatcaaagtttactttttcgcctgaggtttgcttgatgattttgcaaaggtgacctgatgcgccctttgcccacggcttgttctggaatacatcttttgaaagggcatggcagaccagttctactcgacatcgtgacatacgtactgaccctagattgttatgctttgggcgttcttcatttgaagtgtctaatctgcaagtctctatctagctagggaacagaattttacagcgtgccgtacagagtaccgagtttaggcaccaaagtctttccacgttgttcagtgaaagcccttcacttggatttgcatacaatcctttcttgggtaaagatctccagtgtgtatttgtgtgctaaaaaaagaaa

SEQ ID NO: 12640 - DNA, 76 bp, Zea Mays
ggctggatcaagggggagcacatgaagaacaggataaggaggaagatgtgttacaagttcctccaactcaagttcg

SEQ ID NO: 12641 - DNA, 223 bp, Zea Mays
taattattcttaggtatgtgactttggcctttcaagactgaaagctaacactttcctgtcttccaagtctttggctggaactcctgaatggatggcacctgaagtgcttcgagatgaaccatccaatgagaaatctgatgtctatagcttcggtgttatcctatgggaactaatgacactgcaacaaccatggtgtaacctgaatcctgcccagttttgtata

SEQ ID NO: 12642 - DNA, 1618 bp, Zea Mays
atcactccattcatcgccggagtcccgaccaaattatccacacacgcgcctcgcctcccactcccccgaactcacacgccgcggcggagcaccaccgcggccgcccaccatgacctccgcctccaccttcctctctctgcgcctgcccactccctcccacgccacttcgtccctttccttccccccgtctctgctccggcaggcgcgtggcggtgtggcgtcctcgacgctggtggcgcgggcggcagggccaacgggagcggcgggagctccatcgccgctattcaacccccggggagacccgttcctgtctaccctcgcagccgcctcaccggaggaccttgcggccgccgctggtggcgagcgccgtggagaggaccacctgccgttcctcgagatcttccagaacaccaaactcatggcctcgcccgcgcaggtggaacggtctagcagctcgtatagtcagcacagacctagaaggcctcctccagatttgccttcattgcttcttcacggccgaatcgtttatattggcatgccgttggtaccagcagtgactgagctcattgttgcccagttgatgtaccttgaatggatgaacagtaaagaacctgtttatatatacatcaactcaactggaacggctcgcgatgatggtgaaccggtcgggatggagagcgaaggttttgcaatctatgatgcaatgatgcgtatgaaaactgagatccacacactttgtataggagctgcagcaggccatgcatgtcttgtgcttgcagctggaaaaaaaggcaaacgttatatgttccctcatgccaaagctatgattcagcaaccacgtattccttcttatgggatgatgcaagcatcagatgttgttattcgtgcaaaggaggttgtgcacaacaggaacacattggtcaaacttttagcaaggcatactggaaatccaccagagaaaatagacaaggtaatgagaggaccattttacatggactccttgaaggcaaaggagtttggagtcattgacaagatcctttggcgcggtcaggagaagtacatggctgacatgctctccccagatgagtgggacaaagttgccggagtcagacatcctgatctaatgtaatgttattcattgaaagttcaacatttggttaggttaatagcttccagggggcagaaacaggtgacgctgaacaataatgcttgattatcaatgataatggttggtaagagccaaggagtacttgtttaactaggtaaacttagagctcagggctgggggctgcgccaccaagatgttgttaatggtctctggatgagagcaggcacgtgtttctcatgaattatcgttgttccccacatcagttctagtccagattttggtatttattagtatatagtccacacattttgatagacccagtggttgaactagccaagttcatattgttatcagcacgaagcgcgatgataatatgatatgttgtccttgaaatttccatggctactgcgcccttgtccttgtgttctggacgttggaaatcctatgtatggatcatatggttttcaaccatcaaatcaaaggactcagctgtttcttgatgggtgatgg

SEQ ID NO: 12643 - DNA, 76 bp, Zea Mays
ggaccgtctgtgtctatgatttatgggtccgatggcatattggcgaagcccacaaatgataatggcaaaattgcca

SEQ ID NO: 12644 - DNA, 76 bp, Zea Mays
tggagctgcacaacctcagtcccaactccatctcgcaagccgccatcttcgtgggggtttgtgaaggatacttggg

SEQ ID NO: 12645 - DNA, 504 bp, Zea Mays
aggcaacttgaaatcattgcttgaaataaagtctgtacatgtatttgaggttatgcaaccgaaacatacaaattggcagatttgaacgcggaggctcaagaatctggagatgatgaagatgataatgtgtgggaagagggttaatgctgaaaagataactggcgacccctgctccctctcgaattttgaactggtatcccgtcacacgggtcaaaattatttcactgatgagcctgattatgttgaacgcatgatcacaagaaatttttagttgaagatgtacaaaatatacttatatttgagtagcgggttaacatttttctctgttacttaaatatttgagtagcgggttaatatttgatgtgtgggggcaacttacacgcctctgtttatctgaaaggaatcagagtgaaaaatgacagatccaaacttctatacgtacatgcacgtttatgtcctgaaagtgaaattgcaatctttcgatacccacgtttgacatatagt

SEQ ID NO: 12646 - DNA, 127 bp, Zea Mays
tgatattgacagcatgtgacagcagttgcctgaggcagcccagaagcctgcatattactggccatcaagccaccatcaaaataccagcaaagagtaggaagagcacctccagagatcacagctgtaa

SEQ ID NO: 12647 - DNA, 113 bp, Zea Mays
cttaaattcttccaatgtgaagttgacaaaccgaacgccccaccatggttctattgctaaatctgcaggttctgctggcagcaactctttggcaattgatttgttcagtttcc

SEQ ID NO: 12648 - DNA, 1194 bp, Zea Mays
acgttctctgcacgttcatgttcgtcgtcacctccggattccccgaaatagacaaattcgcccacaccacaccctccgccgctgcacgcctccacgcctcgcccacccataggccatagccgggcccagggtgtgggagggagcaatggtcgctgggatggaggcggaggaaggggtgatggcgacggacttcttctggtcgtacacggacgagccgcacgcgtcgcgccgccgggagatcctggccaagtacccgcagatcaaggagctcttcggcccggatccgtgggccttcctcaagattggtttggtcgtgtcgcttcagctatggactgctacattcctccgtgacgccagctggctgaagctactgacggtgtcctacttcttcgggtcgtttctaaaccacaacctgttcctggccatccacgagctgagccacaaccttgccttcgcgaccccatccctgaaccgctggctgggcatcttcgcgaacctccccatcggtgtgcccatgtccatcacgttccagaagtaccacctggagcaccaccggttccagggcgtggacggcgtggacatggacatcccgagccaggcggaggcgcgcgccgtgaggagcgccgccggcaagtccgcgtgggtcgtgctccagctcttcttctacgctctgcggccgctgttcctgaagccgaagcctccgggcctgtgggagctgaccaacctggcggcccaggtcggcctcgacgccgggctcgtgtacctgtgcggctggaggtcgctggcctaccttgtcctctccacgttcgtcggcggcggcatgcaccccatggcgggccacttcatctcggagcactacgtgttcagccccgagcaggagacctactcgtactacgggcccctgaacctggtggcgtggcacgtggggtaccacaacgagcaccacgacttccccaggatcccgggcacccggctgcacagggtgaaggagatggcgccggagtactacgacggcctcgagtcgtacaggtcctggagccaggtcatttacatgtacatcatggaccggacggtcggcccgttcagccggatgaagaggaaggcgcagaagaaagactcgtagtcgccgtgtgctcaatttgttttttttttgagaagaatgaaatatgcatttcacctccgtgtctcatcata

SEQ ID NO: 12649 - DNA, 220 bp, Zea Mays
cccccgcgattattccaagctccccgagcccatggccgcaatggctccagctgccgtgtcgttcctggcgatggcgctgctgttgctcagtgacgcggaggccaagttcctgcccaacaacatcaccgtcgttggctccgtctactgcgacgcctgctccaacaataccttctccaagcacagcttcttcctgaaagatgacttcggagctcatttgcca

SEQ ID NO: 12650 - DNA, 758 bp, Zea Mays
atatcggatttaaaatgtgcacaaaacctctgaggaagaaaaaaaaaaggtccctcgttcagttgttcctcaacctacctacgccgctccgcgctcgaccgcctttgcctgccttcccattccccccgtctcctcttcccttccgccatggcccagcccgctttcctctcctctctccgctcccgcctcggctccgcgccgccgcccccgccgaaccatcgcctccagcccaggcgcggctaccacgtcgagcttggggctcgcgaaaaagcgcttttggaggaggatgttgctttgaagaggttcaaatcatacaaaaacagtgtgaaacaggtctccaagatcgggaatgctctcactttagctgttgtacttgcttgcagctacgagcttgctgtgttggcgactagcacaaaatgaaggaaaactcagtcatgtggcggcacggttattccgggaagtgatccatcagcatgaactggcactctctctcttcgtgtttttttagccccgtttgttgatcactcgtaccgtgtaaaataaaataaactaggttaaccttgattggcaaataatgtctctgtttttatggcctagttgcaaacaaagtgagagaagcattccgtggtgaatcgtgaagaatgaacgccgcctgctttgtttaccacctgggagtgtatcctgctgcacattgaccgggtggatttgtgttcgagcgccttctgccgtctcgtctgtcgcggacaggataccgtgta

SEQ ID NO: 12651 - DNA, 678 bp, Zea Mays
agcctattccaatttgcttgggactaaaaggctgtgctgttgggttgaagttggtgatgcccatgctgtagacggtgagggtgctggtgaggaagatggtgatattttggatggccaagatgcactgcctgatgtgccaatgacaccttctggaagcgagtttggagcggaacaggaagatgaggacgatgatgattcagagaggcgaaaccaatcaatcagcaagaagctatggtcattcttcactacatgacttgctgaagaggtcgtcatgtaggttatttctagcttttgtggtttcgattcatgataccccattcttggaactgtaggtcgtgtgcttttggtgattatgtactagatctcccacttgattgtgcttctctcccgtgtaattgaaatatatttgtagtggacatagtttgatggcactcacagaagtagctgatgagatgtacaatggcgatgatggtatgccctgtaaggctgtaacaccagtagcttggtttgtaattgttcttttcccccggttcgtgttacttcgttgaccttattccggggaaatattttagtgctgtgatgatggtctaaatgtttgttcgcctattgaaactaaatacaatgaattagaataccacagtccacaggagcttcggagacttccatcgtcaagattcc

SEQ ID NO: 12652 - DNA, 114 bp, Zea Mays
gacctggttgcgtggtggtcgcgctgatccatgtcggagcacattgcctggggcgaaggcaccgcaggcggcagtttgtcacatgcccttgcggttggttgctctggaattggc

SEQ ID NO: 12653 - DNA, 1969 bp, Zea Mays
gaaggcgacgcagtggccgtacagtagtgtcacctgcacattgcagaccgcctcagcgcctcaccaagcgaaactcgttggcggctagggttttgctgcctcccgagcccaaaccctagagcacccgcgcccatcccatggcgtgctaggcttcgattgagactggggggattagtaccgcaggctgggattagagcaagcgccgagcggaaatggcatcgagtaaccaattcgatctacttggagacgtcgagaacgacgaccctgcccacctcctcgcagctgccgagaagaaggcggccgcggtggcaggactggcccgaggcgagattttggcgatgctgatgcccacggctttgagggggggtatggtggcggcggcggcggttttggggacggtggagttgctcgcggtgaaaatggtgagggtaggcaggcagagaggggccgtgggccccgccagccttaccgtggaggtgggcgacgtggtgggtacagcgatgggcaggctgggaatgagtttggacgtcctcgccgggcatatgagcgccacagcggcacaggccgtggctacgggatgaagcgtgaaggggctgggcgtggaaattggggaactgcaactgatgaaggccttgaacaggacactgtggatgctgttaatcctgaggagactactgccgtggtggaggatgagaagaaacctgaagatgcaccacagtctgaggttgagaaggacaaggagggcgcggagaatgaagaagaagaaaaggaacctgaggataaggagatgactttggaggaatatgaaaaggtactggaggaaaaacgaaaagctttactctcccttaaggctgaggagagaaaagttgaaattgacaaggagctacaggccatgcaacaactgtcagttaaaaaggatggcgatgaagtgtttatcaagctgggctctgacaaggacttgaaaaagaaagaaagtgctgaaagagaagaacggggcaagaagtccctgagcatcaacgagttcttgaagccagctgaaggcgaaaggtactataaccctagtggccgtggccgtggtaggggccgtggggggttccgtggtggttacaacggcggttatcggggaccagctgctgctccagcgatcgaagaccaggctcagttccctgccctggcctaagcacagctcgtgttctcgctcaagattgtgtcacttttgcggagtgcgtcagtcagtcctagtgttgttgctcccaagcttgctttccggattatgtgtatccaacattttctgatattatgtactggtgtgctcgtgattgcatggttttgctaagctcagctgaggggtgtcgtgttctgtttgcctggctgatggctgttgacagacttgtcacacatccttcgagcctgaccggtctccagatttatttacttttttcctcggatcagtcatgggaggaaatagtacaccattctttgcattagccattgagttgattacatcgttattttgtcagccatgtgcatatctagaggctaacatgttctttgatgtcgtcgagacggcggtccatgatctccgagacagcctgcaagaagacagtctcgcatcctcctccccgttccgccgcctcacggacgatctcttcgatggcggactccttggtcagggtctctctgcacatgatgctcccgatgtggaaggcggtgaggcccctctccacacccttcttcagcagcatggtggcgacgcgcagcgtgcgcgcgcactcgcgcgacacctcccacccgtggagcctcagcatagtcacgtcctcctccgcgtccagggaccgcacgtactccaccgtctcgtcgctgaagggctcccggcactgaggccagtagagccactcgaaagtgcagtcctcgaactgcatgccaggtcactccaagatgaagagaagtgggaacaaaaaatgaaaaa

SEQ ID NO: 12654 - DNA, 1602 bp, Zea Mays
ctcgcgatccgtgagaaagcgtctaatcaattcaaatgttgtgaaagaagatgacccaacaaacaacgtgccagacactatctttgcgaagattggcctgcagctgcacaggagggagaaccatccccttgggattctgaagaacacaatttatgattactttgacaagaacttcactggacagtttgacaagtttgatgacctttgcccccttgtttctgtcaagcagaattttgatgatgtcttggtcccttctgaccatgtaagccggagttacaatgacacatattatgttgatgatcaaacagtcttaaggtgtcataccagtgctcatcaagctgagctgctaagggatggacgtacacactttcttgtaactggagatgtttaccgtagggattccattgattcaactcactatcctgtcttccatcagatggaagggttccgtgtgttctctcctgatgaatggtcaggttctggcttggatgggacagcatatgcagctgcagaactcaagaaaacactggaaggattggcaagacatctatttggtgctgtagagatgcgatgggttgacacatacttcccatttaccaacccatcctttgagctcgaaatatattttcaggatgattggttagaggttttgggctgtggagttaccgagcaggaaattttgaaaagaaatggcaggagagatcatgtggcatgggcctttggattgggattggagcgtcttgcgatggtccttttcgacattccagatattcgactattctggtcgaatgataaacggttcacgtcccagttctcagaaggcaagcttggtgtcaagttcaagccattttcaaagtttcctccttgttacaaagatatgagtttctggatcaatggtgcatttacagaaaacaacttatgtgaggttgtcagaggaatagccggggatcttgttgaggaggtaaaacttattgataatttcaccaacaagaaaggcatgacaagtcattgctacagaatagcatataggtcaatggaacgttcgctcacagacgaggagattaacaatcttcagttgaatgtcagggaagctgtgaaagataaattgaaagtagagttgagatagcagcagctaattatgctgtcatagcatggactaaattttgcctgtctttatgtaaatcaattaaaaaggattttttatctatcgagaaaatgcgccatttgttcctggcattgatcacgttctcttctgtttagggaagagaaaaggtccctgttccatttgggaatcatatcttgtaattcataaggctttgtttggttgcacagggatcaaaggagattgaggaggattaaatccctctctattcaattttgactaggtagagatttaatcccctctaacctccttttaatccccttgtaaccgaacaagccctaagatgatgagctgtacacttctcactattttggaggacatgtggtttgggaattcatgtttggcctttcaattcaattttggccgttgtacattatttgtaacgaacaagtaaaagcactctgtatataaagtctaggatggttcaaatctgaaattaa

SEQ ID NO: 12655 - DNA, 712 bp, Zea Mays
cccaacagctgctgctgggttgacagcagtggcccctttttcagcatttgcaagctctcctcgaagcctctcaatctcactagccacagcaatcatatttttctccattgctttactttgttcgaggttatcagagtgtgccttcttttcaaaatcaaccgcagctctgccgttctggatctcccggcgcatggtttcaatctggggacggacggaatcggtcttactcgcctcagccttcttgtgcgcgagcttctcccgtaggacctggagcctgttgacgaggtcggtgcgcgccgcggcgagcacctggacgtcggcgtggacctggtcgatctccgcgcgcgcagcggcgatggcccgcgcctcagcctccatatgcgccgcctggtcggccagggagcgcacctcgccctcccgctcggcgcgcgccctggtggcggcgacggagaccgcccggagctcgtgttgcgccgctatgagctgctgctggagtgcgacgtgggtggcagcgaaccgctggttgtcgacgaggagctcctggatatcctggtcccgggcggcgaggcgctcctcgatgagggcgaaggccgggtgcgccgcggaggcgcgcaggtgctgcgcgaggaggccctcatcgcgcgaggacgcggggacggcggccggcgcggcccccggcgcccgtccgaggaggggcgggttgggatcgtga

SEQ ID NO: 12656 - DNA, 950 bp, Zea Mays
gtattgttagccctttacttttgtcagatatagaaagagaacttgtgcctttatggtttgccaaatgagacttgggaggttactcttccagctgaggaagtacctcctgagcttccagaaccagcactgggcataaactttgcccgtgatggaatggttgaaaaagactggttgtctctagttgcagttcatagtgatgcgtggctcctgtctgttgcattctactttggagctcgctttggatttgataaagatgcaaggagaaggctcttcaccatgattaataacctgcccactgtttatgaagttgtgaccggggttgctaagaagcaatcaaaagcccccaacggcagcagcaaaagcagcaaatctaactctaaaatcaattctaacagtaagcctgtgaagccagcccacccaaacgaagaggaggatagcggccgtgaggacgcagaggaggaccaggcgtacctgtgtgggtcctgtggggaaagctatgcgaatggggagttctggatctgctgcgatatctgcgagaagtggttccatggcaagtgtgtccgcatcacccctgcaaaggcagagcacatcaagcagtacaagtgtcccagctgcagcaccaagcggagccgggaatgacaggcgccctggggcaggactcgctcccacttgacgaagcatttagaatcattaggagcagtgaaagtgtgaaactgtgtcattagaatcacttcctctgtttagtggaccagtgcgtgtgctggctgttgtatttttctcgtcgtgtgttgtacactggtagtaatggacatggtagctagtggtgacgtgttgtgttagcaagcaggctgactgttgtcatcgtagagtcggatgaactgctggagtttggaaacacatgttcagtaattcagtgatgtttagcgtgtatgataattttcttcggcttg

SEQ ID NO: 12657 - DNA, 76 bp, Zea Mays
actatctagaccctatacaaaggcatgtcttttatctcgtaatcatgcagtacatgacagatgtgtgctagtgtaa

SEQ ID NO: 12658 - DNA, 430 bp, Zea Mays
aaaatttcagcactcatccgcctcgtgaaaggcagagcacgcgcaaaagccaccaccgcgtcgtcgtctccaagcaagcgaagagcgcctcccctccccctcgagatcttctctccctccccgcgccgctatggacgctgttgactcggtggtcgacccgctccgcgagttcgccaaggacagcatccgcctcgtcaagcgctgccacaagcccgaccgcaaggagttcaccaaggtcgccgcgcgcactgcgatcggcttcatcgtcatgggattcgtcggcttctttgtcaagctcatcttcatccccatcaacaacatcatcgtcggctccggctgatccatgcccctcagttcgatgcttccttctattccctcctcccaagtccgaacgagtgtaagtatgtaacaaaacgatgctgggtttatg

SEQ ID NO: 12659 - DNA, 150 bp, Zea Mays
cagcacctgacgattcgattgggttgtgagagagaaagacgctccgccagggtggatttcgagctcggatcaccctcgggtctcggatggtgttccctggggagcacgcgcgtggatctgccggcagtagtgtcggctggcaactcaccg

SEQ ID NO: 12660 - DNA, 837 bp, Zea Mays
atacgcacccaccctccgccgccgtttttctctccccatctcgcccgccgttttcgtccttatcgatctcctcgcacctcgtggcggcacctctccccttcgatccaccaagggtttaggatcggcggcgatggcggcgaggctggcacagctgcgcgctcaggcggtgcaggcggcggagttcgcctcgaagcacggcggctcctactacaaggagctcatggagaagaacaagcagtacgtcgtgcagccccccaccatcgagaaatgccaggagctctccaagcagctcttctacacccgcctcgcaaggtcggtatgagtcattctggaaggagcttgatggtgtcaagcaggtatggaagaacaggaaggacctcaaggttgaggaccttgggattgcgactttatttggagttgagctttatgcatggttctgcgtaggcgagattgttggcagaggtttcaccttaaccggctataaggtctagttgatttccagtgatttaagacctgctttataaatcgacactttagctgatgcttgtcgaaacgacgatgatacctgccttccttcacaattttgtttcttgtaagagtctacctagtgctgaatgccagcaaagacgggcacatggttgcaacattgcctcaataatttgcccgcgcaattcttgattttgatgcatgtaattctttgtcagttgcatgtgctgcagtccctgcgtgcagactcatttcgtgtctttcgttctgcccacaaaataaattctttctgcgttacatatgatcgttttggatgaactgaacaaccaattgctgagtgtgtgaacggat

SEQ ID NO: 12661 - DNA, 1095 bp, Zea Mays
tgttcagccagctactcctttgctttgctgaataaccataccaaacacgcccatattaatacccgctcggcggtggttctgcaatcaaacgcaggccgcagtcgcgtgcggaactagagctccttcagagaagtgccgtgccagtgccaccgccggccgcatcatcgttccgcccccctgagtgttcagtaacttcttccgatccatattatggcttcaaagcagcagcagaaacagttcctggatgaagccatgatcaagcagccgacaccggaggaggaccgtgagggcgcatggccctcagtgctgacgatcatcggctttggattcctaaccttcaactcattcatggctgtgtacaggtcaaatggagatgttggatctatctcctttgtggtcttctcttacctggtcctcgttctgctgttctactgcctgcgccgattcgagacaactccaccagagtcgcctagccgggagcacataaaaatggccgtgtgggtactcaccacgatgctcactgctgcgttctcatacaaggtggcagcaattatgccactcccggtgcaggtgctggtgtgggcaatggcaggagcaactgtgttcggtggtttttatgctttcttcatccaccaggaaaaaaccgcccagctggaacccccaaaaccataacgagataatgcatccaccataaggtaatatcttgatgacatctgtgcctgatggtgtaccaaatgtctctatctctgcattgagccacgagtaggaggatagcctaggggtgccttgactccaaagttgtattgaaaaagatggatgaagcaggcaaatgctgcctgaatccatgactcagggcacagattttccactcaaaggaagataagattgcattacttcatgatcttttgaactgcctctgcaagacgggactcggatagtggatgcaaagatctaatactggcctcaggcaacgagttgtttcactcgaaagtctagaaatgaccgggctcaaattttgcaccccaaggaaagtgagtttgcattacttcatgaccttttgaactgcctctgcaagactggactcagattacgctt

SEQ ID NO: 12662 - DNA, 76 bp, Zea Mays
tttgtaggaagggggagtgccgaacaaggcaccgtgggagcaaaaggcgttgatggtctttgtgggggagacaatt

SEQ ID NO: 12663 - DNA, 2517 bp, Zea Mays
cacgggatgttcctccatgagctgcatctgataatgttcagcattcaaatggccaggagttgctatccactcttttgaagaacctagggtctgttgccaaatcactggagccaaaagaactatgtaaactcctggaggcataccaaagcctgcaaaatggatcaaatgctggaacctctggaacagctaatgccacagaagaggctgcagggccatctaactctaagttgcctttcgtgaatggtagtcattgtggacatgcatcatcatctgttgtgccagtacagtcgaaggctaccatagtggtaactccagagcccgcatcatgcaagcttaaggattttgatctgaatgacacttgcaatgatatggaaggctttgaggatggacaagaaggttcacctacacctgcctttaagacagctgactctcctaattgtgcatcatggatgcaacaagattctactcaaagtccaccgcagactagtggcaactcagattcaacatcaacacaatcattgtcaagctcaaatggagacgctcagtgccgaactgataagattgtcttcaagctttttgacaaagttcccagtgatttacccccagttttgcggtcacagattcttggttggttgtcaagtagccctactgatatagagagccatattagacctgggtgtattattctaacaatatatctacggttagttgagtctgcatggcaagagctttctgagaatatgagcctgcacctggataagcttttgagtagctccactgacaacttttgggcatctggcttggtatttgtgatggttcggcgtcgcttagcttttatgctcaatggtcaaattatgttggacagacccctggcacccagttctcatcattactgcaagattttatgtgtcaaacctgttgctgcaccttattctgcaacaataaatttcagagtcgaaggatctaatctactcagtacttcctcaaggctaatttgttcatttgaaggacgttgtatattccaggaagacacagactctgtagcagaaaatgatgagtatgaggatagggccatcgaatgcctcagtttttgttgttccgttcctggtccaagaggaagaggatttatagaggttgaagatagtggttttagcaatggcttcttccccttcataattgctgagaaagacatatgctttgaggtttctgagctggagagcatatttgagtcctccagtatcgaacatgcagatgctaatgataatgccagggaacaagctctggagtttctaaatgagctgggttggcttcttcacagagcgaacagaatgtctaaagagaatgtaactgatacatctgtagctacctttagcatgtggagattcaggaatcttggtgtatttgccatggagcgggagtggtgtgctgtgatcaaaatgctgttagatttcttatttattggccttgtcgatgtgggatcccgatctccagaagaggtggtgctttcagaaaatttgttgcatgctgctgtacggaggaagtctgttaacatggttagatttctgctgagatacagaccaaacaaaaactccaaggggactgcacagacatacttatttagacctgatgctctgggcccgtcaatgattacccccctccatatagcagctgccactagtgatgcagaggatgtgttggatgtgctgaccgatgatcctggactgattggaattagtgcttggagcaatgcacgggacggaacaggttttaccccagaagattatgctcggcagagaggcaatgatgcttacctgaatctggtccaaaagaagattgataagcatcttggcaaaggccgtgttgtcctcggtgttccgagcagtatatgctctgtaataactgatggtgttaagcctggcgatgttagcctcgagatctgcatgccaatgtctgcatcagtgccaggttgcctcctctgcagccgtaaggcacgggtgtatccgaattctacatcgaggaccttcctttacaggccagcgatgttgactgtgatgggagttgctgtggtctgtgtctgcgtgggcatactcctccatacctttcccagggtttatgccgcgcccacattcagatgggagttgctggagcgtggacccatgtaagttttaggatgagccttagctgttgtttgtaacttgtaagttgagagttttagcgttgtggctaagatcaaaggaacatgattaccgtgtgaagaagttcatctgtgtttaacgcaagatgctgttgcggctgtaagctttatatacatcgtcgatttcaactatatttacagcctatcatgctcccattccattcatccattttgttttagaattcattccttgcggagaatttgtgaaccatcagaataaaaaacaggttcttgtatttataatcgttgagacataatatttcttggaatgatgctgaaaaactcatgattgcatttgctgaaagtatatgttacaatccaag

SEQ ID NO: 12664 - DNA, 1166 bp, Zea Mays
caaattcaagtaattactaactgggtcgtgctgataccccaccagctgaaacaaatagtgatagctctactgcacagccaggccttgggaaattggagcagcatgagcaggcaaatcctaataaggagcatgtgacccaccaggaaggaggagtcagcaatgatattggtgacaacaacaagaaggataactcaacagaagtaaccaacatcagaagagatggctccatacagcagccaaagcacaaagatagcatcatgacaaagtcttcacaaccactagatttcttggaagattctcttatcaaggagtgtgatccatcacatagatgtatcattgaaaacaagaaattcatcgcctgcttaaaagtttctggagaagactcattggctctgtcacttctgatggacaacagaggcataaacccactagatgttagcatcatggctccagattatgtcactttagctgaagattccatccatgttgaagcaaatggtcacaatgagacacaagtgagagtttctgtcaatgatgatgcaaatagcacgacaatagtcatcaaagttgcagaaaaatcctgcaacatcagcattcacagtgcaatcacaagggagacggctggcagtggcagagtcataaggatgccacttacgccaacatacacgctactgccagtcttccttctcctcgttgcggtggcagtgtgcatcgtggtccggaggtggcgcaaccaggacggcgaccctgcgtatcagaagctagacatgtcagacttgccggtttcggttggaggcaagaaagaacatgacgatcggtctgacaagtgggacgacaactggggagatgactgggacgacgaggaagctccggtgacgccatccaagcctctgcccaacccttcgtccaaaggtctcgccccgaggcgatcggcgaaagatggttggaaagattagttagccacatgacgccacttaaaaggagcattgcggaaatagttccagtgcatgcagtatatttttaccttcatctttgttgttaaatatttctggaggatgctaatgtcagagagtgcaatacattgataccaagcagaaaattttgtgatcttcctctgccaaactgagtaactggcagctattgaatatagttattggacttccgac

SEQ ID NO: 12665 - DNA, 432 bp, Zea Mays
gcttagtgggataatgccaatggcggctaaggagttcgaaagtgaactgaagaaagagcctggggaaggtggcgatcagcccccacctgcaacccccacggcaacgggggtaggtggcgcggagaaggggcttgaggcatcaagtagcaaggagagcacgtcgcggagaagggggttgttggtgtaaaattgtattctggtcttctggagttagcatcaagttcatgtcctttttaaccacgtcgcggtttcaggccattgtagcgatatgtttgtagtctgtaccgggaataacaaccttccgtgattgattatgaatcggttgtcttgggcattattcattattgcaattctcattatttgtagcacttgtttattgagcttaaaggtgtgagctgaagcggttagaagagcacgtctatgctacatggg

SEQ ID NO: 12666 - DNA, 126 bp, Zea Mays
gccttccaaagctggggcaggcagatccttgatagcaggctctggtgctggatcctgggctacctccttagcaactccttgctccggcacgaggatgtattctccgtcagcgagattacagtctat

SEQ ID NO: 12667 - DNA, 431 bp, Zea Mays
tcaaaaaaaaaaaagagccttgggatattggcactagtcgtaatcggcacagctaggtctgaaaggcaaccaccaattctctctctttaaaagcctgagcttggctcatagctctatcttgtccagggactcaataggccagtaggcgattacaagggtggaagaaacatctagccttaacattccaggctacagcctaacccctctaatggatagcagcagtggtagccaggacaagaaattcagagacaatgatcgccctgaagcaaaagaagctaatagcaccgcacagcatcttgttgacttcacggaagcagaggaagatcttgtttccagaatgcacaggcttgtggggaacaggtgggagattatagcaggaagaatcccaggaaggacagcagaagaggtagagatgttctcttgcaacttca

SEQ ID NO: 12668 - DNA, 1326 bp, Zea Mays
atgtccgaaccatatcaaacagtattggacaagcttatgtgtgatcccatcctctttcaccaaaagatgagattcacaagatatgcaatgtcatcggtagtccagatgagcaatcttggcctcaaggattgtctcttgcagaagcaatgaagtatcagttcccacagaccaaaggcagtcaattgtctgaggtgatgacaacagctagtagcgaggcaattgacctcatctcatcactatgctcatgggatcctagcaagagaccaaaggccacagaagtcctccagcataccttcttccagggttgtacatgtgttccgcttcctgtccgtcggaaagcttcatcgcttcctaaaacacctccatgtgttggatcaaagagaatttccgagaacagtgttgctagaagattctcgaccgggactctatctacgatgaaatctcatagcaatgcacctgcaaaatcaaacggtttatctaggactggtgtacaaagaaaacttcacttggatcgtcagccaccgcagaagagtacaaaaccgaccgagaacagcaataagctagctacaaatcgggtcccagcccggaacagcccagggaatcctgtacttaggcattcacgcagcttgcctgaaactggtcgacgagcagtacagaaggtctcatcaatcacagagaaactgtcgcaaatgtcggtgacctccagaacacgaagcgccgtgaagcctgccgccccgacgatgaaggccggacatggcaagtcagacttcctggggaagtctgacgatatccctccggcaaagaggctgacgagaaaattggtcagctaaacaagggtacgtagagtgaaaatccgatcatctgcaggagggtggagggatatggtgtatagtgtgcaggaaccagtgtgccgaagagaggctagctcatcctgagcgtttgcctgtcgatggtcgcgcggatttgccatcgccacagttttgctgcatcgagtcatcttaggaatggctttgcaaactcctttgtggagtgctagagcctgcttcgagccttaaccctcttcctggccttcgatctgccttttgcctgcgtcaactttgcccccatgttttaataaacatgatgtgtgctattaattttgtcttgttcatatcttgctgggatggacgtttcatgtttggtttgaatgtacaggtacagtgcacaggtgagaacaccgtaaaatgccaatttcacgtactgtatgcacatgagttgtcactctccaatatggataaagtattataccaagtggcgctagaaaataccaatgtggatgattggaaa

SEQ ID NO: 12669 - DNA, 6924 bp, Zea Mays
cggcaggcagggcatcccgcgaggccgcgacagaggcggcactccgctcccaccaacccacaacaccgatcccctcctcgccgagccgccgccggggataagcgtggggaagtgagcagccaaaatctaagacaccgatccccgggcgtgagtcgcgaaggtagcggcggagaaaagggcggagccacaacgcggtcgtgagcccgcagccaccgcatgacaggttgcgaggcttgctgttcagccatgtcgacggcgcaagggacagcgttgaggtcggcgccgctgggcgcaggtcgttgggcccgacgcggccgccccgtggcggcgccgtaccgttcgggctggcaagcctacggtggcgtttccctcgagggcagcggattccttggccgcgtgcaccgcaccgaggagcgcgtcgctccgcgggcgccccacgcggcggcacgcgacgccgaggtggtgaggccgctctcaaagctcccgaacagcagcattgggctctacgattcctcattcgagcgtgacgcttgcggcgttgggtttgtcgctgagctatctggcgattacaaacgcgagactgttaatgatgctattgagatgcttgagagaatggctcaccgtggtgcctgcggctgcgagaagaatacaggagatggtgccggcatcatggtcgctctaccacatgacttcttcaaagaggtcgcaaaggatgctgggtttgagctacccccaccaggcgagtatgctgttggaatgttttttatgccaacagatgaaaagcgtcgtgagaaaggcaaagctgagtttatgaaggttgcagaatcactgggacatgtaatactcgggtggcgtctggttccgactgacaactcagacttgggtgaatctgcactcgagactgagccagtcattgagcaggttttcgttaccaagagctcaagatcagaggctgagtttgagcaacagctatatatccttaggagactctcaatcatctctgttcgagcctctctgaacattaagcgtggtggagagagggatttctacatgtgctctctatcttctaggttcactcaaggttctccacaaacacctttcccagctgggaccgtgcacaaccaatgcgtgttttaggtcataatggagagatcaatactcttagaggaaacaagaattggatgacagcacgtgagggtctcttagaggctgagaagcttggattatcaaaggagcagctctcaagaattctgccaattgttgatgctacctcttccgattctggcgcatttgataatgttcttgagcttcttgtccgaggtgggcgaagcctgccagaagctgtgatgatgatgatccctgaggcatggcagaatgatgtaaacatggatcctgagaagaaagctctctacgagtttctgtcagcacttatggagccttgggatggacctgctctaatatcgtttactgatggtcgttaccttggagctaccctggaccgtaatggtttgaggcctggtcggttttatgtgacgcacagtgggcgtgtgatcatgggtagtgaggtcggtgttgttgatgttcctcctgaagacgtgctgagaaaaggcaggctaaaccctggaatgatgttattggttgattttgagaatcacactgtagtggatgatgaagctctgaaagcacaatattctaaagctcacccgtatggagaatggctcaagagacaaaaaatatacctcaaggatattgtagaatcagtaccagaaaccgatagagtcgctccaagcatttctagctcactttcacaaaagaatgagaacatagatcatgttggtatcagtgggattttgactcaactgaaggccttcgggtacacggtggaagccctcgagatgttgctactgccaatggctaaggatggagtggaagctcttggttccatgggaaacgatacaccacttgcggtgatgtcaaacagggagaagttgacttttgagtacttcaagcagatgtttgcacaagttacaaaccctccgattgaccctattagagagaaaattgttacatctatggagtgtatgattggcccagaaggtgacttgttggaaacaactgaaaaacaatgcaaccgccttgcacttaaaggtcccttggtttctattgatgaaatggaggctattaaaaagatgaattatcgaggttggcgaagcaaagtgcttgacataacttatccaaaaaagtctggaaggaagggcttggaagagactttgaacagaatttgtgctgaagctcgtaaagccatacgcgagggatacactattttggttctctcagatagaggattttcctcagaccgtgttgctgccagttctctcttagcagtgggagcagtgcatcagcaccttgttgcaaatcttgagaggacacgcataggattgttggttgagtcagctgaacctcgtgaagtgcaccatttctgcaccctggttggatttggcgctgatgctatatgcccttatttggctattgaagcaatttggtgcttacagaatgacgggaagattactcctaatggagatggacaaccttactcaaaggaagagctggtggcgaagtatttctatgcttctaactatggaatgatgaaagttcttgcaaagatgggaatatccacccttgcatcctacaaaggtgcacaaatttttgaagctcttggtctttcttctgaagtggttggcaagtgtttcgaaggcacacctagcagaattgagggtgcaacatttgaaatgcttgcacgagatgctctccgtcttcatgagttagctttcccatcaagagcccttccagctggcagtgcagatgcaaaggcacttcctaacccaggggattaccactggagaaaaaatggtgaaattcatctcaacgacccacttgcaatgggaaagttacaggaagcagctagagtcaacagccgggcagcatacaaggaatattcgaaacgaattcaggagctcaataaggcgtgcaatctacgtggcatgctgaaatttaaacatgtttctgacaagatatctttggatgaggttgaacctgcaagtgagatagtgaaacgcttttgtactggagcgatgagttatggttctatttcattagaagcacatactgcccttgctattgccatgaacaaacttggaggaaaatctaatacaggtgagggaggggaacagccctctcggatggaaccacttcctgatggctcaatgaatccaagacgaagtgcaatcaagcaagttgccagtggacggtttggagtttccagctattacctgactaatgcagatgagctgcagataaaaatggctcagggtgccaagcctggtgaaggtggtgaacttccaggccacaaggttattggtgacattgctgtcacaagacactccacagctggtgtaggactgatcagtccacctccgcatcatgatatttattcgattgaggatcttgcgcagcttatacatgaccttaagaattcaaatcctggagcccgcatcagtgtcaaactagtttctgaggctggtgtgggagttgttgctagtggtgttgtaaaaggacatgcagaccatgttcttatatctggccatgatggtggcactggagcttcaagatggaccggtatcaagaatgctggacttccatgggaacttgggttggctgagacacatcaaactctagtagcaaatgggcttcgtggtcgagctgtcctgcaaacagatggacagttgaagactggtagagatgttgctgttgcttgcttgcttggggcagaggaatttggtttcagcactgccccactgattacacttggctgtattatgatgcgaaaatgccacatgaacacttgtcctgttggtatagctactcaagacccagtgcttcgagaaaagtttgctggagaaccagagcatgtcatcaactttttcttcatgcttgctgaggagctaagagaaatcatggcaaaccttgggttccgcaccattactgaaatggttggacgttctgatatgcttgaggttgatccagaagtagtgaagagtaatgagaaacttgagaacattgatctctcactaatcttgaaaccagcttcagagattcgtccaggtgttgctcagtactgtgttgagaagcaagaccatggcctagacatggcattagataacaaactaatagatctgtcaagaactgctattgaaaagcaagttcgtgttttcattgagactccaatccagaacacgaatcgagcagttggaactatgctcagtcatcaagtcacaaaacgttatcacatgaatggattgcctgctggtacaattcatgtgaagtttactggaagtgctggtcaaagttttggcgcttttctttgtcctggaatcactcttgaactggaaggagacagcaatgattatgttggtaaaggattatctggtggaaaaattgttgtgtacccaccaaggaacagttcttttagtccagaggacaatattgtcattggtaatgtggctctgtatggtgctaccatgggagaggcatatttcaatggtatggcagcagaaagattttgtgttcgcaactcaggtgctcaagcagtggttgaaggaattggagatcacgggtgtgagtacatgactggaggcactgttgttatcctcggaaaaacagggcggaactttgctgctggcatgagtggaggcattgcctatgtttatgatgttgatgggaaattcagtgctcgctgcaacaatgagttagttgatctatatcatgtggaggaagaggatgacatcatcacattgaaaatgatgattgagcaacatcgtcgcaacactgagagtgttttggctagagatatactctccgattttgataaccttcttccaaaatttgtaaaagtatatccaagggactataagagggttctagaaagcatgaaggtggaaaaggctgttgctaagcatgcaaaggagcctaagatggcaaatggaatttctgtgacaactaagaaagtacaacctgatcagtcagcaagccgaccaacacatgttgccaatgccaaaaagtacaggggctttattacatatgagcgagagagtatttcatacagagatccaaaagagcgtgttagagattggaaggaagttgcaatcgaatctacacctggtccactattaaatacacaatctgctcgttgcatggactgtggcactcctttctgtcatcaggaaagctcaggtgctggttgtcctcttggaaataagatcccagaattcaatgaattagttcaccagaacagatggcgcgaagcattggatcgactacttgagacaaacaacttccctgaattcactggacgagtttgccctgctccttgtgaggggtcatgtgttcttgggattattgagaatccggtgtctatcaaaagtatagaatgtgcaatcatagacaaaggttttgaagagggatggatgattccacgacctccacttcaaagaacaggaaggaaggtggccattgttggcagtggaccatctggtttggctgctgcagatcaactaaataaaatgggccacttcgtaactgtgttcgaacgtgcagatcgaattggaggtttaatgatgtatggtgtgccaaacatgaagacagacaagattggcgttgtccagcgccgtgttaatttaatggctgaagagggtgtcacatttgtggtgaatgccaatgttggtagtgatcctttgtactcgattgaacgtctacgttctgaaaatgatgcggttattttggcttgtggagcaacaaaaccgagagatctcaccatccctggacgcgagctatctggagttcattttgcaatggaatttctccatgcaaatacgaaaagtttactcgacagcaacctggaggatggtaaatatatctccgcccgtgggaaaaaggtggtggttattggtggaggtgatacaggcacagattgcattggcacatctattaggcatggttgcaccagccttgtaaatcttgaactcctgtcaaaaccaccaagcactagagctgctgacaacccatggccccagtggccaagaattttccgtgttgactatgggcatcaagaagctgctaccaagtttgggaaggatccaagaacttacggagtcttgacaaagcgttttattggcgatggaaatggcaaggtgaaggcccttgaggtagtgcgtgtgaagtgggagaaagtagatggaagatttcaactcaaggagatggaaggatcagaagagattattgaggctgatctcgtcctcctagctatgggattcttgggtcctgaagcgacaatagctgagaaattgggtttggagaaggacaacagatcaaacttcaaagcgcagtttggagacttcgctaccagtgtcgatggtgtgtttgccgccggggactgcagacgtggacaatcactggtggtttgggccatcacggaggggcggcaggctgctgcagcggtagacaagtacttgtcaaggtatgatcagaatgctgctgctacaggcgacagcactccctccgggacagggctcgttcagccggttgcggcatagtagcataaactggagcaagttttacgtttgtcagtgtatcctgtggttccacacagcaaacaccgttcttgtagttgtctaaaagaaacagagaaatccgggctcattaaggaatgaaagcccttctatattttttttgacgatagataaacagttgaaagttttggtggctattgtctcttttttctgctgcatgtggttttgtagtccaaacaatgtacagtttcccctttcttaaatagatgtaaatttgtcgtgtgatatgtcggttattttc

SEQ ID NO: 12670 - DNA, 98 bp, Zea Mays
tgtcatccttccccctgggggagatcatccagtgccgagaggcctcggttaggattgcaaagtgggcagtggaaatcatgggcgagacaatctcgttc

SEQ ID NO: 12671 - DNA, 1412 bp, Zea Mays
cgtttctgccgcttaaacttaaggacttaattgccttgccatgccctgctgctgttgatgtgccctcacggacggttcctgctgtcacaacatcaagcgcccctgaacgcatttctgtttctgcgctgctcgaggttgtctcagacgacttgctcaacctcaacaacaatctcaaatcgcttgttggtgcagaaaatccagttttagtttctgcagcagaacaaattttcagtgctggtggaaagaggttaagaccagcattagtttttctggtatcgagagcaactgctgaattagctgctttgccggagctaactacagaacatcggcgcttggctgagatcatagagatgattcatactgcaagtctaatacatgatgatgtcatagacgatagcgggatgcgaagagggaaagaaacaatccaccagctgtacggcacacgggtggctgtgctcgctggcgattttatgttcgcgcagtcttcttggttcctagcaaacctagaaaacattgaagtcatcaagctcatcagccaggtaattaaggatttcgcgagcggcgagataaagcaagcgtcgacgcttttcgactgcgacgtgaccctggacgactatctgctgaagagctactacaagacggcctccctgatcgcggcgagcacgaggtccgcggccatcttcagcggcgtgggcagcggcgtgtgcgagcagatgtacgagtacgggcggaacctgggtctggcgttccaggtggtggacgacatcctggacctgacgcagtcggcggagcagctcgggaagccggcggcggggagcgaccttgccaagggcaacctgacggcgcccgtgatcctggcgctgcgggaggagccccggctgcggggcatcatcgagtccgagttctgcgagcccgggtccctggcggccgcggtggagctcgtgcacaggggcggcgggatccggagcgcgcgggagctcgcggaggagaaaggcggcctggcgttgcgcagcctgcagtgcctcccgaggagcgagttccggagcgccctcgagcgggtggtgcactacaatctccagcgggttcggtagaggaaggtgctgtgcttccatgtggcagtggcatggcagtgcgtgttgtttagtgtaaccgacactgccgcgtgcccaccaacctcgtggagcatgcatctgtaaggttctccatttctttggggggtgagtgagggcactagtagcatggtgtgcagtggttgtgaggttctattgttgttgtaactacaagcaggtaaactgttctggacgacaccacgatgtatatgtacatatgaaatgcactgctgctgtgggatgtatgcaatgagccaatgagtaggtttatctcacaatcatcagctgatgctagctgatggc

SEQ ID NO: 12672 - DNA, 99 bp, Zea Mays
agaagagaagaaaaaaaaaaaaaaaaaaaaaaaaaaaaaaaaaaaaaaaaaaaaacgacaaaaaaaaaaaaaaaaaaaaaaaaaaataacaatacaaac

SEQ ID NO: 12673 - DNA, 80 bp, Zea Mays
atcttcggcatcttcattcccactttctacatcgaaactttcactatcgctggagttctcagatatcctagccaacatct

SEQ ID NO: 12674 - DNA, 80 bp, Zea Mays
cctcctcctcctctccccaaatcgtgcatccgccgcgccctcaaatcccgcgggcgttcaactctttctcggtcaccgtc

SEQ ID NO: 12675 - DNA, 86 bp, Zea Mays
ctttaatcaatgaacatgatgtgaacatttatgatatgatactgttatcttgattatgttgatgatcttgtgatactctagggggc

SEQ ID NO: 12676 - DNA, 1301 bp, Zea Mays
cacgcacagcgccaagggcaccaccagcaaggaccaagacagagcacagcgcagctcgtcggcctctcgacgccggttgctgcaaccaccgcctttattgcccacgcgggccgtgcggaagaagcaagaagacacgccaatggaggtcgccgcagcatcggcagcgagctacggattcaaggccgacgacgacgttgacagcctcagggcgacggagctcaggcttggcctgccgggcacggaggagaaggaggaggccgaggagccccagcacaaggcggcaccgccgccgccgtccacgcccagaggcaagaagcgcgacgtcgtcgccagcagcgggcccgaggacgcgcccaagaagcgcgactgcgagaccgacgccgacgccgacgccgcgccgccgccggccgccaaggctcagctggtgggatggccgccggtgaggtcgtacaggaagagctgcttccagcagcaggcggcggccaagaacaagccggcggcagccctggcggaggaggccccggccgccggcgggttgttcgtgaaggtgagcatggacggcgccccctacctcaggaaggtggacctcaagatgtacaagggctaccgcgagctgcgggaggcgctggaggccatgttcctctgcttctccggcgccgccgacgcgcccgccgtcaacccctccgacttcgccgtcacctacgaggacaaggacggcgacctcatgctcgtcggcgacgtgcccttcggcatgttcatcagcacctgcaagaggctgaggatcatgaaagggtctgaagcgagagggctcggctcggccaagaacaactgatgatgaggcgtctatcgcatgcttgtgctgtgcgtgcgtgcatgcgccagcaaattcttttgttcttttggggtcttatttcttctccaaggcgtccctgcatgggtgtgggcgtgtggtgttgagtattatgtaccttctcccctagcattgtctgtgccaacaatggagcagcagctagcagcaaaccagagacatggcgaggcgaaagatgaagctgcttgcttggaaggagagagagagagagagagagagagagagagagagagagagagagagagggaagctttgtgcatgcgtggaatgatgtgtggtcgctttgttctttttcttttgtgccccttgtaggggtgtgtgtgtgtgtgtttagcaagacatgcaaaaggagtggagagtcgagttgaatctccatgatgcgtggttgtacaaagccaaagatcactcttctttcttgtctatcaaaaaaaca

SEQ ID NO: 12677 - DNA, 1807 bp, Zea Mays
gccgcaccaacagccaatccggacctctcgcctcctctctcgcgttgtcctcgccgcgccctgctccggttccccaatccttcgccccgcctccgttgcctaccgtctcctccgagccagatcgatacaagcggagccgtgatccggtcaacgcgcggagcgtgttagccggattctctcgccgtcgcctcccctcccctcccgccgccgtcaccgccgtttctggttgcccgggatcagccgagttggatctcgaggcgtgaagcgttgcgggcgcccggcgaggatacgatgcctgcggtgctcgccgcattcgcttgcctccgactccgagcggccgctgccatcgccttcggggactcctccttcctctgctcccatcgtcttaagcatcattttagtagtaattttagtattagtaattgtctttgacctttacgtttcctccgtcacccacacccccctccggtttcgttctggttgtgttcgattcgtggcttctttggctctgtcgcaggatcgaaaggaggcaaggtgttttaacgtggttattactacctacaagataacagaaacttgtatttgtaatttgagatcaagcttgtggatgggcgaaccctcagcggacttcagtgctgaagatgttagtagcatctcagaagtgacgacgatcgatctgttggcggttgacgaagggtcaggtctgcatgaagattctgatgacgattacatcgatgatccaattctttctctggaatctgattcaactgatgatttagtgaacgttgattttatatcacctgcctttcctattggtggtgtaacagaatcatcaattagcaattcagttgctgggaattcttcaattaatggcactccaaggttagtttctgcaatgaaaggaactcgtgccaagaagggaatcaaaacaaagttgagcgtttcatgggccactgatgtatatgacccacctattacttcagactcgcacactgtgaaagggcaccgtaagagttcaactaagggtaactacaaatacaagtgttccaagagcagcagtagcagtaaccacagtaccactggaagcaaaaaggacaagaagcattctaggcaccgtagcagcagtgggggtggcagcaaaagggacaggaaacattcttactgcagtagtgctagcagcaacagtagcagagttgttaccaacggttctctatatggtaacacatgcagtggcggtgggatcagcagcagcagcagaactacgacatgtgttcctgaatctgccaaggtatctacattgatggtagctgaaaatgcgacaccacaagagagagttcctgtattgaagacaccggaaccaatcaaatgtactaccagctacggcaaagagaagccatttgccttgctgtcgcgccagtttccccctgcaagatacaaggggatgttctccttctggagccaaaaccagctggcttcttgataatctgctatacggaaagctgctatacagaaagctcacctggaagtcttggttgctaattaaattgcactgcatctgtgattgttttttggtgtcgttctcttcgttgccatgtttcttttgcctgcgtctgaaacttcagagatcacgttttcgaaaattgctcagcgaagtgcttgtatatttgagtttatgttgttactatttcctcaccgaatcgtgtaattcgcttatcaatttcatcatgtgttttgtattattccatttgagatcatgcactattatttccacacctacactgtagcaagggactggtttaaaaaagaa

SEQ ID NO: 12678 - DNA, 4332 bp, Zea Mays
cgcctccctaaacccttgccagtctccctcccggcagcggcggcaaggcctaccgccgcaaaccctcttcctcagccgctgcgtacaaaagaagttagcttctttttaagtaggaggcgggagccctaggtagccccatggctccggcggacggcggcggcgagcagccgcacaaggcgcaccgccaacacaagtccggcgccaaggcgcggaagaagaagggcaagggcaagggcgacgccggcgatgacgcaggggggcagcagaagaaccccaaggcttttgcatttcagtcagcagccaaggcgaaacgtctacaagctcgatcagctgagattgaacaacggcgtcttcatgtgccaattatggaccgttccatcggtgaacctcctccttttgttgttgtagttcaaggacctccacaggttgggaagtcactgttgataaaatgtctggtaaagcactacaccaagcaaaacttgcccgaagttcgtggccccatcactgttgtatcaggtaaaagtaggagggtacagttcgtagagtgtccaaatgatatcaatggaatgattgatgctgctaaaatagccgatctcgctttattgcttattgatggaagctatggatttgaaatggatacatttgagtttcttaatatcatgcaagtccatggattccccaaggtgatgggagtgctcacacaccttgataaatttaaagacgtgaaaaaactccggaaaactaagcagcgccttaaacatcgattctgggctgagataaaagagggagcaaaattattctacttgtctggtctgattcatggaaaatacacgaaaagagaagttcataatcttgcaagattcatctctgtaatcaaacctatccaattgagttggcgcatggctcatccttatttgttagttgatagatttgaggatgtcacccctacagaaagtgtgcggttgaacagaaagtgtgacagaacaataacattgtatggttatctccgtggctgtaatatgaaaagagggaccaaggtgcatatcacaggggctggtgatttcagcttgtcaggggtgacgggtttaggtgatccttgccctttgccatcatctgcaaagaaaagaggattgcgtgacaaggaaaaactgttctatgcaccaatgtctggtcttggggatttgctttatgacaaggatgctgtttatattaatatcaatgatcatcttgttcagttttcaaaaagtgatgaaaatgatgcacccaaaaagcaagggaaaggtaaagatgtgggtgtggccctggtaaaaacacttcaaaacccaagatactcccttgatgaaaagttggagcaaagttttataaatttctttggtgggcgtcctgctgctcaatccaaagacagtgatgctcaaggcaatgtcatctctgcaagccaggataatcagagtgacacaaacattttgcagcaagtagatgatggtaacaatagcaatgcagtcaccatggagagcaatgaacattctgaaggctctagtgatagcgaaggggataatgatgatatccagctgagggatcgtgatgttgacttgagggaagaagtagaggtttgcaatggaagattgaggcgaagagctgtatctgctaattttcgagatgactttgatgatgagggtactgatgaagatgcaaatgatgatgaggattctggtgatgaccagttatctggagattctgcatcatcagcagatgatagtggagaagctagtgatccagaggatgaacttgagaacacttcaaaatggaaagaatcccttcttgcaagaacaatgtcccgacggagtgataatttgatgcaacttgtctatggactaccttcaacaaagctaggcagtgttgcagaagaaaatgatgatagtgaagccaacagctcagatgatgaatttttcagaccaaaaggacaaaagcagcaagcaaagaatgaatcaccgagctttggtgatattgatggtgaggattgctccaagtttttcaaagcagagttaaaagattggtctaatgaagatctcatcaaaagcatccgtgatcgttttgtgactggaaattggtcaaaagctactttgagaggacaggatacagatgatcgtggtgaggatgatgaggaaatgtatggagattttgaagatcttgaaactggtgaggtacatatggcccagacagatgaaaatgtggaagcgaaagatgacccagaagttgaagaaagaagacttaagaagcttgcacaaagagcgaaatttgatgcacaatatgatggttctgagttatctgacgatgaagttgatgatgttaagaagaaatccagacgagaacagtccaatgaagggggctattttgacaagctaaaggaggaaatggaactacgcaagcaaatgaatatatctgagctcaatgaccttgatgaagagactcgagtagacattgaaggattcaggactggtacttatgtcaggttagaagtacatggtgtgccatttgagcttgttgagcattttgatccttgccaccccattcttgttggggggattggccttggtgaggagaacacaggattcatgcaggctagtttgaagcgccataggtggcacaggaaagttctgaagacaaaggatccaatcatagtttcaattggttggaggcgatttcaaacaacccctgtgtatgcaatagaggatcggaatggtcgacaccgcatgctgaagtatacacctgagcatatgcattgctttgctatgttttggggaccacttgctccaccgaagagtggtgtattagcagtccagaatctttccaacaatcaggtgccatttaggataactgcaacaggatgggttcaagaattcaacaatactgccagaattgtgaagaagataaagctcacaggcacaccatgcaagatatttaagaagactgcactaatcaagggaatgttcacatccgatttagaggttgctaggtttgaaggtgctgccattcggactgtaagtggaatccgaggacaggttaaaaaggcagcaaagattgagccaggagatatgttgaagagaaaaggggaaaatacagaaggaatcgcaagatgtacatttgaggacagaattcttatgagtgacattgttttcctgcgtgcctgggtcaacgttgaagttcctacgtactctaaccctgtgaccactgctctgcaacctagagagcagacctggcaaggcatgagaacaactgctgagttgcggaaggcacacaatatccctaccccacacaacaaggattcagtttacaagcctatcgagcggaaaccacgcaagttcaatcccgtcgagatccccgcaaagctgcaacagttacttccctttaaatctaagcctaaggacacagcgaagcagaagaaagcaccagttgaaaacagggtgcctgtaatcatgcagcctagtgagaagaagacacacgcagctatacaacagctaaggctgataaaacacgagaaggcaaagaagaagaaaattaaggaacaacagaagaaaaaagcatacgaggcagagaaagccaagaccgagctactgacgaagaagcgccagagggaagagaggcgtgtgagataccgggaagaagataagcagaagaaacgtgcacgcagatgaggcgaggaacggggtatgtgcaccaggaactcagcagcaaccgggcatgctctcttgtgcagaacatatgccaaaatcttagttcatatacggagagctataaaaggtgcagtaccacccatctgggcgaagaagcatgtcaagtcataaccagggcgcggagatgagcaagttaggttgcttgtttaagttatgtatcggttgccctaacgcggaatattgtctgagtgtttggcaaacgcatgtggactcccaagtaaatttggagtcataattttggagtgtatactacctcaggtaccgaatgttaggcaaacgcatgtggtctttagctcccaagcaagtttggtttctatggatcaatttttagtccatctattttagtttctaaattactaaacacatgagctaaaaaaatatctctattttagttcctttgtttaatttagagattaaaatggaggtactaaaaattagtctatagaaaccaaacacctcttaatatgcttttgagccctgttctgtgagcctgtttcgtttgattttaatgtctctattgcttttattgtctctatatattgtagctgtagttgttcaaacaactgattttaatctgatacgaacaattgctaaatggtgg

SEQ ID NO: 12679 - DNA, 895 bp, Zea Mays
ggtttatctcttcctctgaccccactcatgtgggagcctccggagatgttttctatgcaagatgggatgaagtattggttggggctactgctgttgtgtctacccttggagggtttggcaatgaagaacaaatgaaaaggataaatggtgaggcaaatgtcatagcagtaaatgctgcaaaagaaaatggagtcccaaaattcattttaatctccgtccatgactacaaccttccatcctttcttcttacatcgggttacttcactggcaagagaaaggcagaatctgaagtcctttccaaatacccagcctcgggtgtcgtgttgaggccaggcttcatttacggtaaaaggaaagtaaatggcttcgaggtaccactcgacgctgtcggacaaccattggagaagttgctctcctctgtcgaaaacttcaccaagccgttgagctcgctgcctgcctctgacctaatccttgcaccccctgtgagcgtggatgatgttgcctatgctgtaatcaacggagtcatagacgacagcttctttggggtgttcacgattgaacagatcaaggaagccgcgtccaaggtacgagtgtgaacccggggtcttgttccacaatctctgaacgtgtgttgtaggtggaaagttcataaacttagcagtaactcattgatccttgtgttctttatttctcgctgaattttgaccatagtcaaccgttcaaaagtcagtgcagcattcttttttctgctggaatctcttgagaaaatatagtttccaaactagcccttaatgacttaaagagctagcaaaatatgtagtactgtgtgggtcaccgaactgttatgttggttcacaatctcgctggaggtgagcggcatgagctcacaaccgaa

SEQ ID NO: 12680 - DNA, 722 bp, Zea Mays
cccatctttaatgttgtaaagaaaaattccccaggcgagagctgcaaaaaccgaacaccctgagcagtcactggtgcctcaagaaaaataaccaaatcttttgaaaaagcaaaacagcctaatatcgcagccccaacagccaaaactgagatgaaaatcctgtcacgaagctcctctagatgatcaaatatactcatctccttatcatctggaagtaagtctttgcttggataaagaaaagtatatagagcactctgttcttcctgtgaggggcctccaaaggaaccattctccactgcaaaaggtaaatttgagaggtcctggaggcgggtcctcgagtgcggcaccgatgccgctggacggagactccttctgtggcagtggcccagactcccggagggcgccgtccccgtcgacggcagcgcagcggaggcactgccggcggcggcgctcgggctcgagcgccggggcagctagcgatattagaggcaggttgcgctggcgcaggagaggccggctctggcggaagaggatgccacggccgtgcagctgctgcggcgtgtgccagagcagcgccccagcgcttcccatccccgttcccgtctgctcctcgccgttccgatggtgcgctacctggagaaagaggtaaccggtggcggacagacgatgttacgatattatctggctcggtcgatactcgggtactgggagctggctttcta

SEQ ID NO: 12681 - DNA, 1053 bp, Zea Mays
aaaaggttggagccgatcccgtcctttgctccgtagtccgatctgccacgattcagagattggcggcatgggggcggcgtacgggacagccaagagtggcgtcggcgtggcgtccatgggtgtcatgcgcccagagctcgtcatgaagtccatcgtgcccgtggtcatggctggtgtgctcggtatctacggcctcatcatcgccgtcatcatcagcactgggatcaaccccaaggccaagccatactacctctttgacggctatgcccacctgtcgtctggccttgcctgtggtcttgctgggcttgctgcaggcatggccattggcatcgttggtgatgctggtgtcagggcgaacgctcagcagccgaagttgtttgttggcatgatcctcatccttatttttgctgaagcacttgccctctatggtctcatcgtcggcattatcctctcgtctcgtgccggccagtcccgcgcagattagaggcacgtttcagatgtcaacaccgtgccgccgacagttgcctggtcgtagctgggtcatgttctatatccatgagacaagaagctggagcactttgactctttgagaggcttacttttatgctgtctagttttccatcttctgttgagtcgagaaaacaagaaaggctgtgtagccaagggatgacttttacccttgtgccattcttttccctgtcgtggtggggggtgggttgcggttgatgcttatttatgcacagtttttgcttgggtcggggctggggctgggacgttggtgtaatgtggtgaataagcgagtgcatgcaacgcaattggaacttaagacatttttggtaaaatactctttcgtattctgttctctgttctatgaatattggtaatatgcgtggctcatgaactagtgtttgtttctcgcagccggtacgggttcttagtggtcctatcagtgttagtagagtggatggatcgcgatccaaatgttttacaatttattagtgctctaaattgatttttgttaaaaataaatagaaatagagcttgattctaatc

SEQ ID NO: 12682 - DNA, 1307 bp, Zea Mays
ccggaatggagccaaaccacgccttggtccccgaggcaaaatacaatagtggcatctgagaatgaaaatccacctttaatgccggcaatcatgactcctggtggtgcgcttgatctcgcaactgtactactgggaaatcgtataatcttcattggccaatatattaactcccaggtggcccaacgtgtgatatcacagcttgtaacacttgctgccatcgatgaagaggctgatattctgatatatcttaactgccctggtggaagtctctattcgatcttagcgatttatgattgcatgtcctggataaagcccaaagttgggacagtgtgctttggtgttgttgctagtcaagcagcaattatccttgcaggtggcgagaagggaatgcgctatgcaatgccaaatgctagagtaatgattcatcaacctcaaggtggatctgagggtaatgtggaggaggtgaggcgacaggttggagaaaccatctatgctcgtgataaagttgataaaatgtttgctgctttcaccgggcaaccacttgacatggtgcagcagtggacagagagggatcggttcatgtcttcttcagaggccatggatttcggattgcttgatgctttactggaaacaagatactagagaagggacacaacccacattctattagcagactagaaatactgcagaactggagccaaagttagatgcttgccgtccatctcgattaaagccctggaatgacagatgtttaccgaagaacaagatttgcttccattgcatttatggttgtaccattcaccagcttatggtggcacgtaggatggcattgtcatgcactcatgctaaaacgatgaagactgtttaatgtagacctagatgatctttgcggatgggagaaaagtgccagtttgcaaacttatagcccaggaaaggagaagtggtttaagaaatcgtttggattcaacatattggatttatggtgagaccgtcacatgatttttatttgtatgtgggcaactactcgtgttagcgttcaggaaaactcatacattcggatgttgcaaatacgtcttcaaggattttgataagggccccgtttggtttggatactttgaattgaattttattctaataatcataatttggacacagatcaattaagctggtatgtttttttttataaatatatctgtatactattgttggccgacgtatcataactctatatgttgcatcccttgataatatgatatacctataattttaagtacaaagattactctataattcaaccatttaaattt

SEQ ID NO: 12683 - DNA, 1135 bp, Zea Mays
aacaaatgttgcttgcaaatgttcgtgacttcgtgtggtccctagtgagggctggagcgaaaccgcccgctgtctcgcgtccgtcagacagcacgcacagacgcaggcgggcgacgcacggcagtgttgccaatggactcgcgctgcccccatctgctactgctcctccctctcctcctcttggccgccctcctgcccccgccgtcgtcgggggtgccggaggtcatctggctgccgacgagcgggggagcggggcccttgtcctgcgcgccgccggaccccgccgtgtacgaccgccccgtcatcggcatcgtctcgcacccaggggacggtgcgggcggcaggatcagcaacaccaccgcgacctcctacatcggcgcctcctacgtcaagttcgtcgaggccgccggctcgcgcgtcatcccactcgtctacaacgagcccgaagaccgcctcctcgagaaattgagtttgttgaatggagtgctgttcactggtgggtcagagaaggaaggtgtatattttgacacgataaaaagagtatttcagtatgttttggacaagaatgatgcaggtgaaccatttcctttgtttgcccaatgtcttggctttgagcttgtaagcatgattgtcagcaaggacaataatatcttggaggcatttgacgcccaggatcaagcatcaactcttcagtttcccagctatgctttggagggttcagtttttcaaaggtttgacactgacctcatcaagaaagtcagcaccaactgtcttgtcatgcaaaatcacagatatggtatatcaccaaggcgatatcgagagaacgatgcactatcaagtttcttcaaaatcttgactacatcacctgatgaaaacggcaaggtctatgtctcaactgtacaagccaataattatccaatcacttgcacgcaatggcatcctgagaaagccatttttgagtggaggaaaccaatgatcccacacagcgaagatgcagtacaggttactcaacattttgccaatcattttatcagccaagcacgcaagtctccaaacaggcctcctgccgacaaagtgctggataacttaatttacaactacagtccgacatttaccgggaaaaaatcattatatg

SEQ ID NO: 12684 - DNA, 2148 bp, Zea Mays
gacaaggcttgcgtgttctcaccccttgcgttctcttctgttctctctctctcacacaaggtctcaccctccctgtatccctctgaccctctcggcggcgactgggcgacagccgctgtctcactacgcctggtgcccaggtatctctgccggcgacgagcacctgccagctgcaggggtatgggaatggaggtcgttggtgctgaagcagcaccagcagagatcaaagtatctgatgatgtgaatctattccaagagaaggaaagcaaagcaactgctaaagaacgtgaggaggcagctgtttttggttcagagacaactaccaatgtcactgatctggcacctccaacggatgtgaaggatgagtggcctgaacctaagcaaacttatgccttctacttcatcaaggtccgctcatttgaggatcctaaactgagggcaaaactcgagcaagctgacaaagaattccagaagaagatccaagctcgttctaaacttatcgaggcagtaagagccaagaaggcagagcgctccagtattatcgcggagctgaagccattgagcgctgagaacaagcaatataatggagttgtgaatgagaagataaaggagatggagcctcttcggaacagcttgggcaagtttcgtgaggaaaacaatgccatgagagcacagagtgcaggtttatgctcttctatcgaagaccttgacctaacgatcaagatgctgaatgatcgcatcgtacatgagagcatacctttatctgaggagaagcgtctggtgaaagaaattaaagaccttgaaaaaaccagatcgaaagtcatctctaatgctgctaacagggctaaactgcaaggtacagtggttgaaaaagaggctatacaggaccaggtcaaaatcattggggagggcattgatgaaataaagaaagaaagacaggctgtaagatctaagattaaggtcctggaggatgagctaaaacttgttgatgctgagattgcatcgcttcaagaagatttagatgcagcaactgccagaaaggacaaggcatatgaattgttgcaagaattgagagcaggtcgcgatgcgaaaaacgcacccttcatgcaaaatcgtacagttttagccaaagctagggattattctttgaggaatatgctatcagaactgcaagagctccacaaggctgaggtcgacaaattcatgagccaatggtgtgaaagtaaggccttcagagaggactacgagaagagaatcctcacctccctaaacagccgacagctgactcgagatggtcggatgaggaatcctgatgagaagcccatatttatcgagtcacaggcgccagctccagagccagagccgttccctgtaaaattgcctgcaaaacaagtcaaggaagtgcctgctcctcaggcagataatgcttccaagattgaagctccttcaaaaggacctgtccagttgcacaaggcaaaagctgctctcgatgctgatgatgattatgaggccgagcccccgaaggagaaggcaaagcctacgggggctgatgtggcgaagttgaaagagatgaagaggcaggaggagattgagaagaacaagcttgccttggagaggaagaagaggcaggctgagaagcaggcagcaaaagctgtggcccgagcacagaaggaagctgagaagaagctgaagaaagaggagaagaaagccaagaagaaatctggtgcagctgacactgatgagccctcagaatcggatgccaagtctgacgaagccatggaagccccagcggaacaagaagtggccccagcttccaccacggtaaagaaagaacagaaggagagtgcccggtacaggaatgtggtgagccggagcaaggccccgctacccaaggcgatcctgaagaggaagaaggctcagtcctactggtcatgggctggcccagctgccatggtggctgctgtgctagttgccctccttgcggtgctgggatactaccagtactactacctcccagcgaataccagcaactgagtggatgaggcccgtgtactcccccccgccaggccatttgatgatgtggagaccaattttgcagataatcaagcaacaaaaacaggtgaacccgactcaattgcaacgttttat

SEQ ID NO: 12685 - DNA, 660 bp, Zea Mays
ttccataatagagttccatcagcactgagaatgttccttcacaaaataatgtgttgatgaaaccattgatcagttgccaatttccttgctcggttcaagtccatccccagcatcgtcgagcttgacagcttgaaggtttctggtgatgtctggtttggttctggaattacgctcaagggcaaggtgacaatcaccgccaagtctggagtgaagttggaggttccagatggagctgtatttgaaaacaaggatgtcaatggccctgaggatctttaagctatgcttgccgtcaccagtttttcccaaggatttgtcaataggagcagccaacccaaatcactcccactgagctctaccttttgtaattctcgtgccattccgctcccgctgtgagggtcctgtgagcccgctagagaatatgactgtaatcttctttggtgcgtctgcccttctgtttttgtgcgccagggacgtatattttgctgaaatgatactaccatagctttgcgtgccggaggtgctatgtggtgtttctgtgcgtttggttgcaatgataggacgggatgagatgagaccctcaaattaggttgtttggttctgggtcaaagattgagacaagaatatcctagtattgtttcatgttgtcctttaaaattggag

SEQ ID NO: 12686 - DNA, 2916 bp, Zea Mays
tgacagtagtgttcgggcccgatcgactgctcctagaagcttcggccgcgcctctatctcatctccttcctcctgttgagcccgccggcctcccacagcttactacgaaaaccctaaccccttcccttatcctctgctccctctccacgtttccacgaacgttggcgcgcaagctcgtggtgtgagcggtcactgtctcccatcccatggctccggcgctgagcgggactctgggcgcgtcgtcggtggcggcgctgcggccctgcgcggggaggagggcgccgtccgccgcgagctcggttgcgccgcgcgggagcggggtggtgaggtgctccagagggctcaggtgggacgcccacagaagcagggggaggttgctcagggtgaggtgcgatgcggccgtcgtggagaagcccgccggggaggaggcggctggggagaagttcgagtaccaggcggaggtgagccgcttaatggacttgatcgtccatagtctgtacagtcataaggaggtatttctccgggagcttgttagcaatgcgagtgatgcgctggataagctgaggttcctcggcgtcactgattcttctttgcttgctgatggcggcgagctagaaataagaattaagcctgaccttgatgctggaacgattactatcactgacactggtgttggtatgactaaagatgagctcaaggactgccttggtaccattgctcagagtggtacctcaaaatttctgaaggccctcaaggaaaacaaagaccttggggcggacaatggtctaattggtcagtttggtgttggattttactcagcttttcttgttgcagagaaggttgtggtgtccaccaagagcccaaaatcagataaacagtatgtgtgggaagctgtggctgacagtagctcttatgtcataaaggaagagactgatcctgagaaaatgcttacacgtggaactcagattaccctgtttctaagacctgatgataagtacgagtttgcggacccttcaaggattcaaggcttagtaaaaaattactctcagtttgtgtctttccccatatacacatggcaggagaaatcaagaactgttgaggttgaagaggatgaagagccgaaagaagttgaagaggcaacaaagggtgagaaaaagaagaagactattacagagaaatattgggattgggaactagccaatgagacaaaacccatatggatgagaaatccaaaggaaattgagaacaccgaatacaatgagttctataagaagacattcaatgagtttttggaccctcttgctcacactcacttcacaactgagggtgaggtggaattcaggagtgttctttatgttccgggcatggcgcctcttagtaatgaggagataatgaaccccaagaccaaaaatatccggctatatgttaaaagagtattcatctctgatgactttgatggtgaactgtttccaagatacttgagctttgtgaaaggtgtggtggattcaaatgaccttcccctcaacgtttctcgggagattcttcaagaaagtcgaattgtaagaattatgcgcaagcgacttgtcagaaagacctttgatatgattgaagagattgcggaaaaggaagataaggaggactataagaagttttgggagagctttggcaagtttatcaagcttggttgcatcgaggacacagggaatcacaagcgccttgctccattgttgcgcttccactcttctaaaaacgagggagatttgataagtcttgatcaatatgtagagagcatgcctgaaagtcaaaaggcaatctactacatcgctacagatagtctccagagtgcaaagactgctcctttcctggaaaagctggtccagaaagatattgaagttctctaccttattgagccgatagatgaggttgccattcagaacttgcagacctacaaagagaagaaatttgtggatatcagcaaagaggatctggaattgggtgatgaagaagaagagactaaagaaaccaaacaggagttcactctcctatgtgattgggttaaacaacagcttggcgacaaggttgcgaaggtccaaatatcaaagcgtttaagttcatctccatgtgttctcgtatctggcaagttcggttggtccgccaatatggaaaggctcatgaaggctcaaacacttggtgacacatcaagtttggaattcatgaggggaagaaggatcttcgaaatcaaccctgaccacccaattatcaaggatttgagcgctgcttgcaaaaatgagcccgaaagcacagaagccaggagggctgttgagctcctatacgaggctgctttaatctcgagtggatatactccggagagtccagcggagttgggtggcaagatctatgagatgatggcgattgccctcggcgggagatggggaaggtccgacatggaggaggccgaagcgtcgacgggtgaggccagcgcagaggcagactcatctgaaggcaccgtagcagaggtgattgagccctcggaagttagacccgagagcgatccgtggagggaccagtgagttctcccacgggcatcctttgttagaactccatatttagcagtgccggggaaaaaaactaagccatgggcaagaacatatttggtcacagttgcttctatatgggttcttgccgtggcaattttttgtaggcttagactttgccggccactaaaatcttattgaggaggtagtggccttagaaaagaataataaagcatgaagactgatgattacatagcaaaattgtgctgtccctctcaataatatttataatgaaaagaacttatttctgcaagcagctgtctcctcccccctttatatacgtacgtagttgttaatgtcagactgcctctttagatcagat

SEQ ID NO: 12687 - DNA, 85 bp, Zea Mays
caacaatccagcaacccaagttgactgggagacgatggtctagacctctcacgaactcgtcatagcatcctccatgcgcctcatc

SEQ ID NO: 12688 - DNA, 186 bp, Zea Mays
tcataacataagcatacatgtatttgtaattgacttgtagaacacctagaggaagtggtgtttgaaggagtctactccaatgcctgcttatcaagtggatggagctatttaactaaaggttgggtagaaggattttgggatcttctcctgcaacaaggcaagccccggtgcatttgccaccctcct

SEQ ID NO: 12689 - DNA, 1155 bp, Zea Mays
cagcaaacaggctatttacaacagttcgagattccatgggattaacatatgatgtttcttttgaattaaacctttttgacaaattgggtcttggttggtatgtaatcgcggtcacttcaactcccagcaaggtccataaagctgttgatgcctgcaaaggtgttctgagaggattacatagtagtcgaattgtggaaagggagcttgaccgggcaaagaggacgctgttgatgaaacatgaggctgagacaaagacaaacgcgtactggcttggtttgctagcccatctacaatcttcatctgtaccaagaaaggatgtatcatgcatcagggaattgacgacattatatgaaagtgccacaattgaggatctgtatcttgcatatgagcatctgaaagttgatgattcttctttgtttgcttgcattggaattgctggcgctgaatctggtgaagatacaaatgatgatgagcttgatgtggatcttcatggcatggctcccatgggaggccggggtctttcaacaatgaccagaccaaccacatgatcaccattgggatggccagcccttccaaggtgacatattaaatgctgtgttactgcatcatggacaagttgtgctgaaacctactcggaattggttgtggatctttatatggattttaaccttgctcctgaagacaggagccacatggccctaggagactattctcgtttcccagcaaaacggtttaaagataattgaaacattggatctgtatctggggagactattgtttgtttcctatgagccacaaccaaaaagcttggccgttgcatttccccccgagaagaagcgttggagttaatgactcgcaaggtcgtggaaaggagataatatttttcgaggtcattatgtagcttggcatgtacaggaaagcaggctgattcttgcatacagcagttgtaactaggtcgttgagggcattgaagataggatgacagtagaatcacatataagttgctggtctgcgaattcggaaataatgatgaaggcgtaggctagtaacattttggtgttattctttttttttttaatcaaaaaattgtagcctttgttaccggtaataaatagatccatagctttgatgaaaaaagaaaattcaaaaaatatt

SEQ ID NO: 12690 - DNA, 158 bp, Zea Mays
acacctgggccttgtacacaccgcccgtcacactataagagctggctaggtttgaagtcattacccttaaccgtaaggaggtggatgcctaaggctaggcttgcgactggagtgaagttgtaacaaggtagtcgtactggaaggtgcggctgcatcac

SEQ ID NO: 12691 - DNA, 175 bp, Zea Mays
tgcgattctgatcagcttggtgttgcatctgaagtcctgtcacctgatgctctagtccaataatctgtttcgcttgaacctttgtttcctcaagtcgttcttgtgcttgagtacaagcactattcttggccatttccatcatcttaaatgctgcataactcccagtgtacaactg

SEQ ID NO: 12692 - DNA, 823 bp, Zea Mays
cacacaaaagagagggtctggtgtgtggatgattccagtcctcctcctgttctttgtttcccgtcccatcgtgtgtgagcgcgtctgctggtctgccaagaggaggaaaggaaggaggagcaagtagagatggcttgccctgcgcagtccatgctctccgccagcggctgcatcttcctgaggagcaagcctcaggcggcatcccaagtgcgagggggcatcatcggcggtggccgcagcagcaggccgttcctgctcacctgcaacgcttcctcttctccgtccccttcctcgccggcgccggcgcaggaagaccccgactgcaacgaggaggagtgcgccccggagaaggaggtcgggagcctgagcgccgagtggctggccgaggagaggacccaggtcgtcggcactttccctcccaagaagaaagggtggaccggcttagtggagaaggacaccgccggccagaccaacatctactccgtcgagccgatggtgtacgtggccgagagtgccatcagctccggcacggcgggtacgtcggcggagggcgccgagaacacggccgccatcgccgcggggctcgtcctcatcaccgtagccgcggcctcgtccatcctcatccaggtgaacaagagccaggtgccgcaggtgccggaagccgcctacagcggcccgccgctcagctattacgtcaccaagttccagccggcggtggctgcgccggcgcagaccctcgaggcccccgcccccgacgaggcacaagacggcgccgccgccaccgtcgaggctccggaggtaccggcaccgcagctgtcgtttg

SEQ ID NO: 12693 - DNA, 925 bp, Zea Mays
agcccgatgcgaaaatgcttgaagcctccaagaatctgggtgcaccgctgaggcgctgaccaccacgcaccacctcaccagatctttcttcctgttgcttcctcggctggtttccttctctcgccgcgtcgcctgcttcttcccccaaccaaagacacgaatcagccatggcgctcgcctccgccacgtcccgccccctcctcggtcgcccccgccggcaccgcgcggccccacctcgccgtttcctcatcctcccccgcctcctcgatccgcttcccccgcggcgccgacggcggcgccagcagagcggccgtctctctccgcgcccccacgcctccagcggcggcaacagcaacatctggtagcattgctccagcaatttcattgactgaaaaggccttgaaacatctgaaccaaatgagagctgaacggaatgaagttttgtgcttgagaattggagtgaaacagggtggatgctcaggcatgtcttacaccatggaatttgaaaatcgagagaatgccagccctgatgattctgttgtagagtatgatggttttgcaatagtctgtgaccccaaaagccttcttttcatgtttggaatggagctggactacagcgacgccctcattggtggcggcttcttgttccagaatccaaacgcaacaaaaacctgtgggtgcggcaaatctttcgcgactggaaaggagaccgaggccgcggcaaccacttgcaacaactagagtagagaaatattgttagctaaacgtgatgtggcatgttgtatagcttgctcatgttgaagccctgtggctacaccacagatacataaagaggcatagttcaaaggaattacaccattaccaatggcctaattcagattttcttgtttggtgatcattccgaagtccttaaacttgaaaacaa

SEQ ID NO: 12694 - DNA, 1896 bp, Zea Mays
ctgagatttcgtgcatgctggatggtccagaggacactaggcctcctaaggagttatgcacatgtcagaagctacaacagtcaactttcagctttggtttctgctacatctgaatgctcaaatctgccgagaagatgctattacttacctaatccctctccataccaagtttggagtaggtcatttgcttcagacaacggagacaagtttgaggctgttgtgcccttcatgggtgaatctgtaactgatggaactcttgctaacttcttaaagaaacctggagacagagtcgaggctgatgaacctatagcgcagattgaaactgataaggtcactatagatgtcgcaagtcctgaggctggtgttattgaaaagctcattgctagtgaaggcgacacagttactccaggcactaaagttgcaatcatatccaagtctgctcaacctgctgaaacacatgttgctccatcagaggaagcaacttcaaaagaatcatctccaccaaaagttgaagataaaccaaaggtagaggaaaaagccccaaaagtagatcctcccaagatgcaagcaccaaagccaactgcaccatcaaaaacatccccttcagaaccacagctccctccaaaagaacgagagcggcgggtgccaatgccaaggctcaggaagcgtattgcaaaccgtcttaaggattctcagaacacctttgcaatgctgagtacatttaatgaagttgacatgaccaatttgatgaagcttcgttctgattataaagatgaatttgtcacaaagcatggtgtaaaattgggtcttatgtcttgctttgtcaaggctgctgtttctgcacttcaaaaccagccaattgtcaatgctgtcattgatggtgatgacatcatatacagagactacgtagacatcagtgttgctgttggcacttccaagggccttgtggttcctgttatccgagatgctgataccatgaactttgctgacattgagaaagggataaacaaccttgcaaagaaagcaactgagggggcgctctcaattgatgacatggcaggtggaacattcaccatctccaacggtggtgtctatggaagcctcctcagcacacctatcatcaaccctccacagtcgtctattctggggatgcattccattgtgcaacgccctgtggttgtgaatggtgacatccttgcgaggccaatgatgtaccttgcgctgacttacgaccacaggttgatcgatggcagagaggctgtcttcttcctgcggcgcatcaaggatgttgtcgaggaccccaggaggttgctgcttgacatataaattcatgcaccagcgctgcgctgccctgccggactgttttgtgcaattgtgcttatctggaaataatgccatggaaatttttgactgatgaaaaagaattacttcctcagaaagacgaaatctgagctgaggataccgaggtttttctctatataatcgtagaagagcaaactcaactcaacatgaggtcatgtttaattttcggatctgagatgttccattacgggatgcagttcccacaaacagtcattttatttaatatgcaagagcaatagagctgctgcatttttgtttgttggttcacaatttcgcctccagctggccagcctgcaactcgaggaatctggattgtataatgtgacgttggagcggtgctgcaatcgcacgctctgttgaatggtctcgactttaaactcgtccaacgtaaagtaggaggaaagggtataagtgtataacaaaggtaaaatggatgaatcgaatccggaggaaagggtctaggagtttggtatgggttacacttttttatttcccatatttttttggttttgggaatgaaatggattggagtac

SEQ ID NO: 12695 - DNA, 810 bp, Zea Mays
cggaagaaaaagaaaaaaaatagagagtaattaaaccccgtcggacccaaacctctgaaagccccaaaacctaaacctagcttttcgtcagtacaacgcctccgccgctccttccattagctcagacatggttctcggcctctacaccttcgccgacatcgacgccgacggagcaccccgcctcgaggttgccgatggcgaggagttcgtccgtgtcgatcgcgttgtcgagcttgccctcggtccccgggtgctgaaggcccctggaaccctttacctcaccaccaggagggtgatttgggtcagcgatggcggcgagggctacgctgtggacttcgttgccatctcgctccacgccgtgtcgcgtgatcccgaggcgtatccatacccctgcatctacacacagatcgagacggaagctatttctgacgaggagtctgatgtgtcagattctgaaacaaatggagaactcgagctctcaaaagttatggaaatgcgcatcataccttcagatcctggtcaattggatgaactctttgaagcattctgcaattgcgctgagcttaaccctgatcctagtgctgagagtgatgaagaacatggctgggttcatggtgatgagggttatgaagatacggtagatggaagcgacactgagttttcagatgtcaacccaattggtcaaactggtgagcaggatattaaccatgctgtaatcgaggactgtaatatttgaagttcagatatagcctcccttggtagcctaagccattggatctgggtccttcgacgtttccaagttgattggta

SEQ ID NO: 12696 - DNA, 86 bp, Zea Mays
aaaaaaaattagttcatattacacttcaatacaccacataccacctcaatccactccaatctgagattacccaaacaagcccttaa

SEQ ID NO: 12697 - DNA, 753 bp, Zea Mays
gtgattgctacgagagcctaccatgatgttgcaataaatagatagtgaagccgttcctagaccatgagacccgcaagaaggtgaagtttgtgtactccaacgacaaggagagccagaagataatggcagaagtctttgacatggaggagctcgactcggcattcgggggaaagaacccagcgacatttgagtacaacagctacgcagagcagatgcaggacgacgacaagaagatgggatcttcgcacggctcagccaatagcttgcttggatcagctgggaaggaggctaatggcgcagactcggacgcctcaagcgaggcctccttctacagtggaactgactctccgacacatgagaacggtgaacacagcatcgcgaagaagaatggttgagctgagttgaactgctttgattgctcaaactgagggagctgactaatgtagttggtcaacataacagttatatctagcttgaacgattgtcaggaccgatggcgatgacagattccaggctggttagatcaccttgtcgggtctaggcggaatgtatatttgctgctcatgatattatagtatgtaagaccataaacggtgagtttgtgatgcgctatatatcttggaataaagttcaacttcttcgttttcttactcgacgtcgcaggagcccaacgtttttgcaatgcatgtatcacttccttcgttagggtttgttcggttaagagtggatcgaagatattaaagtgaattaaat

SEQ ID NO: 12698 - DNA, 864 bp, Zea Mays
cgcggcgccgctgacgtaggccctgaggccaccagggagctcgagccgcgccgtcgtcctcgcctccgacgtcttcgggtacgaggcgccattgctcagacagatagcagacaaggttgcaaaggcagggtacttcgtcgtcgtgcccgatttcttgaagggagactacttagacgacaagaaaaacttcacggaatggctcgaggctcactctccggtgaaagctgcggaagacgctaagccactgttcgccgctttgaagaaggaagggaagtccgtcgcggtgggaggctactgctggggagggaagctgagcgtggaggtggggaagaccagcgacgtcaaagctgtgtgcctttcgcacccgtacagcgtcactgccgacgacatgaaagaggtgaaatggccgatcgagatcctgggggcccagaacgacacgaccacgccgccgaaagaagtgtaccggttcgtgcatgtgctacgtgaaagacacgaggttccctactacgccaagatcttccagggagtcgagcacgggttcgcctgcaggtacaacaccaccgaccctttcgccgtcaagaccgcagagacggccctcgcctacatggtcagctggttcaacaagcacctcaactgaatcaagcctgcactgcacccaccagactgaattcaataaaccacagcagtgctgtgatattttgtttggattcatggctccccagattgatttgtcatggctaagacctctactactgtaatttccctcattttttgtctcttcaaactctctgtattctttttttttgcttttttatgaccgcaataaagttcagtaggggtatacccctcatgtttgcttcaaac

SEQ ID NO: 12699 - DNA, 79 bp, Zea Mays
ctctcgtacattatccttggtcttcacctccacctacacctacatctccacctaccgaacatcagatatgcaaattcat

SEQ ID NO: 12700 - DNA, 1441 bp, Zea Mays
cccccccccggttgtctctacctcctcacgacgcgaggaaccgatcaggtcactgccggacccgccggagatccgctcagcccgcgctattccgatccgaaacacctcgtcggatctccagggatctgacagaggaccagcgcgtcggctgctgacccggcggggcacgcgcgcacgccagccatggcgcgtggtggcggaggcgggtgctgcccgccgatggatctgatgcggtcggaggcgatgcagctggtgcaggtcatcatacccgctgagtctgcgcacctcacagtctcctatctcggcgacctcggcctcctccagttcaaaagaccttaatgcagagaagagcccgtttcaacgtacatatgctgcccagatcaaaaggtgtagtgaaatggctcgtaaattgaggttttttaaggagcagatgtcaaaagctgacataggtcctacacaactaaatgaaactcatctggattttgatgacttggagataaagcttggagaactggaagctgagctaactgaagtcaatgcaaacaatgaaaagttactgaggacctacaatgagctattagagtaccatactgttctccaaaaggctggtgattttttctattcagctcaaagaactgctgcatcacaacaaagggaattggaggcaaatcaatctggtcaaacttcactggagagccctctgttggaacaggagatgtcaactgatccatcaaaacaagtgaagcttggttcattgagtggccttgttccaaaggaaaaggcaatggctttcgaacggatcttattccgtgccacaaggggtaacattttccttaggcaggagcctgttgatgagcctgtcactgacccagtttctggggagaaggtaacgaagaatgcatttgttatattctactctggagagagggcaaaaaccaaaattctgaagatatgtgatgccttcaatgcgaaccgttacccattcccagaagatgttagcaaacaacttcatgctgttcaggaggtatctggaaagatctcagagttgaaggcaacaattgacatgggtttagctcatcgtgacagtatactaaaaaatattgcttctgattttgaacagtggaaccatctggtgaagaaggaaaaagcaatttatcacaccttgaacatgctgagcgttgatgttacgaagaaatgcctagttgctgagggctggagtccagtttttgcaagcattcagattcaagatgctcttcagcgtgctactgttaatagcaaatcccaagttggttcaatatttgaagttctcaacacaaaagaatctccaccaacatatttccagacaaataaatttacttcagcgttccaggaaattgttgatgcatatggaagtggaattaatgtcatttgaggtttggctcaagactgtaaggtggataag

SEQ ID NO: 12701 - DNA, 1922 bp, Zea Mays
ccgggggtcatttcaggtcaattattagagtaatggattaatgcattaagcaaggtaatgaaatgtaccaaaagtgacttatggaaaagaaacagagcttgttcactgctctgaatgaggaactttaatctgatgcagtctcaaaagagcagagttttgggagcaatgtcatcctctttgcctattctgccaaatcctttgaaagggagcttctcaaggcctcataacccccagcatattcctatgttgaggcagctgcctgatgactctatgcccttgtgtattgacacacatcagtctgctagtttgcacccaagagctggtgttatcggggtaccatattcaggctacactgctagtccacttgattctgtgtctaaccttgatagccagacaatggctgcaccctttatttctcagtcatccaattttgaagctctccagtctctatctaataataccccagaaacacacactaaggcagcctggttcacatcttctatggatgtttcaccactcaacacagataatattgctgcttctgatgttaatcaaatccagagtatacgtcctgctatgacatctgatgagagtgctacacaaaacgattggtgggcagatataatgaatgatgattggaaagatattcttgacgcaacagctactgattcccactcaaaagccatgattcaaatttccaactcagctacatcactacctgcagtaaatcagtcagcttcatctcatagtagggagatttgtcctgttgctagtcctcccaatagcagcaatgcttcagttgccaaacaacggatgagatggaccccagaactccatgaatgttttgtagatgctgtaaatcagcttggcggtagcgaaaaagctactcctaagggtgtgctaaagcttatgaaagttgatggtttgactatatatcatgtcaaaagccacctgcagaagtaccgcacagcccgctataaaccagacctgtcagaaggtacatcggaaaaaaggacagccactgaagagctggtcctggacctgaaaacgagcatggatcttactgaagcactgcgccttcagatggaagtccagaaacggcttcatgaacagcttgagattcagcgaaaattgcagttgcggattgaagagcaaggaaagtatctgcagatgatgtttgaaaagcagagtcaatcgagcacggagaaagtccaggatccatcctcaagggatacaacagctaaaccgtcatctaatcagagccagtctacaaacaaggattgtggtgcaaccatggacccaaatggaacaggaggcatcgtacggactgcagaactgggagaacgttcgtctgaattaggtgtaaaacagaaactcgtagagatcgaagaatctggtaccgaagtagccacaggcgacagatctaagatctcccaagagaagcggcgcaaactgcaagatagttaacatatcggttgcactattcagacatagctgttcaaaccgtttgcttggtgaaaaattggtaatctgtgtgtcgaattcgactattgatccgtgagtccattggtgagttgtaccgctcttcagttagccatatatatttataaaggatccaaaggaggaccaaaggagaacttcctggcagccgtctttataacattagcaataagagctatccccgaagttatggggtaaaataaggtcttgaaatttagctttgtttctgaattcctccttttcttttgtttgggttgaagtggtcaccgagtcgatgtagatgaccacatgaatgaatttatcggaagcaagctagtgctgttccctattggcatagaaaccaaatattgaaacacgaacactgtttgatggtgcaaacttttagaatgtaattctgcatcgatttgtttggtggtgttggg

SEQ ID NO: 12702 - DNA, 1090 bp, Zea Mays
gaaatttctccctcccttttacgctccgcttcccccaaacgactccctattaatcccccacgttccccttccctttctctcccgccgccgcacgcccctctcaaacctccgcgctcccgcccagctagggtttccccgatctcccctccttctcaaccgccgccgtcgccgagagcgccgccacgatgttggagctgcggcttgtgcaggggagcctcctcaagaaggtcctggaggcgatccgcgagctggtcaacgacgccaacttcgactgctccggcaccgggttctcgctgcaggccatggactcgagccacgtcgccctcgtcgcgctgctcctacgcgccgaggggttcgagcactaccgctgcgaccgcaacctctccatgggcatgaacctcaacaacatggccaagatgctccggtgcgccggtaacgacgacatcatcaccataaaggccgatgacggttccgacaccgtcaccttcatgttcgagtcgcccaagcaagataagattgcggatttcgagatgaaactgatggatattgatagcgagcacctcggaatcccggattccgagtaccaggccatcgtccgcatgccttcttctgagtttatgaggatctgcaaggatcttagcagcatcggagacactgtcgttatctcggtaaccaaggagggcgtgaagttctccacatctggagaaattgggagtgcgaacattgtttgcaggcagaaccaaactattgacaagccagaagaggctaccattatagagatgcaagagccggtttccctgacttttgccctaaggtacatgaactcgttcacgaaggcgtcttcactgtccgaacaagtcacgatcagcctgtcgtccgagctaccagtggtggtcgagtataagatcgctgagatgggttacattagattttacctggcgccaaagattgaggacgatgaggagatgaagccatgattgccatcagtgctcatgctgccgacttttcgtcgtcttccatccatgctgacaagaagggcgaagcgcaacgactgcggattgtcgaatcgtgtttaaacccccacttctgg

SEQ ID NO: 12703 - DNA, 1251 bp, Zea Mays
tccacggcctcaaaacggcctacccgcatagctagggtttcttctctgccccctccggcaactcaggagagagcgcggctcctacccggcggcggtgaagccgcgacgatccaacggagcagaggcgccatggctgctcccgaagcgcccgcatgctacgtcgggatcgcgcggcagtccgccgccttccgccttatgaaacaaatgggatgggaagaaggtgaaggccttggcaaagacaagcaaggcataaagggtcatgttagggtgaaaaacaagcaggacacactaggtgttggtgtagatagccctcataacaaatgggtatacgataccacccaatttgacaacatattgaagaaactgaaagtgcaatcagctaatcctgttcaagaagaggttgcagctgtagaaagtgattcacctgacatcacacccaagaaagacaaatcagcaaaacatgaagttactaaagttactcgacctcaaggaagatacaagaaaagagagagggggaaaagtgtgaactcttattcagcaacagatcttcaaggcatactcgtacgcaaaaatgaagataattccaaagtggatcagaaacttgaaccgacatgcttggatgaacctgatcccatcatctgtttggatgcagtatcccaagctgatgatgtgaactggtgggggcacaagtttggatttttatcaggagggtttctaggagcaaaatcccgtaaaaataaatcttcacaaaaagatcttgctaatgtccgccagacatttgcagaggaagatcaagaaaatttgtacaatcttgttcaggttgctacttctggaaagcagggtcttggcatcaaaggcctgccaatgaaagttgctggccaacgttggaagggaaacaaaacttcgtttgttgatagtgatgatgataattcagcccagtccgatgagtattcagaaatcgaagagaatggcgatgaggaagaacatatcagtgcttctgaatcaatagacacagataagaatgcagacaaagaattgcttgtggatgctagacccaaaaccaaggtcaagaaactttgcaaaagaatacttcgtcaggccccatctcagtcaatgaaattgaaggatcttaaggtcgccgttgaggaacactcaaatgttgtattttccagcttctctggtagacgcgaagccctgttgtttttgaagaaaaagctttatcaacagctgaatcttgaatgcaaagcttga

SEQ ID NO: 12704 - DNA, 740 bp, Zea Mays
ggatggagactgatttgctattaattgaataacttcgataagatgggtcgtggtattagcagtgggggtggtcagagttccttgggctatctctttggcagtgacgaagctccaaaatcatttgagaagcctgcaccagttcaaaagccaactcctccatcctctgcagagagactaaaagatatcgctgctggtattcaaagtagtaaatcaaacaattacaaaagatctgaaggccagaactgtggaaatttccttacggaccgtccgtcgaccaaggtgcaagcagctccaggtggcgactcttcactcggttatctttttagtggcagcaaagatggcaagtgatgtacacctgctgttagtgttcgccatgatcatgggagaaggtttctgcttaacaaaggaaaaagggaaaagaatcttgtattcccatgagtaaatatcaaactgctcatggtatctatgttgttgggattgcttgtatgtgtgtacatgttcgtgtgtgtcgtgtgttgatccacagctactggtagcaagagcttctatccctgctgatggaattgtgcgcaatgccaatgttgacattatcgtgggtgatgctattatgttgtggtgtattattggatatgtttgctgtttaatacacattgttgtagaaaaaaacatccacagttctgttcaatttcagagtgtcctgttcaattttcaccgaaggggtggtatgcgccgaatagttg

SEQ ID NO: 12705 - DNA, 249 bp, Zea Mays
caaaccctgacttcattattttcctgacttcaaatagaagttttaaacatgacatcaggagcacagcaagctctgcgaagaacaatggagatctattcaaacaccactagatttgcacttgcatgcaacacatcatcaaagataattgaacccattcaaagccgatgtgctatcgtcaggttctcaaggctctctgatcaggagatcctcggtcgcctcatgattgttgtggcagctgagaagtgttaa

SEQ ID NO: 12706 - DNA, 3232 bp, Zea Mays
cccgaatcctccagaaaccgtgtgctccccgaagcagtttagatatcttcctcccaaccttccctgccaaatcgcggtcactgctccgaagtccgaaccttcatacacatcgtctcgtttccgatttccccaaattcaggccacaggcgctacaggacccaggcaccactcggtcggcggccaccgcgtcgccccgcctgctcgattggggtcgcgtgtgcgataggaagttcgtcatacgcctcgcggtttttctagtttccgttttgatttctatgcgcccaatgttttgtccgattgattgatctgcttaggtacgtgagactgtctctattgttcgtgagtgcgtagatggtgggtgagtctggttgtttagatttgtgactggttgctcgacttgattgtgctgactgattgtttcatctatcgtgtaagctgtattaatgtctaatcccttaattgctttgaaaccactgcatgtgcttgattagtttggtttgtaccgacagcttttggtgcctatttgtgatgagattgaacatcctgctgcttgtgtttaatcttctaggttcgtgttcttgctgtatgcgtggttaatggttgactagtacttctctgatgctgaggatgattgctattgattgactagaatttaacatttccctgtggggaagtaatctcctatgttctgtcgaaagcagcacactctggcaactgtattgctgcatatattttccgtcaaaaaaatatttgctaaacatgaaaaccacacttattttgccttttcatctctccttgtggcacaatactatggcccagttttgaacctatggcccaacactcttagctaataactcaactaattgttaactaactcgcagctaacaattagttcattagctgcctcaatccagctaacaatttgttagctggctaactattagatttaggggttccaaacatgactgtatcaattgacttcctctgttggccgacctttgcatatatcatcaatgagcagaaaaaaaacaggttttgtttttgctaaattaaggagaagtatcgctcgaatttagcatcgtaatgggggaacacatcatcttctcgatgaattccgctatatgccccagctatacccagatgagaacaggaagggacagtttgtggactacttgcaggctattgatttatgtattctttggtaaagaatcgggaagggcatttttcttatgcaggttgcataaccactggtgatatgagatgatctctattcgcttggaaagtagagataggttaaatttcggtctgaacggtgaaaccttaaataaaatcttaggatgctgtgtgagagaagcatgctggctccctcaaaggtatgtttgattgaagaatcaacggattgaaaatctcttatggatagaagtgcttattaactaaagattttgaagaagaagctgctgtctgctggaggtaggcttccttgaaatctaacgtcttaatgaacctttaagatcataacaacgtgcacgagtggtacatgctaacacgtcgaaacccttgtcacgaaagaatcatgtttctttcttccttccatttcctggcatttgatgctatgatgtgttcctcttgccagagaatggtgtggacaacgcggtaaatttggtgcagatggatggtgtgttcaaattgatcggagttctctggatggatacctatcgagtagtataattcctctctcagctcactgtccagacaattagtgctatctgtgactgttgggcaatcaggttatcgagattttgctggttggagctgtccggcattgctttcatcttttatcaatatgccggtctttggcagcatatggcgattcagaactgtgcgcagtggtttcctcgaatttaggaccccccaactgcattctgtattgagaacattcctgctaaatacatgatacttgcaggtattgtgttgtgtttgcaacgtgatagcttgtactgggaacaaaggtcaagatgggcgccttggacctacaccttgactttgcttctgctcaacatggacaagccaagttaaaggaatatgccaagagctctttgttgtctgatggaaactacaatacagacaagatcaatggttcaaaccctgatgactatgagaaatttgagaaagggataatgcactatgggtgtccacattatagaaggagatgccgcataagagctccttgctgcaatgaaatttttgattgccgacactgccacaatgaaactaagaattccattaaaattgataaaatgaagaggcatgaacttccacgccatgaagtgcagcaggttgtatgctcattgtgtggcactgaacaggaggtgcgacaagtatgtatcaattgcggtgtttgcatggggaaatacttctgtggtttgtgcaaactcttcgacgatgatgtctctaaacagcagtatcactgcaacggatgtggaatatgtagaatcggagggagggagaatttcttccactgttcaaaatgtggatgttgctattcaattgcgctgaagaatagtcatgcatgtgttgaaggggcgatgcatcatgactgtccaatctgcttcgagtacttgttcgattcgacaaatgatgtttccgtcctgccttgtggtcataccattcatgtaaagtgcctgaaagaaatggaagagcactgccagtttgcatgccccctttgctccaagtcggtttgtgacatgtcgaaggcatgggaaaggctcgacatggagctggcaactctgtctgactcctgtgatcacaaaatggtccgcatattatgcaacgactgcggggcaatatcagatgtgcagttccatttgattgcgcacaagtgccagaattgcaagtcatacaacacccgccagatttgaagtaagaatcgcaagtcacacaacaccgtcagatctgaaatagcaaatcctgtgggggtttctgcatttcttcaagaagcgtgatggactgatggccccttcccgtgagctgctgagcaccgggatatctggcaagacactcatcactgtatccactccactgggtcctgcggaggcaaacagctcgagattgtatatctgctgctagctgccgcccttcgttatgcataagcctactcttgccgttttactcctgtcgctccgtgattctagtgtaataatgtcatatttactgttgcttcaaaaaaaaatga

SEQ ID NO: 12707 - DNA, 2592 bp, Zea Mays
ccctgcctctcctccatctcagcctcgcgatcgaaccctcgccctcttgcttcccttcccccacctccgcctccgcgccgttccgtcctcccactcctcatctcgcgattggcaaattctagggtttcgcggcggccacccggatccagctcggcttcgcgagcgcctctaaagcttcaggtcacgagagggcgctttgctctctccctgtcccgccctcaccgcggccgccgccacgacgacgacgacctgcggtgcgcctgtgcctgggttcggatcgtccggcgcctctccgttggccactggataccagctcatgatgtggaaatctcagctctaaatccgcttgggttgtgatatcgtgacagtgtgggtactgacataactggcactgtgcaagatgttttggcatgtgccgggactctccgctgcatcaccggttgatactattttggacaaggaaaattttaagttggaatgtcttcttgatgaggatgaaataattcaggagtgcaaagcactgaatacccgcttaatcaattttttgcgggacaaggttcaagtggaacaattactccgctacattgtagaggaggctcctgaagatgcagaaaagaaaaggatatttagatttccgtttatagcttgtgaaatatttacatgtgaagtggatgtcatcatgaagacattagtggaggatgaagatcttatgaatttacttttctccttcctgaaacctgaccacccccatgggacattgtcggctggttactttgccaaggtagtgatttgcttgatgatcaggaagacactcccactagttagttatgtgcagggccatcctgaaatagttagccaacttgtcgatcttattgggattacttctatcatggaggttttgattcgcttaatcggtgcagatgaaactatgtattcaagctatgcagattctatgcaatggttagatgacatacaagtccttgagatgattgttgacaagttcagcacatcagattctcctgaggttcatgcaaatgctgctgaaatcctttgtgcagtaactagatatgcccctccagcacttgctgcaaagatttccagtccaagctttgtggggagattatttcaacatgcttttgaagattcaaggccaaaatcggtgctggtccactcattatcagtgtgcatatcgttgttagatcctaagagacttgtatcggcttcctatcaggctttccgtagtcagttgagccatggaacacttgtcaccgcaagtccagagacagtaaatggcatgctggatagcctaggggatttattgaagctgctggatgtttcatctgctgaaaatgttctgccaacaacatacggtagcttacaacctccactcgggaaacatcgcttgaagattgttgagttcatctctgttcttctatcaattggtagtgcagctgccgaaacacgactgattcaactaggagcaatcaagcatgctatagatctattttttgagtacccgtttaacaacttcttgcaccaccatgtcgagaatatcatcggctcatgtttggagagtaagcaggatcgactgattggccatgtccttgatgactgtaaacttgttacaagaattctggaagcagagaagaactctgctctgtcgtcagatttaactaagcatactatgtcttcagagggaagatctcccccaaggataggaattgttggtcatatgacacggatagctaacaggctccttcagctggtcaacacaaacatcatggttcaatcacatttgcagcaaaattctgattggattgagtggcatgccagtaccctgacgaagcgtaatgcattagaaaatgtttaccagtgggcttgcggtcgaccaacatcactgcaggatcgtggtagggatagcgatgatgaagacttccgagatagggactacgatgtggctgcacttgctagcaatttaagccaagcatttaaatatggtatttacagtagtgaggatattgacgaggctcaagcatcacttgagcgggatgatgaggatgtatattttgatgatgaatctgcagaggttgtaatctcctcccttcgccttggagacgaccaagaaagtggttcgctctttacaaattccaattggtttgcatttgacgaggacaaggcactgaatgatggtttggttagctcagaagcatccccatctccaaattcggaaatatccgcactaaaagaggatgatgaacatgatgaagtcattcttggcgaaattatagatgaaataaaaggttctgaaccaactctaccagtcttcaacaaagatgcaaacaaagaatctggttccaccggcttggcaaatggtaccgttgacaaattcgaagatgatatcagaccaccaactccggatgtaaaagagagtcaacctgagtttgttgaatggaaggaggaagaagctgaacctggtgatattgccgagaaggataccgcagttcctgatattgaggttgaaaatgagaagcagctggattccatggatgatcattgccagctcctgaggcactgtcccctgagctcctcgac

SEQ ID NO: 12708 - DNA, 74 bp, Zea Mays
atgccgaagctcagccttaagggactcattaccatgctcatgagcttctccctcttctttttgtcagccttcac

SEQ ID NO: 12709 - DNA, 1169 bp, Zea Mays
ggctgtttcagaattaatagcccccaagatttttttattccacgcccgtttctaaaaagggagagtatggccgccccagcgtcgccgtactgttcccagatctcttgctaggagtagcctgccccgtgtgcgcgctcgcacggacatgcttgtttccgcgtcttgaaaggcgagaaaaagtggagatgggcgcttgcgcttcggtacacaaggacccggggcaccccaagaagcagtttcttgactctcccaccaaggcgaaggccgccaacgggaagggtggcgggggcggcggtgttgctccggttggtgatggcttcggtgatctcaagtccaaggtcgacgctgaggctgagcagctgcgggcagagtttaaccccaagaacccggattctggtagcaaggatgaagtgttcttcgaatctcgagcctggttagattccgactgcgaggatgacttctacagcgtgaatggagatttcactccgtctcgtggcagcacacccgtctaccagcccagagcgcagacggtgatgagcagcatctttcagccagacacgcgcagttccaaatcaccggagccttctccgaccggacggaggaagctcgctgagctgctgcaggaggcaatgcaagacggtcccgaagaaagcgccgacgaggaggagcagcagcagcagtcgctatctgctgccgctgatgggaagccgccggtgtctgagtccacgtccagctccgcttgcagcaccgtgccgactccggtcgcagtcgccaagagccggaaggagaaggcgtggtacaccggacgctgttgcctgccgagctttgttcatagcctgaccttagacgagagtgagagggggcagaagatgagctctaggccatgtgctgtttgactgtggggctccagtgccctcctgagtcctgccctgagctgtatttagcgcgatatgttatctgaatgcccgattgggacgctgaagctactgtattgagagtactatatagtaatcaagtggataataggcactcgttaaatcctgtggagaccatgtgtatgtgtcgaccaatttgcgcgggtagagcatctacctcaaggaattgcccttccctgtgcatgtctaactgaatctttgaataaataaacacactgtataatttttcagatg

SEQ ID NO: 12710 - DNA, 886 bp, Zea Mays
tattttcatagggaagcgattgggaaaattcttgcccgtggtcatagtcgtgttcctgtatactcaagaaaccctaaaaacatcatcggtctcctattggtgaagagtcttttgactgttcgtgctgaaacggagacgccggttagtgctgtttcaattagaaggattccaagggttccttcagacatgcctttgtatgatatactcaatgagtttcagaaaggaagtagtcatatggctgctgttgtgaaggctaaacctaaaactgaaccaccgcctgacagaactgaaccaaatagggaagcagttgggccagcacaattgactgttaccttgttatctaatgctgaagaaagtgcagacaatgtggttgtggatatcgaaagaccacataacaggcagattaatgggatcccagcatctaacgcagtgcctaggtcatcagaggatattgaggatggtgaggtcgttggaatcatcacacttgaggatgtatttgaagaactcctacaggaggaaattgtggatgagactgatgaatatgttgatgtccataaaaggatccgagtagctgctgctgctgctgcatcatcggttgcaagggctccatccgttaggagattaacgggccaaaaggctgcaaaccttcagggagcacagaatcgccaaggacagcagcctcctggaattctcaagaaacctactgagggtgattcaaactcatcaaaacaagtgaaccttgtcgaacctcttcttgaaaagaggaggtaactctaaaaacgtagccgataaaacgcatggaatcaagccggaagagcctatggttcttgctattataacaagagttcaacgtgaaaataagagaatggaatacgtttagttgaac

SEQ ID NO: 12711 - DNA, 95 bp, Zea Mays
tctagttgtatgtattgctacgagtagcagcgaagtcacaagaaacccgaagacttacttggagaagtaccaggaatctcaagtcataggcaagt

SEQ ID NO: 12712 - DNA, 650 bp, Zea Mays
tcttgcttcgcctagttgctctgcttcgtctacttctcagcatcccccgaaaaactcgaccgcaagcgtgtgtacgcacggaccgcccgcccacgcacgggcatggcagcctccgcctccgcctccccctcatcctccacaaaccctaggtagcacgggagtccctcgccgccggatccccgagaccctgcaagccgcgccgattctgtgctgtgtgctccacggctagatttctgggtgtgaaagagcgcgtttttttaacagttcttagctagggagattttgggaagggagagtgctggaataatggagccgaggatcgggaacaagttccggcttgggcgcaagatcgggagcggctctttcggggagatctacctcggcaccaatatccagacgaacgaggaggttgcgattaagctggaaaatgtgaagacaaagcatcctcagttgctctacgaatcaaagatttataggattctgcaaggaggaactggaataccgaatgtcagatggtttggtgtagaaggagactacaatgtcttggttatggatttacttggaccaagccttgaggatctatttaatttctgcagcaggaaattatctctgaagaccgtgcttatgctcgcagatcagatggcacacaa

SEQ ID NO: 12713 - DNA, 51 bp, Zea Mays
ctctgccaggtaccaaactttgggttgtaaataataaagacgagaccgggc

SEQ ID NO: 12714 - DNA, 71 bp, Zea Mays
tacctagtaactgctgctcgtgagatccggatccaggggagaagttcatatctgtgtagagggaaggagtt

SEQ ID NO: 12715 - DNA, 550 bp, Zea Mays
aatcatgtttggcggagccaccagcggccattttagggatgacattgaggctgatgtttatgttcctgaagccgatatcctgtcagtcttagatgtgcctcctgggaaaatgggacgagttattggcagaaaggggtcaacgataatggctgtgaaagaatgttgcaaggttgaaatacatattggtggtgctaaggggcctccagacagggtgttcatcattggaccagagaaggaggtcaggaaagctgaggccatctttcgaggccgaatgctggagttctagagatgttaccctttgcgatacaggtttcaactgctttatattttgaacgtaaaaaggggaatatccaaaaggtgtatgcgggaccgtggatcccttgaccgtctgtgaatcatgaaaacaaaataaaggatttcaacttggcacttcgcgtttctggcctgttttcctcaacgcgtcaggatgcagaagcatgtttagatttcactctagcctccacctgtgcactaacatggtaacgatcgttgtaattgcggcgcattgatt

SEQ ID NO: 12716 - DNA, 1063 bp, Zea Mays
gacggaagctgcggtttgagctggtcgctcgcacagagccagggccaagggagagaccaatgcagtgctttatcaagaggaataagaacaactctacattctacctctaccttggcttcacaagttcacctgtggataaagggaagtttctcatggctgctagaagatttaggcgtggtccccataccgagtacattatatctcttgatgcagaagacttatcacaagggagcaatgcatacatggggaaactgagatctgatttctgggggacaaacttcaaaatatatgatagcaagccaccatatgatggtgctaaagcatcaagtagtcgatctagtcgtcgtttcggaagcagaaggattagtccccaggtatcggctggcaattatgaagttggacaggtttcatacaaatacaacttgctcaaatccagaggccccaggagaatgtattgcactctcgaatgcccttcagcccaagagacttgggaaaactcactcaagacaaagttcaggcgccccctgggccccacaactttacgaaataaagcaccccgctggcatgagcacctgcaatgctggtgcttaaacttccatgggcgggtaacagttgcatcagtcaagaatttccagcttgtggctgctgccgaccccagtgagcctactaccaacgtggatgatgaaacggttctgctgcagtttggtaaggtcgatagcgatatgttcacaatggattaccggcaaccactctccgcgtttcaagcatttgccatcagcctcagcagctttgggaccaagctagcctgtgaatagcgatgcagtttgatgctcttcgtgtggctatatggtttgtgttggtggttgcttgcttgtttcttgttgttacgatgtgatccgttcttcgttttagttgagtatttatgtactatttgtaccacaagagatgtaataaactattgtattgtcaaacggatttgttcaaggaaattatgtgtaatgaacttttgctctagttccatgcaaaagacaaaaaaaaatgctaagcaacagtaagaaaaata

SEQ ID NO: 12717 - DNA, 70 bp, Zea Mays
ctatgcatgtgcaccggataacttaacacgatccgtccgagtgtcccaaggaccacagataaaccactta

SEQ ID NO: 12718 - DNA, 1422 bp, Zea Mays
aacctggtgaaacatcggaatgctaatgccgaacatgtcgccactattattgcggggggaagtgatgcagtgacaggccacataatatcgactacgattgggggaaagaatggtgaaccaaagaggaccatcagctatatggctgagcgagttgttggaactggatcgtttggggttgtcttccaggcaaaatgcattgagactggtgaaaccgttgcaattaagaagggatgaacttttccttaacttagtcatggagtttgttccagagtcactttatcgcgttctgaaacactacaaagacatgaagcagaggatgccccttatatatgttaaattgtatatgtaccagatattccggggactagcttatattcatactgtaccaggaatttgtcaccgagatattaagcctcagaatatcttggtggatcctctttcccaccaagtcaaggtttgtgacttcgggagtgctaaaatcttgattaaaggtgaagctaatatatcatatatatgctcacgctattatcgtgctcctgagctcatatttggtgcaactgaatacacaacatctattgatatatggtcagctggatgtgttcttgctgagcttcttcttagtcaaccattatttcctggggaaagtgctgtggaccagctggttgagattatcaaggttttgggcaccccaacacgagaggaaattcgttgtatgaatcccaactatacagaattcaagtttcctcagataaaagcatgtccatggcacaagatcttccacaagagaatgcctccagaagcaatagatcttgtttcccgtcttcttcagtattcgccgaatctgcgatgtagcgcacttgaggcgtgtgctcattcattctttgacgaattacgagaatcacatgcaagactccctaatggacgcccatttcctccactattcaactttaagcaggaactagcaaacgcaccaccggagcttgtcagcaggctattaccagagcatgctcgacggcattcaggattcggttccttatttgggagtggaccgtagcccgtaggaaaatctcgttttaatgttgggctgctgtacgccgtcagagggcaatctgcatatcccaaatctaagttttagaacctgaccatcttgttgagaagttgccagccttagaaaaacccgaggtggcctcttgtgtccatgctctgccagtagcggcacataatgctggggggatggttaggtttgttaagcacagagggtaactgactgagctaatgtattttcacgttttatgtctgtatcgaacttgtacctgtgtaccctgtaccaatcgcagctgatgtaatcatgtaaatgcttctaaactacttcaagctattatgatggccaattcgcaattttacagtacaccaaacgcccca

SEQ ID NO: 12719 - DNA, 349 bp, Zea Mays
cctggtaatccttatatgcaaggttgacatgcgggcccgaatacgcgggaacaagggatactagtgatgtgcctgcaatatccacaatcagttttggtttctagccatgcttctgtgacattgaggtgtaatgataacatggtttagtttgcccgtgttctgtttttgataggtgaggggaactcacaacacacgtggcttcaattgatgaggggagtgcattcctgtctacattctatacatttgatattccctctgttttaaatgtttgacgttttgttactatgatctgtgcgtgtagcaaaagttaatctatggcccgtttggtttagccgtagattcctgaaaa

SEQ ID NO: 12720 - DNA, 2234 bp, Zea Mays
gagagagatctctagttttgtgttgcttcctcgacaaggggcgaagaaagctttagtagcattccagcattaattggtgctggtcaagtaacaaaagatggagctcttggcactgcaaatgcacctattcacatggtcacagcagaaacaggtcaatttaaggatcagctttggcgtaccttccgaagcattgcactaactttccttcttatctcgggcattggtgctctcatcgaagatagaggaatcagcaaaggccttggtctgaatgaggaggttcaaccaagcattgagtctaaaacaaaattcagtgatgtaaagggtgttgatgaagcaaaatctgaacttgaagaaatagttcattatcttcgagatcccatgcgcttcacatgtcttggtggaaaacttcctaaaggtgtcttgcttgtgggccctcctggcactgggaaaaccatgctagctagggctattgctggtgaagctggtgttcctttcttctcttgcagtggaagcgagtttgaggagatgtttgtgggagttggagctcggagagtgcgggacctttttgctgctgcaaagaagcgatctccttgcataatatttattgatgaaatagacgcaattggtgggagtcggaatcctaaggatcaacagtatatgaagatgaccttgaaccagctgctcgttgagttggatggctttaagcagaatgaggggataattgtcattgctgcaacgaactttcctgagtcgctagataaagccctagtcagacctgggcgttttgaccgtcatattgttgttcccaacccagatgttgaaggtcgacgccaaattctagaatcccatatgtcaaagatcttgaaaggtgatgatgtggacttaatgatcattgctagaggaacaccgggattctctggtgcagaccttgctaacttggtaaatgttgctgctcttaaggctgccatggatggtgcaaaagctgtcacaatggatgatcttgagtatgcaaaggaccgaatcatgatgggtagtgagcggaagtcggcagttatctctgacgaatgcaggaagctgacagcataccatgagggagggcatgcccttgttgcaatccacacagaaggagctcaccctgtccacaaggctaccatcgtacctagggggatggccctaggaatggtggcccaactccccgacaaagaccagacaagtgtgtcaaggaaacagatgctagcaaaactggatgtctgcatgggaggccgtgtggcagaagagcttatctttggggatactgaggtgacatccggtgcgtcgtcagatttccagcaagcgaccgcaatggcgagagcaatggttactaagtatggcatgagcaagcaggtcggccttgtctcttataactacgaggacgatggaaagagcatgagctcagaaacgagacttgcgatcgagcaggaggtgaagaacttcttggagaatgcatacagcaatgcgaagaccattcttacaaaacacaacaaagagctccatgctctagccaacgcacttcttgagcatgagaccctcacaggagcccagataaagaacatattagcccaggttcataacaaacagcaacatgagcatactatcgaagcaccacagaaggcctcagtcgcaccagcttcccccgcatcaccagctgcatcagctgctgcagcagcagcagccgccgccgcggcagcacagcaggcggcagccaaagctaagggggtggctggtatgggatcttagcacattagagcacccccactggtttgcattgtgtatatttcaccaaacaagcaaagctgttccagcaattaacgttcaacgagggtcctcggtagtatgctaaactgctgcagcaacagaacatactgattgtgtggaagctactgttcacgtgcctcgagtgcgaagcagaaacgaaaactttatgcattgtagtaggaggcacatttagctggtgattggatcagttttgtacccaaatcgaaaacaatttctgttgtttacaccccaagaattgttacatttcgatctgcctgccgccttcaccctaacagagcataaattgtaatacattctgaataagatgtcctgtgtgcttgaatacaatgtggcagctgccgaatcgattcgtcagccccttcgatgctcatttgttgtatgctatgttttgccaggctaaaacgatcctttgttcttcc

SEQ ID NO: 12721 - DNA, 1066 bp, Zea Mays
ttttttcatttagattaaaagtttgtgccgtgcccttgattgcaaccatgaagctgcagtttctgctgtagtgattttggtctgatgctcaaatataatgttgagtccgctgctcgcccgaccggagtgaggcggcgcggcgatggagcacgggtcgttgacagactcgacgtcgtcgactttctccatcatggacgaggaccacaccctcgccaactccgccagattcgtcctcaaccaggacccaagggtagcattttgtggatataccatccctcatccttctgagaagaaagtgaacataagacttcagacaacaggagatgcagcaaaggatgtactgaaagatgccttgcagaatctgatgattatgtgccagcatgtcagagggacaatggacaccgcggtggttaaccatagagcaaaaaatgctgcagaagaaatggatgttgatcagaactagaatgaacgcagtgtttgttgagaccaaacacaatatcattacagcttttagtactggtcagaagctcggagagctcagtcattgttccagttgtttgtaggagtaacggtcgtattcattggcttccacttctgcaatactgaaacttcttcagtttactgcataattgcttttagcaacatctatactactgcttatgtctttagtgtaggcgtccatattttttgttctgccatcgtgcggtctgcctccctccccgtgcccacagtccccaccgccgagcacagccgccgcgcccgcagtcctgcggtccccgccgccgagcacagccgccgcagtctcgccgcgcccgcagtgcgacggcggtgccggtgagggggagccgtggttctacttctgcccgtggcaggagcgggaggcgcggggcgggcggcccagccggacgacgctgttggggtactggaaggccgctggtacgctcggggccgtctactccgccgaccgccgcgccatcggggtgaagaagaccatggtgttctattacggccgcgcgccgtcagggaccaagaccaagtggaagatgaacgagtacatggcgttcca

SEQ ID NO: 12722 - DNA, 873 bp, Zea Mays
ggccacctcctgccatcccatcctggttcgattaggttggcatgatgctggtacatatgacaagaacattaccgagtggcccaagtgtggtggagctaatggtagcttgagattcgaagtcgagttgaagcatggggccaatgctggtcttgtgaatgctctgaagctgatccaacctatcaaggacaagttttcaggtgttacctatgcagatctgtttcagcttgccagcgccacagccattgaggaagcaggtggccccaaaattcctatgatctatggaagagttgatgttattgcccccgaacaatgcccaccagaggggaggcttcctgctgctggcccaccttcacccgcggaacatttgcgtgaagtattctacagaatgggcctgaacgacaaggaaatcgttgcactgtcaggagctcatacacttggacgtgcaagaccagagcgtagtggctggggtaaatcagaaacaaagtacactaaagatgggcctggtgcacctgggggacaatcttggacatctcattggctcaagtttgacaacagctatttcaaggctatcgaagaaagacgagatgatcacctcctagttctgcctactgatgctgtgctgtttgaggattcctcattcaagatctatgctacaaaatatgccaaggatcaggacacatttttcgaggactacgctgaagctcatgccaaattgagcaatcttggggcaaagtttgacccgccaaagggtatctcactcgagtagttgtggatggaggtgactgaacaggaagggtcatgtttctttgcgtgaccattttcgaaggtatggatttcatttcggttttcaaagtatggataacaaggttgaag

SEQ ID NO: 12723 - DNA, 1040 bp, Zea Mays
tctccgccgcgtcgtccgtcgaggtaaggtaaggtcagcatggtgagggtcagtgtgctcaacgatgcgctcaagtccatgtacaacgctgagaagatcggcaagaggcaggtcatgatcaggccgtcgtccaaggtcatcatcaagttcctgacggtcatgcagcgccacggctacattggagagttcgagtacgttgatgaccaccgatcgggcaagatcgtggtcgaactcaacgggaggctgaacaagtgcggcgtcatcagccctcgctttgatatcggcgtgaaagacattgagggatggactgcaaggctgctcccgtccaggcagttcggatacatcgtcctcacaacttcggcaggcatcatggaccacgaggaggcccgccggaagagcgtaggaggcaaggttctaggtttcttctattgaagaagctgagaatctttgttatggcctgcctgcctgtcttactctctcagactagagtacctgttattttactttaatatgtctctctcagactagagcgccttcttttacttgaatattggtgactgcattggtctttcactttaaaatcggtgactgcattgatcgaattatctgagccggttcttcagatactagttggcacaacccttagttgcccatggtaatttgagcagttcggattactaaaaagattagtcacggacatcttattttcccaaggtgctcaaacagtcaaactaactgcaccttggggtcctacatttcgtgcgtgcaaggcaaatgcgctgcaattcgcaagtaaacagcaaagcgaaatcttgaggccaacgtaggtataagcgtggtaatgggttggtaaagtgtttcataataataaggtgctgtttggttttttatatttgtaacatggggtgctgtttggcagatttgtaatgtgatggtaaccgataatgttgcattggatagcaaattagaaagtgatattggcctatttaaacttattaactaagttagagcctttatgggtgcttaaatgtagactgtgt

SEQ ID NO: 12724 - DNA, 574 bp, Zea Mays
ttttctgtgtcttatgcccttaccctgcatatattcgtgaagttttatattcctgtccaaggaagcaatgagcatgtatagcaaacttaaaaaccacccgaatagtgagatcagcaagaaagcaaacatgttcgtgttcagctttcaggcaatggatttcatgaaggtgagcagcattccagtgcccaaaagcacaggctacgagacgtacttcaccaaatttggcagcaagaagaattactacgcgagcttagaagagccggaggtgggaatcgagcagatcgtcccgtacatcatctttcttgtttcgccgatatttttagttgcttttgttgcactgagaaaatccttccaactatgaacagaaatcatggacgagttgctgaggttttaataccgtataggagcacatagcttggcaatagaagattattattatgatttttttgttttcatcaaaagagcaaattattttgtgtagctgagctagggactaatttttaatcccttttctttaggccctgttccaatcctataagataaattttagcagcttctttttagctacttttag

SEQ ID NO: 12725 - DNA, 1068 bp, Zea Mays
agataatgtcgcaagctatctccactatcttatactgcatagtgagacagtgaaatttggccatgtcacatttttctggaatggtaaccgctcgggatactttgatgaaactaaggaagagtatgtagaagttcctagtgacagtggtattacattcaatgttgcacccaagatgaaggcgcttcaaattgctgagaaagctagggacgctctcctaagtggaaagtttgaccaggtacgtgtcaacctgccaaatggtgacatggttggtcacactggggatattgaggctaccgttgttgcttgcaaggcagctgatgaagctgttaagatcattctgaatgctgtcgagcaagttggtggtatttaccttgttactgccgatcatggcaatgctgaggatatggtgaaaaggaacaaatctggcaagccgttgctcgacaagaatggtggtatccagattctaacctcgcatacccttcagccggtgccggttgccattggaggccctggtcttcaccccggagtgaaattccggaacgacattcaaatccctgggctcgccaatgtagccgcaactgtgatgaacctccatggatttgaggcccctgctgactacgagcaaaccctaattgaagtggctgacaactaaatactggccagctatgtccaattttggttctatagttttgagaagggatatggccatgccattcaataatttctgtttgcaagcacgttgctcaaactcaccaaaacattgagaaacgccttttgacttgcatttagatgctctatttataccgttgacaatcgtctcttctggcttttagcagtttgatggctatctttacttagctatataatgtatctgagactgcaaactttgtgtcagtcaaactgctcgaggttatatgctgtttgtgtgggtcatcacgtgtgattaccttcgcacgcattgacgcatgaattgtgttcaccattctaattgcaaggcattttgatgggctacaatgtttgggagcaagataatttcagccccttcattcgcctagctctcccaaataa

SEQ ID NO: 12726 - DNA, 81 bp, Zea Mays
gttgtaaagctgcgtttcttttccccttgttccgagtatcaggacttgttcgtcggtagcagaatcgtttatccgagcgag

SEQ ID NO: 12727 - DNA, 3865 bp, Zea Mays
gctaaactaaatgtaacattcagtattcagttggtgttataccaatggatgagtcaaaagtagtaatgaaaggacgattaggtcctggaatgatgataactgttgatctacagactggacaggtgcttgaaaacacagaagtaaagaaaactgtggcttcagcgagcccctatgggacttggttgcaagaatgcacacgtttgataaagcctgtcaactttctctcttcaactatcatggacaatgagactgttttgagacatcaacaggcatttggctattcaagtgaagatgtgcaaatggtgattgaatcaatggcttcacaaggaaaggaaccaacattttgtatgggcgatgacattccattagctgtgttatcacaaagaccacacttgttatatgattatttcaagcagcggtttgcgcaggttacaaatcctgcaattgatccccttagagaaggtttagttatgtctcttgaggttaatattgggaaaagaggcaacatcttggaggttggccctgaaaatgctgatcaggttgcactatcaagccctgtgctgaatgaaggtgaactggaaactctattgaatgactcaaaacttaagcccaaagtactgtcaacatacttcgatattcgtaaaggtctagatggttcacttgataagacaattcaggctctttgtgaagaagctgatgctgctgtgcggagcggctctcaacttcttgttctttctgatcgttctgaagcacctgaacctactcgtcctgccataccaatacttctagctgttggcgccatccaccagcatttgattcagaatggtctccgtatgtctgcttctattgttgctgatactgctcagtgttttagcacacatcattttgcctgtctgatcggatatggtgccagtgctgtgtgtccttatctggcactagaaacatgccggcaatggaggctgagcaacaaaactcttaatttgatgcggaatgggaagatgcccacagtgaccatcgagcaggcacaaaggaactttatcaaagcagtaaaatcaggtctgctcaaaattctttcaaaaatgggtatctcactgctctcaagctattgtggagctcagatctttgaaatttatggtcttggtcaagaagttgttgatcttgccttctgtggaagtgtatcgaaaattggaggtctcacacttgatgagctgggtagggagaccttatcattctgggtgaaggcgttctctgaagatactgcaaagaggctagaaaactttggatttatccaatccagacctggaggtgaataccatgcaaataatcctgagatgtccaagctgttgcacaaagcaattcgtgagaaacgtgataatgcgtacactgtctaccaacaacatcttgcaagccgtcctgtcaatgttcttcgagatcttcttgaattgaaaagtgatcgtgcacctattcctattggcaaagtggagtctgcaacctccattgttgaacgtttttgtactggtggaatgtccctaggagccatttcaagggaaacgcatgaagctattgcaattgcaatgaatagaataggtgggaaatctaattcaggagaaggtggtgaggatccaatccgttggaatcccctcactgatgttgtagatggttattctccaacacttcctcatctcaagggtcttcagaatggtgacacagccacaagtgccattaagcaggttgcatctggacgttttggagttacaccaacattcttagtaaatgctgaccaaattgagataaagattgcgcaaggtgcaaagcctggtgaaggaggtcaacttcctgggaaaaaagtcagtgcatacattgctcgtctgaggaactccaaacctggagttcctctaatctccccgcctccacaccatgacatttattctatcgaggatcttgcacagttgatttatgacctccatcagataaatcctaaagctaaagtatctgtaaagcttgtgtctgaagctggaattggaactgtagcttctggagtttcaaaggcgaatgcagacataattcagatatcaggtcatgatggtggtactggagctagcccaatcagctccatcaaacatgctgggggtccgtgggaacttggtcttacagaaacaaatcagacacttatacaaaatggattgagagagagggtagtacttagggtggacggtggattcaggagtggtcaagatgttcttattgctgctgctatgggagctgatgaatatggctttggttctgtagccatgatagctactggatgtgtcatggcacggatttgtcacacgaataattgtccagttggagtggctagtcagagagaagagcttcgtgcaaggtttcctggtgttcctggtgatcttgttaactacttcctctttgttgccgaggaggttcgagctgcattagcccagttgggttatgagaagttggatgacatcattgggcgaacagatttgcttaaaccaaagcacatctcattggtgaaaacgcagcacattgatcttggatacctcctatcaaatgctggattgcctgaatggagcagctcccaaattaggagccaggacgtccacactaatggccctgttcttgatgagacaatccttgcagatcctgagatagctgatgctattgagaatgagaaggaagtttccaaggcatttcaaatctataatgttgacagagctgtctgtggtcgggtagcaggtgtgattgccaagaagtatggagacacaggttttgctggccagctcaacatcacgttcaatggaagtgcagggcagtcctttggttgtttcctgactcctggaatgaacattcggctagttggggaggccaatgattatgttggaaagggtatggctggtggagaactggtggtagttcctgtagacaaaacaggatttgttcctgaggatgctactatagttggaaacacttgtctgtatggagctacaggtggtcaggtatttgtgagaggcaaggcaggagaaagatttgctgttagaaactctctatgtcaggcagtggttgagggcaccggagatcattgctgtgagtacatgactggtggctgcgtagtcgtacttggcaaagctgggaggaatgttgcagctggaatgactggtggtcttgcctacattctagatgaggatgatacacttgtcccaaaggtcaacaaggaaatcgtcaaaatgcagagagtgaatgctccagctgggcagatgcagctaaagggcttgattgaggcctatgttgataaaacgggcagcgagaaaggtattgcgattttgagggaatgggaggcctatttgccgctcttctggcaactggtaccgcccagtgaagaagactcgcctgaggcttgtgcagagtttgagagagtacttgccaagcaagcaaccacccaattgtctgcgaagtgatcgaatcagactacaggaaggtggtaggtgttttctatttgacacaaagtgatctcatcttatcacttcaagaaaatcgaagaccataaccggcgctctgaggcaccgaagtgcccgtctgaagactgcaactttgtggaggctctgcccaggccatctttttgagttgagctaacagaaccgagggttcttctcgacgctcgtgcacctaggtaacccctgtaaattggtttgctgacgctaggctgcaaggggcctgccctgtttgaactgctgtactgtacatgattcttggccgttgccctgtgtaattatgttttggttagctcgtaaatttatacgcatccaatggaggcatacaatgcaaaaaaataattaagatacaacaataa

SEQ ID NO: 12728 - DNA, 967 bp, Zea Mays
gcgttcttctttttggggcagactcaaattagtggcaggaattctggttggacaagaacaaaggcatgatctgtatggcactgtcgtccaaagcactggtgattactgggattgatgacagaagatactggcaacacatgccaacttcagaatcgagattccagtctgtagcctaccttcagcaaatctggtggtttgaggtggttggtgaagtcgatttctgcttccctgttggaacatatagcttgtacttcagggtccatcttgggaagttctacagacgatttggccgccgccagtgcacctcagagcatgttcatggttgggacaagaagcctgttcgcttccagctatcgacctctgacgggcagcaggcattgtctcagtgctacctggaggagcccgggagctgggtcctgtaccatgctggcgattttgtggcctcaaagcctgaccagctgatgaagctgaagttctccatggcacagatcgactgcacgcacacaaaaggcgggctgtgcatcgactcggttcttatctatccaaaagggaaggggtttcaccaggagagggtggtcaggtctcagaaatgagggttgtagatgttgtggaggtattcacattaggatgttagagcaaatgcagcttgcagcctgatcttatttttactttgggctctagttcgcagcagaggtgaagtgtatgtggttgtagaactcaggtattgtgtggtcaggtgaccaccagagtgctctgtcagtcctttggcaaggtcgttttcgccccccttcagctgaatttggacagcgagatagccatgaaactgtactgaaatgagttcgaaggtgtcattcccagtttctaatttgctttctactgcttagtttcggatgctccctttttcctatttgtcatgatccggtcttgacttggtcttaacttaatattaagaatcattattatgatt

SEQ ID NO: 12729 - DNA, 765 bp, Zea Mays
gtcgccatcccgccgtgtataaagcgccctcgctccggccaggtcacggctcccgttccaactcctacctacgcagcagaggccagccacctccccgtcgctctcacgctcttcgtgcccgccgcctctcctccgtctctgcctctctccctctcccctcccgtctgacgcacatggcctccatcgccggatcttcggccctctccttcgccaggcccgtcaaggcaatcaacacaaattctctagctttctccccggcgaggaagggcaacacattcctccgcctgcaaccaatgcctatgagatctgtttcctgcgctgccaagaaggatacaacagacaaggttgagattgtgatgagtctcgaggagcacttcgatattagcgtggaggagtccagcgcacaaacaatcgccacagttgaagacgccgcggacctcatcgacaagcttgttgctggcaaagcgtagttctgtacctcctctatcgttgtcctaccactctaggtctatcccttgatctaggtttctatggtctgaagatttgtgattttctccgcactgttgttgctatccccgtgtcgtaataatacgagatgttttaagcggttgaacattacggtggtgtaatcagagtaatctgttgctgttaaggtgcattgttgtatgaattgtctctacccgagtagaagaatcagaccattcgggattctatgatcatagtacattttttgcttgaaaagatgagcaacgccgagtacttttt

SEQ ID NO: 12730 - DNA, 1089 bp, Zea Mays
ccaatccttcttagagaaagggtcgacgctgcaccgtcggtgttcagtgtgcgcaacatcgggaagactctcgtatccaggacacagggtaccaggattgcttctgagggtctgaagcacagagtctttgaggtttgcctagctgatcttcagggcgacgaggatcaagcttacaggaaaatcaggctccgtgctgaagatgtgcagggcaggaatgtgctcacaaacttttggggtatgaattttaccactgataaattgaggtccctagtgaagaagtggcagacattaatcgaagcccatgttgatgtcaagacaaccgacaactacatgttgcgtttgttctgcatcggcttcaccaagaggcgcccaaaccaggtcaagagaacctgctatgctcaggcatcccagatccgtcagatccgccgtaagatggttgagattatgatcaaccaggcttctacatgtgacctgaaagaacttgtttcgaagttcattccagaagttattggtaaggagattgagaagtctacctccagcatcttcccacttcaaaacgtcttcatccgcaaggtgaagatactcaaggcccccaagttcgatcttgggaagctcatggaggttcatggcgactacaaagaggatgttggtgtgaagcttgagaggcctgtcgagggagatgaggctgtgcaggaggttgctgctgccgagtagtttgtttgctacttctatatctaggctgagtctggacatgaggttgcttatgacgtgaacttagagttgtctacttgttttcatccgcccctaagattttgtctggaaacaagtttaaaattaagattattctcaacaagtgtttaagattactcgtggtgatcttctgagttcgagtactgctgtactaagttccttgcatcctcatttttgtttggccatcgatattttacgttctcgttctgtgctctgtttatttattgttagctgacactggtcatccagaattgtaaacttttaacactatcagttaaaactagtactacctccattttttattcatcatgttttagtttaaaattgaactagtaatcg

SEQ ID NO: 12731 - DNA, 72 bp, Zea Mays
tttggatcgagcctcgagccggctcgcgagcctcaccgagctggctcggctcggctcgttagtgtagcgagc

SEQ ID NO: 12732 - DNA, 1271 bp, Zea Mays
ccgcgattgcgtgaatgaaagggcctcctgcggccgcgggtgcattggtctacctgcacggagaaatttatgctcgactaccttttcaaacttctgcttattggtgattctggtgttgggaaatcatgcttgcttctcagatttgcggatgattcatatttggacagctacatcagcacaattggggttgattttaaaattcggacagtagagcaagatgggaagaccataaaacttcaaatttgggatactgctgggcaagagcgcttcaggaccatcactagcagctactaccgtggagctcatggaatcattattgtatatgacgtgacagaccaagaaagcttcaataatgtgaagcaatggttaaatgaaattgatcgttatgcaagtgacaatgttaacaagctccttgttgggaacaagagcgacctaactgccaacaaagttgtggcaactgagacagcaaaggcatttgctgatgagatgggcatcccgttcatggagacgagtgccaaaaacgccaccaacgtggagcaggccttcatggctatggctgcatccatcaaggacaggatggccagccaaccagccgcggccaacgcaaggccagcgacggtgcagatccgcgggcaacccgtcaaccagaagacgtcttgctgctcgtcttaagcttgcctgatttctctggttccttgtgactattactaccgtttgtgcgagcatgcaaatgtatttgttgcattattgctgatagcatctgttcgttggccagatgagtagagagctgaaaaaatgttaagaacaccatagagagaagtctatccgtgctctctcaacttaaggagcaaacagcaagacttcattttttttctactttactgtttattagtcgcgttacatttgtgaacagttattgtaatgtctttttttttaactctgtattcgtagtgagatgaaatgcgtgtgtgggcaacaaatttcctttttggctagttgagtggtcttatcattgtgcccggtgacggtgacggtgcctctgtcctgtggccttgcaatggtctgtgggcttcgagtgggtgtgatactgatacgccctctagtgcgtttttgacatggagaagaacgccgcttggcccaccaccaccgccaattgctgtgtcctctgtggtgtgtcagcgcgagataacgtttgacaggcgaagcgatgttggggcacatgcgcaccaccgctgatcgtgaggcactgaaaatttcaaaaaaaaaaaaaa

SEQ ID NO: 12733 - DNA, 1065 bp, Zea Mays
agcaagcagcatcgaccgacgccaacgacagagaagagagtccatctgctcgttgccttgattttgtggaacgaagcgatggctcgcagcggcgccatggtttcctgcatgctgctcctggtggtgcaggcagcatcgtctcaagttttgttctcctctcctagctagccagcacctgcagatctgctcgttgccttgggctactgattttgtggaacgaagcgatggctcgcagcggcgccgtggtttcctgcatgctgctcctggtggtggcggcgcaactgctcatggtgatggccacgcagacagcggcggcggcggcggcggcgggcgaccaacgcggagctggacgccggctgctgtggcaggtgacctgccactacagcaactgtaattgccgcacttgcccgatatatggctgggcgtgctgcagcacttgctgctagctagctagctagctagtgtgagttcttccgcgcgcgcaagcagcctttgcataccacccctcttgcttagctcatgcatgtccagcagtagccggttgctgggctcgtcgtcgtcgtcgtctgcggcggcggcggcgggggcgggggcggcgtcatctctggcgtggttacgttctcatcagcgacttctaatggcgctcgctcgatctttatttcctgcagtcctttttgtaataagaagccaattgatgtgtgtgcacgcgcaatcctaataataaatagatcttctttgtgccttgctttgtttgatatatataataaaagtcttcgttgcaaacgtacatcttttttatttaggaaattcattttttactaccgctttccggacggcatgcaggcctcaagtgtgctgtaaaaaaaagtgcaagttgagagagagccgtttcatgtcacgctcgaaatccagtggactcgttttgagacaatttattatccaccaaccatctaaagttaacttggcgccaccttttttccgcgatacgtagtattagtagagctgggcatctttgtactaagaatacgaaaacatcgtacaaccaaacaaaagaatagaacaggc

SEQ ID NO: 12734 - DNA, 278 bp, Zea Mays
agtgaagacaatatgccccactgaagcccagaagctacctaaactcccagccgtctcctccgcatgcgaaaaccctagcagctccgcagtccctctcctctcgaggtggcggcgctccctcctgttttcctcttcttcttcctgtactatatagcctcccctcgcaaatcgtcactgacgagtgatgtcattccgcttgcttgattgttccagatattcgcagttgaccgggtcctcggagcacgcgcgtcgccgtcgatgcccgcttgattccaccg

SEQ ID NO: 12735 - DNA, 746 bp, Zea Mays
gtctaaggcgccacaatgtggctaacttttctacctaagattatccctgagaaatgcaagtatcaagttttatccaccaaggtcgaaatacgccttgcaaaagctgagcaggtgacatggacaaccctggattatagtggaagaccaaaggctattccccagaagataagcacgccagctgaaacagccccaagaccttcatacccatcttcaaagtcaaaaaaggactgggataaactggaagctgaagtaaaaaaggaggagaaggaagaaaaacttgaaggtgatgctgcattgaacaagttcttccgtgatatctacaaggatgctgatgaagatatgcggagggccatggacaagtcattcagggaatctaatggtaccgttctctcaaccaattggaaagatgttggatcaaagacggtggaagcgagccctcctgatggtatggagctcaagaagtgggaaatttgaagtttggactgcccctcttgtaaatccaggtcttggaagttatgacctagttctgtccacccatttggtgtcgtaagtttggttaagtgtgtgtgtgtttttggttcagctgtcgttcgaggaaaagctattgtaagttgtggactgtgtaaaagctgcaatagattgtgggttgtgaaaaaggtgtatgctgtttaatttaaacaagcataaaacttacacgtgtctctattttttcattttcttgaaacctgcaattcaaaaaaaaaaaa

SEQ ID NO: 12736 - DNA, 2235 bp, Zea Mays
gccgcggcatatgctgggtttcgcccaggaatcgccatgacggggcgaatcccactgtccgctacagcagcactgcgagccactgaccggtgggcccgccttgctctctgcatgtgtatatgccggtgggaccacgtgtccagcgactccatccagtcctggagcctgcgcggctgcgccttgcatcgcatctccgtcgtcgtcctcgcccacggaatccgtccaattccccacgccgcccgtcgtccttttctataaaattcactccgccaccaaatctcgaatccccatcgcgctgcttttccaccgaccccgacgccgacgccgacgccaccgccgctccctccccagtccccactccccttcccgggccgcggagcagagatccggggcgccgcgcgatggcgaacatcgacatggcgaagatcctggcggacctggaccgcggcgccagcggcggcgacgcgcgggtgcccaagaccaagctcgtatgcacgctcggcccggcctcccgcaccgtgcccatgctcgagaagctgctccgcgccggcatgaacgtcgcgcgcttcaacttctcccacggcacccacgagtaccaccaggagacgctcgacaacctccgccaggccatgcacaacaccggcatcctctgcgccgtcatgctcgacaccaagggtcctgagatccgtacagggtttttgaaggatggtaaaccgattaagctaaccaagggtcaagaaatcactgtcaccactgattatgatatcaagggtgacgaaaatacgattgctatgagttacaagaaactgcctgttgacgtgaagcctggaaatgtcatactctgcgcagatggtactatctctctggccgttctatcttgtgatcctgatgctggaactgtgaggtgtagatgcgagaacactgcaatgcttggtgagagaaagaactgcaatctgccaggaattgttgtggatcttcctacattgactgagaaagataaagaagacattttgggctggggtgttccaaatgatattgacatgattgctctatcctttgtccgtaaaggatcagatttggtgactgtgagacaggttcttgggcagcatgccaagcgcattaagttgatgtcaaaggttgaaaaccaagagggtgttgtaaactttgatgagatcttgagggagactgatgcttttatggttgctagaggtgatcttggaatggagattcctgttgagaagattttccttgcgcagaagatgatgatctacaagtgcaacattgctggcaaacctgttgttaccgctacccagatgctcgagtcgatgatcaaatcccctaggcccacccgcgcagaggccactgacgttgcaaatgctgttcttgatggaactgactgtgtcatgctcagtggtgagagtgctgctggagcctaccccgaggtggctgtgaagatcatggctcgtatctgcatcgaggcagagtcttccctggaccacgaggcagttttcaaggccatgatcagctccgagggcccagctaggcacagcctgatctatagaggcctcattcccctcctcgctgagggctccgcgaaggctacggattcagagtcaaccgaggtgatcctggaggctgcgctcaagtcggccgtgcagaagcaactttgcaagcctggtgatgccattgtggctctccatcgtatcggcgtcgcctccgtcatcaagatctgcatcgtgaagtgatcaccgtgacttgactcctaagtcccaggggggtggttctcaccgctgggacctatgaaacaacttttctgcctcctttttaactgcatttttcggagacagataattactgtatgttgtaagcccgcttctgttgtttgcagctgcaagatgtctttttttttgtttacatagtttttgagctggtaaatgaggagggagaggactccattgatgttagtggtaataagatttgtatctacggagttcagttaaaaggcttttctacatgaaaatggtggaatgtgctgtatgtaggttcatgcccttgtttagtgtaaagatcatgtagatagatgtcgggtttctttatatttgatcttgaggatcgcagatcttgcacacatacgtggagatacaaactgtgaactgctatgtctgtcttaaaaaaggtccaattctgagtcaaatgattagaagtttgataaatcaaatttatataaagagatac

SEQ ID NO: 12737 - DNA, 1791 bp, Zea Mays
aagacggccaacgtgcatgacgctaccatcgtaacagagcaccctgttgtcaggattggcgttgtcttcagtgggaggcaatcccccggagggcacaatgttatatggggcctctatgatgttgtaaaggctcacaactccaacagcaaaattattggttttcttggaggaaccgatggattatttgcacagaaaactattgaaatcactgatgaagctcttccatcctataaaaatcaaggtggttatgacatgcttggtcgtacaagggatcagatcagaacaactgagcaggtaaaggcaacaataggtacatgtcaagcattgaagttggacgctcttgttataattggaggtgtcacatccaacacggatgctgctcagcttgctgagacatttgctcagttgaaatgtccaacaaaggtagttggtgttcctgtaactctaaatggagatctcaagaaccaatttgttgaaacaacagttggttttgataccatatgcaaggtgaactcgcagttaataagcaatgcatgcatagatgccctttctgctgaaaagtattactactttattcggatgatgggacggaaagcatctcatgtagcattggaatgtgctcttcagtcacatccaaatatggttatcctaggcgaggaggtttctgtgtcaaaacttacaatatttgatattacaaagcagatatgtgatgctgtgcaggcaagagctgaaaaagacaaatatcatggagttgtacttattcctgagggccttgttgagagtattcctgaactgtatgctttgctccaggaaattcatggactgcataataaaggtgtttctgttgagaacatctcttctcatctttcaccttgggcatctgcactatttgaatttttgcctccatttattagaaagcagctgcttctccatcctggatctgacgattcagctcaactgtcccagattgaaattgagaagcttctagcacaattggttgagaccgaaatggacaaacgcctagttcttggacatgtatgttatcacatcgtagcggctggtttgaacggctacatggccactgtgaccaaccttaagagtccagtaaacaaatggaaatgtggtgctgctcccattacatctatgatgactgtgaagagatggtcacgtggtgctgccaccagtcaaatcggtaagcctgctgtccacatggcgagtgttgacttaaaaggaaaagcatatgagttgttgagacaaaattcttctagcttcatgatggaagacatctaccgaaaccctgggccacttcagttcgaagggtcaggtgctgatacaaagcctatttcattgtgcgttgaagatcaggattacatgggaagaatcaagaagttgcaggagtatttggagaaggtgaaaagcattgtgaagcccgggtgctcgcaggatgtccttaaagcagcggtaagcgccatggcttctgtgacggagatgttgaccatcatgtcttccctttcatttagtggacaggcgaccatctgaaggccaagctgaagatgtcatatgctgttgcgctctcatgtcccgaacatatttgtgtttttttgggaaagaaacatacaatttttgttctcattctagtatcgtctacctatgtcaaactacaatatgataggacccttgctaaataattgtttcgtttgctggtatttctcatctttgatgctaggcatgttgaaaagttgattgagatgagttaaaataagagcataatttgaactggttacaattaca

SEQ ID NO: 12738 - DNA, 1387 bp, Zea Mays
ccgcctcgccgctcgccaatggacacctccactagtccacttggcgccactccagcttcacgctgcccgcgtctgtgattcccattcataagagctggccacgcagcctcggagcaacagacccccgcccacgaccacacgcagcaagcagcagccgcgcgctcgcctaggactaccgactacgagcggccggcacatatggcagcgcagtccatgctcatgtcgaccagcgtcaacggcggccgcgcgctgccgtctcttcaggccgtccggccggctccatacccgcggctaccgctgccgtcgtcgtcgtcctcgtcagctggctacaggcactccaagtccgtctccgtgaagacgctcgccctgttcggcaaatccaaggtcaagaccgcgccggcgaagaaggctgctgcgcccaagcccaagccgaaggttgaggatggtatcttcggcacgtccggcgggatcggtttcaccaaggagaacgagctgttcgtcggccgcgttgccatgcttggctttgccgcatcgctacttggagaggccattaccgggaagggcatccttgcgcagctgaacctggagacgggcatccccatctacgaggcggagcccctcctcctgttcttcatcctcttcaccctccttggcgccatcggcgctctcggagaccgcggccgcttcgtcgacgaggaggtcaccggcctcgacaaggccgtcatccaacccggcaagggcttccgcggcgccctcggcctcagcgagggagggccgctgttcgggttcaccaagtcgaacgagctgttcgtggggcggatggcgcagctgggcgtggccttctccatcatcggcgagatcatcacggggaagggcgcgctggcgcagctcaacatcgagacgggggtgcccatcaacgagatagagccgctcgtcatcttcaacgtcctcttcttcttcatcgccgccatcaaccccggcaatggcaggttcatcatcggcgaggaagaggaataggctgctggctgctgctgctggcctcggacatgagtcgtgtgcgtttacttttacctgtgactgtgcgtctcggtgcgcgcgcgtaagtgctttgctgtgtatcaattactcgtgatgagacctcgaaggtagggtgtcgcgttgggttgtctgcttgtagaaacaagagcttatatataaattactactagctaatatgccatggttgcaacgagttctcctagactatataatcttgttgagttcgagagaccgtataaatcacactgattgaccttcggtactgagctgcatttctaagtggcgctctcttgtgtaactctactccgtttccgttctaacttttgcccccggcaaggtgattctggga

SEQ ID NO: 12739 - DNA, 1230 bp, Zea Mays
tttgtacaagaaaaaagttgtaagatattgactgttataattagtgcacgaccaaagcttcagaatggcacacttccaaatggagatgcttcgaattcgaagagcaagcttacttcaacacacgatgtattgagaggtttggttgattggctctgttcacagctgaggaatcctacacacccgagctgctctattcctacttctatccattgcctctccactttgctaagagaaccatatgttaggacattatttgttcaagctgatggcatcaagctgctcattcccttaatttccccagcttccacacaacagtcaattcagttgattatttgtccaccacaagggttatgccaagacttgtagaggttgtcaagggctctactaaagagaaggtggtcagagttgttgtgttgtccttccgcaatttgctggcaaagggtgcatttgctgcccagatgatcgatcttggattgccacaaatggtacaaaacttgaaagctcaagcatggactgatgaggatctgttagatgctctgaatcaactagaggtgggactcaaagaaaacctcaagaagttgagttcctttgataagtacaaacagcaagttcttcttggtcatctggactggtctccaatgcacaaagatccaagtttctggcgtgagaacattaacaattttgaagaaaatgatttccagattctgcgagttctcatgacaatcattgacacatcaagtgacaccaccgctcttgccgtggcctgctacgacctctcacaattccttcagtaccatccatctggccgaatcgtggtggcagacctcaaggctaaggaccgagtcatgaaactcatgaatcatgagaacactgaagtgaggaaaaatgcattgatctgtgtgcagaggctcttccttggcgcaaagtatgccagtttcctgcaggcttgagaaaagctgagtcttgtatttagatccagagaacccctggtcatttttcagaatggctgttgagaaagaaaaaccttgaaaattcttgttcagtgtatcctattgttatttgatttctgaagccgatgtataataaataatcagagtcatagaatgctcgatgtaataaagtgtccatgggcttgttgattcatttatgtaaattttgacttgtaacattagcaaacctcttttttgttattcttctgcctgacaacattgcctgattcgtgtgcattac

SEQ ID NO: 12740 - DNA, 2169 bp, Zea Mays
ccaacccagaccaaatccaccgtttcgttgctgttctattcgggtacagaacacccattggtttggaagccatcaccaccaccacctataataaattgcacgagatttgccgcgagaccgcatctccatcccgcatcgcgcatcgcatccaccgccgagcttgctttctttctttcttttttctgggagaagaggaagaagaggggaggcgcgacaaaaagggcgccgcgccccgccccgccccgcatcgcccccgacgccggcatctctccctcgctctccttctcccgatctgatccgaagcgcggcggcgtcgacgacgacgacctaagggcacgatgcattcgaccaacctgctgctggaggagcccatccggatggcctccatcctggagccatccaagaccagcttcttcccggcgatgaccaagatcgtcggcacgctcggccccaagtcgcgctccgtcgacaccatctcctcctgcctcaaggccggcatgtccgtcgcgcggttcgatttctcgtggggagacgccgcctaccaccaggagacgctcgagaacctcaagctcgccatcaagtccaccaagaagctgtgcgctgttatgcttgacacggttggaccggagctgcaggtggtcaacaagagtgaaacccccatctccctcgaggagaacgggactgtcgtgctcacgccgcatcagggccaagaagcctcctccaccttgctgcccatcaacttcgatggactcgccaaggctttgacaccaggtgcaacgatatttgtgggccaatacttgttcactggtagcgagactacttcagtttggttggaggtttctgaagttaaaggagatgatgtggtttgtatcatcaagaacacagctaccttggctgggtcgctcttcacgctgcattgttcccagattcatattgacttgcccacgctgtctgatgaggataaggatgttatcaaaaaatggggtgctccaaataagattgacttcctctctctgtcttacacaagacatgcagaagatgtgcggcaggcacgtgagttcctctcgaaattgggtgatcttagccaaactcagatctttgccaaaattgagaatgttgagggcttgaaccattttgatgaaatactggcagaggcagatggtatcattctgtcaagaggaaaccttggaattgaccttccacctgagaaggtctttttgtttcaaaagtctgcgcttcacaagtgcaacatggctggaaagcctgctgttgttactcgtgtcgtggacagcatgactgacaacctcagacctactcgcgcagaggcaactgatgtggcaaatgcagttcttgacgggagtgacgccattctccttggtgctgagactctccgtggtttatatccagtggagactatttcaacagtgggcagaatttgtgctgaggctgagaaggtattcaaccaagatttatactacaagcggactgtgaagtatgtgggagaacctatgacccacttggagtctattgcttcttcagcagtgcgagctgcactcaaagttaaggcatcagtcatcatttgcttcacctcttctggacgagctgcaaggctcattgctaagtacaggcccagcatgcctgttttgtctgttgtcattcctcgtctaaagacaaaccaactgaggtggagtttcacaggtgtttttgaggcaagacaatcactcatagttagaggcctcttccctatgcttgctgatccacgacacccagctgaatctaccagtgctacaaatgagtctgtgttgaaggttgctcttgaccatggcaaagcctcgggcgtgatcaagtcccacgaccgcgtcgtcgtttgccagaaagtgggtgattcctctgtggtgaagatcattgagctggatgattagacaatcaggctatgctgttgtctactagggcacgtttttgccaatttttttgcctaggccgaaacttattggctatgtataatcctatagcgcttgaaaactgagcagtttttcctatggtgacatcataggatttgcttttacagttccaattatggtgtagttcgaaatttgctcgactaaactgcggtgtaacagttaaatgggcagatggaataatgtaatcatactgttccctccaaaaaaa

SEQ ID NO: 12741 - DNA, 955 bp, Zea Mays
acgcgtccaggctccaacagcacgacgcaaccgaccccacattccctttacgcgaagaagcatcaccgcgagtcgtcctcctctctgtcttcgctcggcgatctatcaaggaggccaggagggtgagggggagatggcggagaacccgcagctgtttgggaacgggatgccggtgccgttctacggcgagatgttcgtcctcgtccgggacggcgtcgagttccacgtcgacaagatcccgtcagctcctggaggtcatgtgaaaacaaaaggcacaatttacctgtccaatataaggatggtgtttgttgccagcaagcctgttggcaacttctttgcttttgatatgccactgttgtttgtgcatggtgagaagttcaatcagcccatatttcactgcaacaacatctctggattcgttgaaccagtcgttccagacaatcagaacagggccctgtactcaactcacaccttcaagatcttgttcaaggaaggcggctgtggtactttcgttcctctcttccttaacctgactgcatctgtgcggcgctacaatgagtttgaagcccagtctgctgctaacatggcaccgcgtgtggatcctctgcaagctgtgcagactcctgtcgatgatatgatgcgtcatgcgtatgttgacccaaatgatcctaccaagatttaccttcagcaacctgccccagaatcgcagctgaggaggagaaactaccacggcccagctgatgcgaattagcgcttgctggattggcaaaactcatggccaatgaactgttgtatctgtttgaacattttatcacaactggcttcaatatccgggagcccccgtatactgcgagtctgtggccgttacatcgtacataatgttgtgagttcgctcaataatgatgtacataagcagtggtgtgttcaaataatattgtagtgttaagtaaaagaa

SEQ ID NO: 12742 - DNA, 798 bp, Zea Mays
agcaagttttgcggctggatgcattttagcgaagtcaggtgtcggcgtatgccaaatgtctcgttgagacaccgctgcagtgcagactcgccgaaaacgactcctcacgaactagtccgtttccgtgcgccgctgctgacgagggagtgggagggatcatggtggcgccggatgtgaaggcggagacgatgaagctgatggatcagcggggtgccctagaggcggagatggacgccatcatcgcccgcctcactgcggcaggcggaccgggcatcaccggcggcctcgtcgacgccgagggtttcccaaggtccgacatcgacataccgaacgtcctcgcccagcgccggaggcttgctgaattgcgaaatgaccacaaggatattacaaacaaaattggtaaaaatcttgaggttttacactcagcaaagttatcaaggaatgaacaatcaacctcaaggagatctgatacaacagatccttcacactttggatcatctcaaagtgaacctatggaagaggaccatgtgactggacttccttttgccatgattgatgaaatcgctgatggttctcctgcttctgtggatggtttgcaacttggagatgagattgtaaagtttgggaatgtggaagctggtgatcagttgcaggaaaggctcatgtctgaagctctttccaatgaggacagtcaagtatctttagtcatcattcgccagggatcagcggtgaatttaacaattacaccaaggaagtggcatggaagaggacttctgggcacctggaattaaagcaata

SEQ ID NO: 12743 - DNA, 89 bp, Zea Mays
ctcttattatatagtaaagttgtgacattcgatcatgtgtcatgatttatcatatgtgtgagacttggtcccagcacacctggtgatta

SEQ ID NO: 12744 - DNA, 525 bp, Zea Mays
gtgaatcctgcggatagcctgacggctcgtttgaccttcgtctgtcgtctcgtctcgtccacctccccagcggcgcgtgaagcttgaggcaatccccgccctctctagccctgcgcaaccagttcggttccatggccaacagcaatctcccgcgccgaatcatcaaggagacgcagcggcttctcagcgaaccagcaccggggattagcgcgtcgccgtcggaggagaatatgcggtacttcaatgtcatgatccttggccccgcgcagtcaccctatgaaggtggagttttcaagcttgaactattcttgcctgaggaatatccaatggctgccccaaaagttagatttctcacaaaaatttaccatcctaatattgacaagcttggtaggatatgcctcgacattcttaaggacaaatggagtccagctcttcagatacgtacagttctactgagtatccagttttcggcttgcatatgtagttctcgagtgtctacctacctctacggttatagcatatcag

SEQ ID NO: 12745 - DNA, 117 bp, Zea Mays
ggaattgatatggttggaaagataaggagattatctaaccaacccaactggttccaccctaaaattcgtctggagtcaacgggaatcgtcaaaacaagtcagcgttcagattctgtt

SEQ ID NO: 12746 - DNA, 1482 bp, Zea Mays
ctagtctacaacataaagatcggtttgcacctgtcgctgcagcactaggtagtctcaagttcccctatgtgtaccctgatcctgaaagccgccaattgcgtgctgcccttgctgaagattctggacttgaatctgattacatacttgctggatgtggcgcagatgaactaattgatttaattatgagatgtgtgcttgaaccaggcgacaaaattgttgattgccctccaacattcacaatgtatgagttcgacgcttcagtcaatggtgcacttgttatcaaggttccaagactgcccgatttttccctagatgttgatctcattgtcgaagtggttgaacaggaaatgccaaaatgcatatttctgacatccccaaataatccagatggcagtgtaatcaatgatgaggatcttttaaagatacttgatctcccaatacttgtagtgctggatgaagcttatattgagttttcaagccttcagtcaagaatggcatgggttaagaagcatgataatttgattgttctccgaacatttagcaaacgggcaggtttagctggtcttcgtgtgggttatggtgcatttcctctgagcattatcgagtatttgtggcgggccaagcagccctataatgtttctgtggccgcagaagtttcagcatgtgcagctttacagaatccaacttatctggagaatgtgaaaaatttactggtaaaagaaagggagaggttgtttaatcttctcaagggaataccattcctgaagccatttcccagtcattctaacttcattctctgcgaggtcacgtcaggaaaggatgcaaagaaaataaaggaagaccttgcgaagatgggagtgatgatccgccactatgacaagaaggaactgaaaggctatattcgtatctcggttgggaaacccgagcacactgatgcactaatgaagggcctgaatgcacttcgattgtgagagcttttgcacacgatcaagcttttgcacactatcaagcttttgcacaccatcacatcaatgtaaacagtgtattcctttgcggatatatatccgtcaggctggatgcagtctataagaggagattgcatcactccaacgcatgtgaagcccaaacagacaagggtcatgtgggtttcactatccttttgtttagcaagttgaagtctgtttttgttattcagtggcataacagctattcacaagattatcttgttcagaacaagtgtagcagttgaattcctggtaggtggtttctgatgttgggttgagacttgagagaactgaacattgtgtaggtataaataaaggccaacatagcaatgctgttgtcttagtacttgtatcaaaggtcattcagtcgttgcaaatttcgaccaaataaagggatgaaatgaaagcttggaaacggaacagattctcatccataaccgccgtgacgacaatgtgtaaacgtcgcgacttttattta

SEQ ID NO: 12747 - DNA, 798 bp, Zea Mays
tgccttgtcttgtctcatcgaaatggcaaggtgtcaattttcgggcacaacatgttgctggacctctccgcatacatatttagggtttatgtaccgtgggcggctgctgctgctggtgctggatgacatcgcatctttcatgtcagcctgaacgatccaacagccttctctatctgaggcctgtacttctccgagtcatcgtcgtcgatgtactggcccgtcacagtgtagaggcggttgtaccagccgttgaaggccatcccgatggccgagacgatgtggcgccgtcgctcgccggggttctgcagcgtgtactccaggtagtacaggccgtttgccgccctggagtcgatgagcttggcggcgagccccggcggcctctgccagctcctgtccaggccgttcaccagaccctcggcgaaggcatcgacgtcgccgaaggacttgaggctggtgaagtccggcccgatcccggtgatggcgacgctgacattggagtcggtggcggcctgctcggggtagaacgccgtgacagacttgatgccgctggcctcgccggcgccgaccagccagccttgcggaacttgaatgctgaacttgttggcctcatcctcgtacgtagtgaagccctcctgcgactcggcggtggcctcgtccgccagagcgccggcaggggcgagcagcggcggcgtcgcggcggagaagacgatgccgagcaataaggcgtccctccggcccagcagcccctcctctaccctgacaaccaccgagcagagcggcagtggcagactgtcgtcg

SEQ ID NO: 12748 - DNA, 1255 bp, Zea Mays
accaatgcagccataactccgccccgatctatccgtcgcccctccaaaagcacgagagcgcaggaagtgagagaataaaaataataataataaggggaaataataagaaaaaaattctcgtgttcttcgaccggtggtggtggtgcgaacgcaaggcgaccaaggggaggcgagatgaggggggcgaagcggccgctcagcgtggtgacgtcgtgggtgcggcggcagccgcccaaggtgaaggctttcttggccgttgtcaccggcatggccgcgctcgtcgtcatccgcttcatcgtccacgaccatgacaacctcttcgtcgctgccgaggctgcgcacgcgctcggcataggcgtcctcatctacaagctcacaaaggagaagacatgtgccggactatccctcaagtctcaggatttaactgcgttatttctagctgttagactgtactgcagctttgtcatggagtatgacatccatacaattctggacagtgctacacttgtagccacactgtttgttatttatatgatacggttcaaactgaggtcaacttatatggtggacaaggataactttgcattgtactatgtggtgctaccatgtgctggactggcactacttgttcatccttcaacatctcataacattgtgaaccggatctcctgggcgttctgtgtttatttggaagctgtttcagtgcttccacaattacggttgatgcaaaatactaagatagttgaaccgtttacagctcactatgtatttgcgttgggggttgcaaggtttcttagctgcgcccactgggttctacaggttttggatacgcgtggccgtctgctgacagctctcggctatggtctgtggccgtctatggtgctgttttcagaaatcgtgcagacattcatccttgcagatttctgctactactatgtgaagagcctggttggtgggcagctggtgctacggcttccctcaggggtggtgtaagagaagtgcaagctgcagcagaatacaaaactttagtgcttcaccggttcatatgtacttttagtagtgcccaacctgggagccttttttagttgatgttacgagttatgactatatgtatggcaaaattgctgcaagggtcctcttaaaagataggttgatattgagactgtttatagctgcgcttttctggatacccaatctttgggtacttggcttctgccgtatgactgtcgtggtcttaggatcaggtgggtgctca

SEQ ID NO: 12749 - DNA, 2577 bp, Zea Mays
ctaccgcctacaggctacagcccaccgcggcaccgctgaagacaccccaaaacctatcccaatcggccgcgcctccgtccgtggctccgcctgccggcgacccctcagatccgcgcgccccgtaccacctcccgccgcctcactgccagatccggccctggctccgcaaaatcctgcgacatcgcagacgagccgggcgggagagcggaggtaggtcacagcagccatggcggccgcagaggagaacagctcgctgttcctgatttttatactcaccatgatcgcgctgcccctcgtgccctacacgatcctgcgcttgtgtcgcgctgcctccgagaaggcgaagaccatccactgccgctgctcgggttgccaccgctccggcaagtaccgcaagtcgatctacaagaggatatccaacttctccacgtgcagtaacctaaccatccttctgctctggattgttatgatattcctggtttactacataaagcttgttagccgtgaggtccaagtttttgagcctttcagtattcttggactggaagctggggcatctgaatctgatatcaagaaatcatataggagactttctattcagtaccatcctgataaaaatcctgatccagaggctcataaatacttcattgaatatatatccaaggcatatcaagcattaactgatcctatatctcgtgagaattatgagaaatatggtcaccctgatgggcggcaggggctgcaaatgggcattgctttgcccaagtttttactaaatattgatggtgcatctggtgggataatgcttcttggaatagtcggattttgtatattattgcctttgatgatagctgttatttatttgtcaagatcatcaaaatatactggaaactatgtcatgcatcaaactttgtccacttactactactttatgaagccatctcttgctccaagcaaagttatagatgtcttcatcaaggctgcagaatatatggagatgccagttcgacgcagtgatgatgaacccctgcaaaaattgtttgtagctgttagaagcgagttaaatctggacttaaagaacattaagacagaacaagcaaagttctggaagcagcatccatcactagtaaagatggaactgctgattcaggcgcatctcacttgtgagtcattcgctttgacgccagcacttcttaaagattacagacacatgcttgaacttgcacctcgtcttctggaagaactcgttaagattgcagttttaccaaggaatccccatggttttggatggctccggcctgcactcagtgttattgagctttctcaaaatattatccaggctgtaccattaagtgcacgaaaagctagtggtgctaactcggaaggaatagcgcctttcttgcagctgccacatttcacagaagcaaccgtgaaaaagattgctcgcaagaaaatccgtgcattccaagaactttgtgacatgcctgtggaagatcgtgctgcattgctcacacaagttgctgggctttctgaagaacaagctcgggatgtagagtttgtactggagatgattccttctattgaagtagacatgaaatgtgagactgaaggtgaagagggcattcaagagggtgatgtcgtgaccatgtatgcttgggtctcgctacaacggcgcaatggactgactgctgctcttcctcattgtcccaacttcctgttccacaaggaagaaaacttctggctgcttctagccaacgtggcatctaatgatgtctggttgtcacagaaagtcagcttcatggatgaggccacggccataactgcagcatcaaaagctatacaagagacccaggaagcactaggtgcaagtgcaaaggaaataggaaatgcagttagggaggcagttgacagggtgaagaaaggcagtaggctggtaatgggcaagttccaagccccagcagagggtactcacaacctcacctcttttgtttgtgcgacgcttggataggctgtgacacgaagaccagcttcaagctcaaggtcctgaagcgcagccgtgctggaacaagaggccatgtgcctgaagaagggccagtggctgctgcagaggatggtattgaggaggaagaggaggaagaggaagaggagtatgatgactatgagagcgagtacagtgatgacgaggaggacgcgaagaacaagggggaagggaaggggaaggttgtgaacggatcggcccatcaaggggctgaatctgatattgattcaggcagcgatgagtaattctatactgtgttatgttgagaaaggaacgtagaggttgacaccatctgtttttttttttaaaattgaacgtatcccctccattttatagatggtcatagttactcagttttgtttactaataagttgagattgattggttacaaaagagccgagcaaaactagcttactatctcgagttgacctgaagactgcatggtcattctccaaagtgcaagcgtttcacccatgcctatcacctgtgtggtgtatgttcctcacatttattccgaatggcactgctgatttcttaaa

SEQ ID NO: 12750 - DNA, 1377 bp, Zea Mays
gctgggtccatccagttcatcactacggcgcccgcaaccaaaccatcggagacgctcaacatgttcttggggatgggccgaccggcgtggagggaggcgcgcgccacgctacaaaaaatcctctcagccgacgagccagtcttgcgtgacaacgaagccctgaggaataaatgtcttattccaatgagtgatatcgagatggttctaccaatcacggttggaggttacacagatttcttttgttctgtgcaccatgcaaggaactgcggattcatcttccgagggccgcagactccagttaatccaaattggttttatcttccaataggatacaatggacgagcatcatctatagttgtgtctggaaccgatgtaattaggcccaggctgccattgttggtccaggaaatgaattaggcaaaccaattgatatcaatgatgctgaagaacatatttttggcctaactttgatgaatgattggagcgccagagatattcaggcttgggagactatacctcttggacctttccttgggaaaagcttcagtaccaccatatcaccatggattgttactcttgatgctttgaagcctttcatgtgtgaggctcctaagcaggaacccgaacctttaccatacctagctgaaaagaatcacataaactatgacattcctcttgaagtcttgattaagcctaaagatcaaaatgttgcactaattgtcacaaaaactaatttcaagcatctgtattggacggtgacgcagcagctaacacaccacactatcaatggatgcaacatgaggccgggggatatatttgcaactggcacactcagtggacctgaaccggactccctcggatgtctattggagctaacatggaacgggcagaaggagataccagtgggcaatttgacccgcaagtttctagaagatggagatgaggtcatcttgacaggatgctgcaagggtgaaggctacaacattggttttggaacttgcactgggaaggtcctgccggcacttccctgagccaacacgtctttacatcagttctcgagtccaaacactcaacaatctagcaagatgctatgtaactgaacaacgggggttgttttcgcataggaaactgatactctgttgtggaataaaatcggttcaccattttatacacattttctctctcaagaattgtgttattaaacttgtaaaaatgcaatgtctctcatctcttcatccatcgcccagtgagatttgaattctgtgagtatctgtgtatatgggcctggccgcccactagggttccatatactcttgtactcctgcagctagggtattgtattctatactgcaacatggtatcaaagctttatgtttc

SEQ ID NO: 12751 - DNA, 3865 bp, Zea Mays
tgacttgtgcgaagttctgtcgtgcaccattcttaaggtttccacttttcatgctcccgaatctgataactcaggtggttaattgtaaggtgtcattgaagcgtctggaagatctcctgttggctgaagagagattacttctgccaaatccacctattgatcctgatcttccagccatttctatcaagaatgggtatttttcatgggaatcagaggctcagagaccaactttatcaaatgtcaatctggatgtacctgttggaagtttagttgcaatagtaggaagcactggtgagggtaaaacttctctcatatctgcaatgcttggagaaataccaccagtatctggatcaggtacctcagtggtcattcgtggatcggtggcttacgttcctcaagtttcctggatcttcaatgctactgtacgtgacaatattttgtttgggtctccctttcaacccccacgatacgagaaagcaattgatgccacttcattgcggcatgaccttgacctactcccaggaggcgatctgacagagattggtgaaagaggagttaatattagtggagggcagaagcaaagagtttcaatggcaagagctgtgtattctgattcagatgtgtacatatttgatgatccactcagtgcattagatgcccatgttggccggcaggtatttgataaatgtatcaaaggcgaactgcagcataaaacccgggttcttgttaccaatcagctgcattttctgccatatgtcgataaaatactgctaattcatgatggtgtaattaaagaggagggtacttttgatgaacttagcaacagtggggagctcttcaagaagctcatggaaaatgctggaaaaatggaggaacaggtggaagaggatgaaagtaaaccaaaggatgttgcaaaacaaactgtgaacggtgatgttacaatagctgatgaaggttcacagaagagccaggatagttctagtaaaacaaaaccaggaaaatctgtccttattaagcaagaggaaagggaaactggggttgtcagtgcgagggtcctttcacgttacaaaaatgcactgggagggatatgggtggtgtccatactcttcttttgctatgcactgactgaagttcttcgcatttcaagtagcacatggttgagcatttggactgatgagggttctctgaaaattcatggctctggttattataatttgatctatggaattctttcctttgggcaggttctagtcacactctcaaattcatactggttgattatatcaagtcttcgggcagccaaaaggcttcatgatgccatgctccgatcaatattgagagctcccatggtattttttcatacaaacccacttggacggatcatcaacagattttcgaaggatatgggtgacattgaccgaaatgtcgctgtatttgtcaatatgtttatggcacaaatatctcagttgctctcaactttcgttctcatcggctttgtcagcaccatgtctctttgggctatcatgccactcctgattttgttttatgcagcttacctctattaccaggcaacatctcgcgaggtgaagcgtctggattccattaccaggtctcctgtgtatgctcagttttcagaggctttgaatggtctgtccacaatccgtgcctataaagcctatgatagaatggcaaatatcaatgggagatcaatggacaacaacattaggttcacacttgtgaacatgggtgcaaataggtggctagctattcgtctggagacattgggtggcatcatgatatggtttacagcaacatttgctgttatgcaaaatcaacgagcagagaatcagaaggcctttgcttctacaatgggtcttcttcttacttacactctcaatattaccaatttactcacagctgttcttcgtcttgctagtcttgctgaaaatagtttaaatgctgttgaacgggtcggaacatacattgagttaccttcggaagctcctcctgtcattgaggatcataggccaccccctggttggccatcatcaggtgtcatcaagtttgaagacgttgtgcttcgatatcgaccagaacttcctcctgttcttcatggcatatcttttgttattaatggaagtgagaaggtaggaatagttggcagaacaggtgctggcaaatctagcatgcttaatgctttgttccgtatcgtggagcttgaacgagggagaatattaattgatgattgtgacacttctaagtttggaatttgggacttgcgcaaagttctaggaataataccacaggcaccagttctattctcaggttctgttcggtttaatctggatccctttaatgagcacaatgatgcggacctctgggaggctctggaaagggctcatctaaaagatgttataaggaggaattctttaggattggatgctgaggtttctgaagctggtgaaaatttcagtgttggacaacgacagctgttgagcttagctcgtgcgctgctgagaagagcaaagatacttgtccttgatgaggcaacagcagcagttgacgtgcggactgatgctcttattcagaaaacaatccgagaagaattcaagagttgcacaatgctcataattgcccaccgtttgaacacggtcattgactgtgacaggttgcttattctaagttctgggcaggttctggaattcgactctcctgagaatcttctaagcaacgaggggagtgctttctccaagatggtgcaaagtacaggacctagcaacgcagaatacctcaagagtcttgtatttgcaagtggagaagagaggtcccggagggaagaaatcaagctgcaagatatccaaaggagatgggttgcatctaaccgatgggctgaagctgcccagtttgcgcttgctagaagcctcacatcatcacatagtgacctccttgcattagaagctgccgagggaaataatattctgaggagaacaaaggatgctgtaatcactctgcaaagcgtactggaagggaagcacaatactgaaatcgatgaatctctaactcagtatcaggtcccagctgatcgatggtggtcttcactttacaaagtgatcgaaggcctcgccacaatgagcagattgggccgcaaccgtctgcagcaaccttcttataattttgagaacaacaattctattgactgggaccaaatgtagatgtagaattctggatcacaacagcattgtggagtaggctggaggtgtagttatttctggcggatttgattcctgcggtgtgtaaacgctgcagcaacacgtaacttgcgaataaggaacgagttttgccacagcaggacgatccttgtaccgtcgtccgcaagggttgtaatttctcagggaccgttacgacacgattgtatgtcaggttttgacagtttgagccaatgcaattcttctaatgaaaaagacaagtgcatgtgaatggttagcatctgcctatcgcctatcgggtatcatgtggagtcgtctggtataccgtcctacacggctacacctgagaacgaagcgaccttacccccaactatcaccttgtagcgatccgaagttgttcatcttcgagtttcagttctctaactccatcgtagctaagcgtttcagcaatgggtcaagagagagatttaactatttgtcaccgttaggaaggccacatatttgtttgcttgttttacgtggcaactgtacgattttttatcggaaacgctaactggtctattttattgatgtaccatgttaaattagcatgtcacggtggatcctagtcttttttccggagagacacctggaaagtcatttttaccttcgcattttca

SEQ ID NO: 12752 - DNA, 2214 bp, Zea Mays
gtcccaaattatttgaatttggcacggctccgggctcctctcgtggcgcaaatggacgcctttttgtgaccgacgacaagcagcggcgttggtgggccgagcgccggggacgccaaggacttgccccaacttttcctcagagtgggcgcggccgtcacgctctccgtagccggtctgctcttctcgcggcgccagcggccgccccggcagctcctgccgccgccgccgcgtcctccctcggagtcggatgatgcttgcagcatgaaggccagaacagggctcaaggagcttaggatcctaaaaaatgaggataccaaggcaaaaattatcagtgggaactctgtgcacacgaccactaccactacgacaattaccaccaccgcattagtaccattggcccctaaatgcagaagccttgctgatgatgaaggctatctccttccggagttcaatgacatggttctcagagaatttggccaagatatagatagcattccatccacacctgcagcgagagtaagggaagatgtatcgaatgaccatgaagtccacaaacttagagatttggtgagatcactgcaagaaagggagaagactctggagctacagcttctggagtgttacggtttgcaggagcaagatgctgcggtgagggagcttgagaatcagctgaagattaacaacgttgaatcaaagttgtacttgctgaagattgaatctttacagactgaaaaccagaggctgcaaacacagctctcagagaactcaaaaatattctctgagcttgaggcgacaagaacaaaatgcaagtttctgaagaagaagtttatatcggatgcagaacaggcaaaggagcaaatcatttctcttcagaaaatggtcgactcattgcagaacaaacagactgatgaggagaaaaaatttattgagtttgaaaataaactgaagagactagaggagctggaaaaagaggcaacagagctaagagcggcaaattcaaggctgcagcaggagaatgcacatcttattaggcgactggaggttacacgcctaccccctgtacccaagcccaaaactagtatggaggtaaaagcattggaggaggctgatcggttgaagcaagaaactgataggttggctaaagaggttgaacaacttcagagtggcaggtttgcagatgtcgaagaattggtatatctgaaatggataaatgcctgcctacggtatgagctgagaaacaaggatgccccatcagggaagactgttgcacgagatcttagcaagaccctgagccccaagtctgaattgaaggccaaacagctgataatggaatatgccaatgtgggtgcggaggacagtcacttggggcatgtcgaattcggttcagagtgctcttcctcacgggcttcgtcaggtgaaccggatgatgtgtcaattgatattgcttccatgacaaagcatactaataaaaaccccaaaaagaagaagttcttctctaagcttcggaaactggtgctgggaaaagggaaagagaaccgtgaaatttctactctggagaggagagtgtctatttcaagttgttccttcgatgacttcactggaagggattcacatgatagctattcttcgttcatggcagaaccaaacatgcctgatagtcgacggcatggtgatcatggctttggtacacattcttctttggacagcgcaaaatctagtcctcttggcacagaaattgtaggtgaaagaagtgaccattctgtggtgaagagtgtatcttctagagaggaaaaggtaaatgcattcggtcccagcattggccttgatagtagcaaggccatacctgaggatgttgagatccataaatttgctgatgcgctgatcacatcaaggtcaggttccatgtcatcaagaagatcggcatccttccgacactgatataggagtcatctgctactgacccctctgcctggatgtatatttctgccagttcttgatggggggagttataggagatgttactggaatataagttgtcaatactttatttttttgtaccattgcgtatagggtgtagtttacttacctttaataccaactcctactacctgggctcgtcatgtgtaccataaaatggcacatttcaatggcaaacacaagacaattgtaacaccctaaatccatcaattaaggtaacctagattatattattaa

SEQ ID NO: 12753 - DNA, 1237 bp, Zea Mays
ctgagatcgatgtttaggggggtttcgtgaagactcataagaccaatgcgtatttcaaacgtttccaagtgaaattcaagagaaggcgggctggcaagacagactacagggccaggataaggctgattaaccaagacaaaaacaagtacaacacacccaaatacagatttgttgtgcgatttaccaacaaggacatcactgcccaaatcatatctgctagtatagcgggtgatatggttcttgcttctgcctactcgcatgagttgccacgatatggtcttgaagttggtctgaccaactatgcagctgcctactgcactggccttctgttggctcgccgtgtgctcaagatccgtggtttggatcaggagtacgagggcaatgttgaggccactggtgaggacttctctgttgagccagctgatgagaggaggcctttccgtgctctcttggatgttggccttatcaggactacaacagggaaccgtgtctttggtgccctcaagggagcattggatggaggcctggatattcctcacagcgagaagaggtttgctggattcaagaaggacgacaagcagttggatgctgatacccaccgcaggtacaaccccaagaagctgacatatgagcagaggaaggccagcctcattgaaaggctcaaccaactcaactcctccggtggtgctgatgacgacgatgaggacgacgagtaaagttaattgccatcgaagtagtgctatctcaatccagcgatcagcaattgtgtactgtcttatgcggggacctgtagtactgcaataggcatttttgtttaagttttgcgaggtgaacaaaactgtttctgttagtttcgagcttgagctctcaatgtttactctttacattgaaatgctgccgtttggacatgttttttctgagttctacacctgcttgtcttgcttatgtgacggtgcagtattgtgcctttaatatcaacctaaacattgactggttcataccaagataaataaagaaaagaaaaatacagtgtatagcggtaggagggatatggaaaacgagattgtgttagactgtctccagcaacgtcctctatattcatcctctatatctgtcctttacagtctcctctaaaagatttcatcctctatatctcatttctctccaacaacgttctctaaatcacgttctctatactcaaatacccatattaaagacattttttaattttattttt

SEQ ID NO: 12754 - DNA, 2435 bp, Zea Mays
agagccaggcaccacgcacggaccactcggtctcatgtagctagcagctagcactcactagcagcgaagagtgaggagtgagaggacacggtaaccccagcggcattcgctgctggtacaccaataatcgagcagcgtgcgagagagagagacgaaccgagccacagagaagagggaacgcgaagctactggcgaactgacataacacgcctgcgatcggtagatagatctacatcatctacaccgccgaggcgccgacaaccacttggcgaccatgagcacgggcacggacgccgtcccggtcgccgtggcgccggcgaagcgcccgcccatcaacaaacatctcggtgatgagcggcgcgcagctgttcatgaaggaggacctcaagatcacggacacgcagatcgagatcctcgccggcgtcatcaacatctactcgctcttcggctccctcgccgcgggcctcacctccgactggctcggccgccgctacaccatggtgctggcggccgccatcttcttcacgggcgcgctcctcatgggcctcgccccggactacgggttcctcatggcgggccgcttcgtggccggcatcggcgtcggcttcgcgctcatgatcgcccccgtgtacaccgccgaggtggcgcccacctccgcgcgcggcttcctcacctccttcccggaggtcttcaacaacttcggcatcctcctcggctacgtctccaacttcgccttcgcgcgcctgcccgtccacctcagctggcgcgccatgttcctggtcggcgccgtgccgcccgtcttcctcggcgtcgccgtcctcgccatgccggagtcgccgcgctggctcgtcatgcggggccgcatcgacgacgcgcgccgcgtgctgcagaagacctccgactcccccgccgaggccgaggagcgtctgctcgacatcaagaaggtggtcggcatccccgagggcgtgaccgacgccgacgacgtggccgccatcgtccgcgccagcagcaaggcatcgtcgtcgtcgtcgtcgtcgcgccacgacggggtgtggaaggagctgctcatcaacccttcccgccccgtgcgccgcatgctcgtggcggggctcggcctcatgttcatccagcaggccacgggcgtggactgcgtggtgatgtacagcccgcgggtgttcgagcgggcgggcatcaagtccaagaccaactcgctgggcgcgtccatggcggtgggcgcgtgcaagaccttcttcatacccatctccacgctgctcctggaccgcatcggccgccgcccgctgctgctggccagcggcggcgggatgaccatcttcctcttcacgctggccacgtccttgcacatgatggaccggcgccccgagggggaggccgcggcactgggcgcggtgagcatcgcggccatgctgtcgttcgtggcgtcgttcgcgtccggcctgggccccgtcgcctgggtctactgctccgagatctacccgctgcggctgcgcgcgcaggctgctgccatcggcacggggctcaaccggatcatgagcggcgccaccaccatgtccttcctctcgctctccaacgccatcaccatcgccggcagcttctacctctacgcgtgcatcgccgccgcaggctgggtgttcatgtacttcttcctgccggagaccatgggcaggagcctggaggacaccgtgaagctcttcggcaaggacgcggacgacgaggacgtcggcgacagccgtcgtcacgcgcccagtaagaagccctccacttccactgagcttgagctcagtgctcagcactgagtgatgtgccatgcaacacgtgtcctcccgagtgtgaccgaagcttatgtctaaagcttcgatgatacagtctactcctagtatcttgtgtgctcgaactgtggtgaatcttttgtagatcccgggcctctccttttttttctgttagatttgtagattttttttgttgatctcgtggcatagtgcgtgtgagtagcgagggattggggcacgcaacactttagtctaatttggatactctagtaatgagtgtgattggagtggattgagatgtattgagagaatatttgatctattggtgatttacaccctcttcaatccctccaaaacactttaatccaaaagtatccaaactaggccttagaaaaaaataggaatatgctaaaattcgcctgcattttagttttgaatgtgattgttattgaatatattttatcctacagttataaattattttagtgtagttaatatatactatttatattttctatttaagaatataaatttaaaatacgaacctcaacaatctgtgttaataaaaaatagaataatttatatagtcatacaaaaaaaattattatcatacaaatacaaatcataaattataaaaagcaaaaaaaa

SEQ ID NO: 12755 - DNA, 1012 bp, Zea Mays
  misc_feature (1011)..(1012): n is a, c, g, or t
cagagatgctaaagtccaagcaggaaagctcatttgtagcagcatgggtgcaagaatggattctgaaccaaagagttggaggatacttgctgatgttctctacgatcttggtactgcattggaagttgtttcgccgctgtgtccacaacttttccttgaagtagcaggcttgggaaattttgcgaagggaatggccgttgttgcagcaagagcaacgaggcttccaatttactcttctttcgccaaagaaggcaatcttagtgatttatttgctaaaggggaagccatatcaacacttttcaatgtcatgggaattggagctggaattggattggcatctactgtttgttcaacaactcaaggcaagttaattgcaggcccgttactttccgcagtgcatatatatggggtcatccaagagatgagagcaactcctgtaaacacactcaacccacaaagaacagcaatgatcgtggctgattttatcaagagtggaaaggtttctagccccgccgagctaaggtacaaggaagacctcctgtttcccaaccgagttatagaagaagccggcagtgtgaaaatcggtcagccacttcgcaaagtgttcagtccccggcttgttgagcagctgagggcgactttcccaggcgagaaatttctgctcagccagaaaagcaacaggacgtacatggttctggagcgaagcgcgagcggagaggacgcgctgagggggtggctggtcgccgcgttcgcttcggagatggagaggtcaggcgccggctcacgcgatgacgcggttctgagcgaggcctacgagaagatggagcgggtcttccccaccttcgtgtcagaagttaggagtagggggtggtacaccgatcagtttttggacgggaactgtagtcgagtctcgtttgccaagtttcggtagtcgcagagactgtatatggtctatgttttttggaggggagatgcggaaccatgaactcatgcatgcagggcagtgtagtnn

SEQ ID NO: 12756 - DNA, 1638 bp, Zea Mays
ctctatattcctagctaagtcatgtcaaatgaggaatccaaaggaagttgagaaaactgagtacaatgaattctacaagaagacatttaatgagtttctggatccgcttgcttacactcacttcaccactgagggagaggtggaatttcggagtgttctctatgtcccagggatggcgcctcttagtaatgaggagataatgaatccaaagaccaaaaacatccgattgtatgtcaaaagagtgttcatatcagatgattttgatggcgagctgtttcccagatacttgagctttgtgaaaggtgtagttgactcaaatgatctccctctcaatgtttctcgtgagatccttcaagaaagtagaattgtcagaattatgcgtaagagacttgttaggaagacatttgacatgattcaagagattgccgagaaggatggcaaagaggactacaacaaattctgggagagctttggcaagttcatgaagcttggttgcatcgaggacacaggaaaccacaagcgtcttgcaccattgctgagattctactcttccaaaaacgagacagatttaataagtctggaccagtatgtagaaaacatgcctgaaaaccagaaggcgatctattatatcgctactgatagtctccagagcgcgaagactgctcctttcttggaaaagctggttcagaaagatattgaggttctttacctcattgagccaattgatgaggttgccattcagaatttacagacatacaaagagaagaagtttgtagatattagcaaagaggatttggaattgggtgatgaagatgaggacaaggagaaagaaagcaagcaggagtatactcttctatgcgactggataaagcagcagcttggcgataaagtcgccaaggtccagatctcgaagcgactcagctcttctccatgtgttcttgtttctggtaaatttggctggtcagccaacatggaaaggctcatgaaggcacagacccttggtgacacatcaagcctggagttcatgagaggtagacgaatttttgagatcaaccctgaccatcctatcatcaaggacctgaacgctgcttgcaaaaacgagcctgaaagtactgaagccaagagggcggcagagttgctatacgaggctgcgctgatctccagtgggtatactcctgacagtccagcggagctgggaggcaagatctacgagatgatgaccatggccctcggcgggagatgggggaggttggagacagaggaggctgaagtcatcgccagcatcgacgacgcggactcgtctgaaggtgccacgaccacgacagaggtagtcgagccctctgaggtcaggacagagagcgacccgtggaaggattagatagttctgtatgcaaggattatgccctggtgtggtgtatgagcactggatgtaacgaaagtacgaaccagagccaggatagaggaatgcagcgtttgataagaacactggtgttaaaagtgtagatctctggtttgggttgtgctgataaatttttgtaggctataaccatccaatgaaaaatgccctctgcgctttcgtgcattctttctagctccggtctttgcaaattcgttcgtaattataagtcatacttcggc

SEQ ID NO: 12757 - DNA, 1326 bp, Zea Mays
caatcctctcctttccatccacgccgctgcgcttccgatgcaaccctaaccacctcatcgccggcacgatcttccccgcccccactccccggctattgcctctgattggcggctctccgggattcacgttggtccggggtacggctcctgcgattttcacgcaatggagcaagatcagagcgtggttgtcggcagcgcggactctggtgctgcggcttttggttttgcgactggcaacccccctagcttggctgtgaccggcggaagcgccgtggcccccgacggtggagctcaggcagctgatgcctctgcgtaccaggccgagcacacggcgttgaatgggactgtcggcgatatgggtaattacccatctacaggagctgcagagaacggcgaagccgtccccaacgagacgggcgagccggttcctgagctatcgtacgaagaagccgtgctttcagcagaagaggctaggttatggagtgttgttaccgcgaattccttagattttaatgcctggaccgcacttattgaggaaacagagaaaaatgctgagaacaatattttgaagatacggaaagtgtatgattcgtttcttgcggaattccctctttgctttgggtattggaagaaatatgctgaccatgaagcgagacttgatggtgtgagtaaagttatagaggtgtatgaacgagcagttctcgcagttacttattcagtggacatttggtataactattgtcagtttgcaatttcaacatatgatgattcagatatcatacgaagactgtttgaacgtggcttggcatatgttggaacagattatcattccaatattttgtgggatgagtatattaagtatgaagagtcactggaggcttggagtcatctagctgatatatatacaagagtattggagcatcccatccagcagcttgatcggtattttaattgcctcaaggaattggcttcgaagcacagtttatcagaaatacttactgcagaagaagcctcgttgtatgttgtcacatctgagaccactgctcaagcgcctgatggtgaggcacatcctgatgatgttgataagcttggtcaaccagaaatttcgtcttcaacagacgcagaaagccttgcaaagtatgtctccatgagggaagagatgtacaggaaggctaaagagtatgaatctaagatcattggttttgagctagctattagaaggccatattttcatgtcaagcctcttgacaatccagagcttgaaaattggcataactaccttgactacatcgagaaggaagaagacattaataagtggtcgttctg

SEQ ID NO: 12758 - DNA, 1428 bp, Zea Mays
tctctttcggcgatactgttgcttttgtcgatcgattattgacgtatgatcgtcgtttcattcaagaatggttaagcgctggaaaccggacatgcccacagactcaacaagtcctttcgaacacaattatcaccccgaaccaccttgtgagaagcatgatctcacagtggtgcacagacaacgggatcactctgccaccggttgagaaccaagatgaagatctggttacaaacaatgagcgggagacatttcgtaaactgtttgagaggatcgtatcgtcgtcgtcagacctgtctgagcagagggaagccattaaagagctcaggctgcggactaagtgcaacagttcactaagagcagcgataggagagagaccggattcaatctcgcagatgatttccgtagcgtccagcccagagctagaaaacagtgcagaagttgtggaggatacggtgacagctatccttaatctctctatccacgagagcaacaagaagatcattggagacgacccactggcagtcccgttcctgatcaaggccttacagtcaggaaccatggaggcccggagcaacgccgccgccgccatcttcagcctatccgcgctggacggcaacaaggcgaggatcggcgagctcggcgcgatgaggccgctggtggagctcctcgagcacggcagcacggcagcgaggaaagacgcggcctcggccatcttcaacctgtgcacgctgcacgagaacaagtcgcgggccaccaagagcggggccgtcgacgtgacgctgagggccgtcgcctgcgccggggacggctctggctccggctcgctggtggacgagtctctggccgtcctcgcgctgctgtcgggcgaccacgaggcggtggaggaggtcggcgagacgggcggcgtggcctccatgctccacgtcgtgaaggacgacccgtgcaagcgcaacaaggagaacgcggcggccgtgctcttcgcggtctgcgtgtacgaccgcaccaggctgcgggaggtcgccgagcacgagaagctgaacgggtccctgggctggctcgcgcggaacggcacgtcgagggcgcggcgcaaggccgccgggatcctcgacaagatgaagaggtccatgcaccacccgcactactcctgctagtgctgccgccgtggctgtgtgtgatcagggggggaataagggtggtgtgtgttgtgttggactgctcgttgctttcgcgctgtatatatatatatatatatatatatatatatttcagcctgcgtatatagctctatactcttggtctctgtggtttggtacatatatgagggtacattttttttccgtctcgcggagtaagtggtggtggtttccccctctggaacgttcttgttcgtctgaaatttgcacttgatatgtttcttcagggtctttg

SEQ ID NO: 12759 - DNA, 1233 bp, Zea Mays
atcgactgcgggagcttatccgcactccgaccggtgccacctccaagctgagcccgctcctagactcccagtcccctccgcagtccgcaccgccgcctcgccatggaggcagctgccgccgccttcttgtcccctccccgcgtcgccctcgacgtccgcacactcttctccccgccccgttgcctccccgtctcgccctcatcccagctccgcctcgctgcccgcccccgcgcgctcgccggcgccaagccgcggttcctgagcccccatcgagaacccgccgtcgacggcggtcgcggcgccagggatgtcgtcgcgatggtggtgccgttcctgaggggggccgcgtgggagcagccaccgccggacttggcctcgttcctgtacaagaaccggatcgtgtacttggggatgtgcctcgttccgtcggtcacggagctcatgctcgccgagtttctctacctccagtatgacgacgccgagaagccaatctacatgtacatcaattccactggcaccaccaagaatggcgagaagttaggctatgagacagaagctcttgcagtatatgatgctatgaggtatgttaaagttcctattttcactctgtgtgtcggtaatgcatggggagaagctgctttactcttagctgctggcgctaaaggtaaccgtgccgcacttccatcatcgacaataatgataaaacagccaattggtcgctttcaaggtcaggcaacagacgttgacattgcaagaaaagagattcgaaatgtcaagatagaaatggttaagctgctggcaagacacattggtaaaccaatggaagagattgctcgggacatcaggcgtcctaaatactttagccccagtgaagctgtggattatggcatcatcgacaaggtgatatacaacgagaaaatccaggaagatggcggtgttgtgtcagaactcaaaagatcaaatttgatatagcgttctttttccacaagtagacacgtctttgtatgtttagtggtcattcacgtgtgtttgagtattgagtagttaccactcgatcactcagtacctggttgtagaggcgtagagcacatagccaatgcattgaacaagcatttccttcccccctctgccgtttcaacgctgtattgcccttacccaacgggcgtgctgaaagatgaattttggtaggttgttgatcgttggtgccctgtttgcgtgtttatcatcataggc

SEQ ID NO: 12760 - DNA, 1920 bp, Zea Mays
ttttcttatagttttatctgacaaaggtgggtttggagtagcttggttttctgctaaggttattgatataaatggaaataatgtttttgtcaactatgacaaccacaatggatctggtcctcatgaagaatgggtgccattgcgacaagagggggataagccgcctcagatacgtcttgcgcaccctgctaccctctcaaaattcaaaactaggaaacgactcagggaaacagcaggaagttgtttatgggttatcggagatcatgtagacgcttgggtcaacaatagctgttggcgagagggagttatttctcagaattatgagactgatgagacgaaatatgatgtacatttttcagttggaggtggtggtgagtccttagtagttgatgcttggagccttcgtccatcgcgtgtttggaaagatggtcaatgggtagagtggtcccatgcaagagaaaggaaatccaaatctaataagggcgattcacctcctgagaaacgccaaagaatcgacttgcttcaaactggtggcaatctatctgttcttggcgaagtggggggttcttcgaaggacaataatataaacaatgcaaaaaacccggaggaattaaagccattgtctttgtctcagggggaaattgttttcaacattgggaaaagtgtagttgagaataaatctgattctcttgcattcagacgtcctggactacaaaaagaaggatcaaaggtcgtctatggtgttccaaaacatggaaagaagaagaagtttatggaagtaagcaaacattatgatgcaggccaatctgacaagatttctgagggcaattcatctaacagattcgtgaaacatctgatgccacaattgccaaggccacgtgaaaatgcttccaaagttgaccctattagaggaaggagagtaggtgaaacaaggtctagattacctaaacctacgaagtcccacaatgttggagctagcagtgttcctggaaaggattccttgcctatgcaaatgcatgttccaaattctggtgtttctgaaaggagttctagttttgcaggaagttcgacaagcacttccaacaatgagaagcccacttcagaaaataataatccggtgcttggtgtgggccttagaactgaagtttcttctggtcctgaactgcaaactgcatctactgttcctagttccaagccaaatgtatccactactaatcgagctaaaaggaaatatgttcccactgtcagtaacacaaacagaggtatactaaaaacctctgaaaagtcgagttctgattctgctgagccccgaaggactacttctgattctgctgaacctagacgatctaacaggcgaattcaaccaacttcaaggttactagagggcttgcaaagttccctcgtaatctcgaaagttcctggcgagaaggttcataggagcaattacaaaagtgcatcctcaagagggagaactcaagctcatgggtgagtgaaggcaccacatagctcatagctgcttttggtgggatagctctcgtgtacatagctgtagccgtccagtatggaaggaggatagggttggagtaggaagtctttattggagcgcaaggattcagatgtattataaactagcttaagtgcattgtgttaaccttttcttttacttgctcgaattatacttttccgtgttgtagaatacctggaaatatccttttagtatgtgtggatacaccgggaaagaaattgggtgccgtttaaattcatccgataatttaacgtgagtctgaacgtcaatttgactcgctactatcgtttgatcatatcattccttttctaagtcgtctacctgcagttgcagaagctggatggtgctctgcttctgtgccgttgtgtagtgaatgcttgttgtttgatcgtttt

SEQ ID NO: 12761 - DNA, 371 bp, Zea Mays
ttatcttatatgtatcctacatggcatcctctgaattggtttactcctgagaaatctatctcgcattcttcaatctcgactccatgagcaggaagatgaccgttcaaatatcagaccttggaaaggttctcggaagaaaccttttggagaaaaacccatgtagctacactgaagtttggagcgggaagaatttcggcccggtgaaggaagagatttcagcggtggttcattcgcatggctccatggtgttcgaaatcatatgttgagattgcagtactgggcaagttgttcgagaagtttgcagtgataatttagttgagatgaatgccgtagccagtctttcgcgcagaacagtgcctccaaggtttcag

SEQ ID NO: 12762 - DNA, 100 bp, Zea Mays
accatgcatttacttcccaaatcatgaacacatacatgtttatcatatgaatcgagtatttcaataattatcctaaaacaactaacttcattacacaact

SEQ ID NO: 12763 - DNA, 93 bp, Zea Mays
tttagccttggacggagtttaccgcctgatttgggctccattcccaaacaacccgactcgttgacggcgcctcgtggtgtgacagggtccggg

SEQ ID NO: 12764 - DNA, 1226 bp, Zea Mays
ggcttgatggccagtaatatgcagtcttctgggctgcctcagcctccaagacctcccatgatgggttctagcgctcagccacaaaatcttggaccaccaatgcctatgcagtttaggccagtgatgccttcgcagcatcctcctcagttcatgccaccagcagcacagcagttccgtcctgttggtgagcctatggcgggggctaacgttggcatgccagggcaaatgccacattttccacaacctgggcagcacttgcctcactcaaatcaagttccacctgtatcacaaggggttcccatggtatatcagccagctagaccaatgtcatcagcacctatgcaacaacagcaacaaactgcgtatgctgggggccatttgcccaccatgggtgctcctatgcaacccctgacctatacatatcaaccaacatcgatccctcctgtagcgcaaccctggagtacaggcccaggacagagtgtacatcatgtgcctcctctagtgccgtctgggcaccagccggtgtcagctccaacgactttgcctcctgtcaacttgtctgaacctagctcttcagactggcaggaacacactgcagccgagggaaaaaagtactactataataagaagacaaggcaatcaagttgggagaaaccagttgagttgatgacacctttggagagggctgatgcctcaactgaatggaaagaatttactacaccagaaggacggaagtactatttcaacaaagtgaccaagcaatcaaaatggactattcctgacgagttaaaggttgcacgtgaattggcagagaacgcatcaaatcaacaacctgatcgagaatcaggaatagctactagtgctcttgtcagatctgctgcctttgaaccttctactgcacctgctaatcagtcgtcatctgctgttggtataattgcttccagcgcacatgatggatcatcaaactctgttctttctggtcctcccctgccgcacaatgtggagaatacttccagttctattgttggcatgcaaaatggtggttcgagtactgctgttgttcctgttgcagcaagcacagaagttccattagttgcaacagatgcagggtccagcagaaacaacgatgaaaattcatctctgaccactggggctgacgcagaggatggtacatccgctgaagatttggtgtgctggagggagggcctctacagactgcagccgcc

SEQ ID NO: 12765 - DNA, 2921 bp, Zea Mays
tttacacacacatacacggaccgaagaaggggaaaaaaagaaaaagaaaagaggaaaatcctctccggtgtcctgtcctctccccttatccgccaccagcaaggccaaaacccgacacgccttctcaccccaaatccatggcgccaccgggctaaaaaccccaaccgccggtccgccctcgctccatggcgctctccgagctcccgctccaccactccttccgcctctcgtcccgccccagcatccacagcctcctcccgctccgcctcctctcctcttcctcttcctcgtcctccgccgccgcggcttcggcctcctccccttcctccaccggtggcaatcgcgcggcccccagcaccggcgctccgtggctgcagaggtgggcgccctccgacccctcccgtcccgccccagctccggctcccatcccgtccccgaccacgtccatagaccgcatcgtccaccgcctccgcaacctcggcctcgcctccgacgaagacgacccctctgcctccgcctccgcctccgctgccacggccgccgcacccccggacggcaccgaacgcctcggcgacctgctccaccgcggctgggcgcggcccgaccaccagttcgcggccgcgggcttcgacgatgccgtcctcccgtgggagagagacgacgagaccacggggccggtgagggacgaggaggatgggaccaagaggagacgggtcaaggcgcccacgctggccgagctcaccatcgaggacggggagctgcgccggctgcgcaggttggggatgacgcttcgcgaccgcatcaccgtgcccaaggctggagtcaccacggccgtcacggagaagatccatgacgcctggaggaagtcggagctggtccggctcaagttccacgaggacctcgcgcacgacatgaagacagctcatgagctcgtagagcgacgcacaggcggattgatcatatggaggtctggaagtgtaatggtggtttaccgagggagcaattacaaaaggcctctgaaatctcaggctctaaatggtgcctcatcaccagtgaagggcgaagatggtgcattgttcatcccagatgcctccaaccctgttgagagtaatattcaggggacaggtctggctacacagtatgcaaacgtgtccctattgaactcacagaatactgaggacatgacggaggaagagctggagttcaaccagatgcttgatgagctgggtcctcgttttgtggattggtggggaactggtattttaccagtggatgccgacttgttgcctcaaacaatccctggttataaaacaccgtatagagttcttccgactggaatgcgttcgacccttaccaatgcagagctgactaacttgcgaaagttagcgaggaaccttccatgccattttgctctagggagaaaccggaaccatcaaggtctgtcagcagcaattgttaagctctgggagaagagcttggtggtgaaaatagctgtcaaacgtggaatacagaacacaaataataaaataatggcagaagaaataaagaatctaacagggggtaccttgcttcttcgaaataaattttatattgtaatatatcgtggaaaagacttcctcccaacatctgtggcagctgtgttggctgaaagagaggagttgacaaaggatatttacaatatggaggagcagagaagaagggttttgattacacaaccttcggatgatggcttagatggccatgctcttgctggtactcttgctgaatttcaggaggcccaagctcgttggggaagagaagtgactgctaaggagcaagaagaaatgaaagaagcttcttctagatcagaaaagcaaaagctttacaggaaactcgaacacaagctttctattgctcaggcaaaaatacatagagcagaacgcttactatcaaagattgaagcttctttggtacttgccgatccatgtgatgatcaagaaatgattacagatgaggaaaagtctgttttccgtaggattggtttacggcttaaggcatatttgccacttggagttcgtggtgtttttgatggtgtaattgaaaatatgcacttgcattggaagcacagggaagttgttaaactaatttcaaagcagaagaccttgtcattcgttgaagagacggcacggcttcttgcatatgagagtggtggtatactagttgcaattgaaagagttccaaagggttatgcactcattttttaccgtgggaagaactataggagacctattaacataaggccaagaaacctcttaacaaaagctaaggcattgaagcgtgcggttgctatgcaacgccatgaggcccttagtcagcatatagatcaactggaaagcaatataaagcagatgaagttggatttgggtattgaggactatgaggaacaagatgaggatagctcagattcagaaaatgaatatgacaacgcagtcacctctgttagctatgatgaggatcaagacgattttgacgaatcagctgatgaagatgaatatgatgattacgacgatgaagatgacgagattgacagctagtggtttggaattgtttcttgtgatgtgccgctctgaattagtgattctctggacgttgtacttctgtctctgggacatttcgtggtacgagaaaacaaagttgcttcttgtgttcactagtccttttctattagttaacctcaagggctcaaggtttagtttccaactttccaagttgttccaaccagttccatctcgcgaaggacagtgagacggaggaatggatgttgcaaatcttggccccctagattaatttagtattgctcccaagaagaccattatgcgactgggctactggtaaccactaaccacgtaggagaggccgaggaatcgtcagggtcgtgagtg

SEQ ID NO: 12766 - DNA, 65 bp, Zea Mays
tgggtataggggcgaaagactaatcgaaccttctagtagctggttccctccgaagtttccctcag

SEQ ID NO: 12767 - DNA, 1069 bp, Zea Mays
cttgcatctagctatgcatgtgatttaagcatggaaggcattcttgagcgttaccagcgttactcatttgaagaaagggcagtacttaacccaagtattgaagaccaggcaaattggggagatgaatatgtccggttaaaatccaaacttgatgcacttcagaagagtcaaaggcagctgttaggagaacaattgagttcactgaccataaaagaactccagcaactggagcaacaactggacagttctttgaagcatattaggtcaagaaagaatcagctcatgttcgattcaatttccgcgcttcagaaaaaggagaaagcacttacagatcaaaacggtgtcctgcaaaagttcatggaggcagagaaggagaaaaacaaggctttgatgaacgcgcagctccgggagcagcaaaatggagcatcaacaagctccccatcactttcaccaccaatagttccagattccatgccaactctaaatatagggccatgtcaacatagaggggcagcagaatctgagtctgaaccgtctcctgctcctgcacaagcaaacaggggcaacctgccaccatggatgctccgcactgtcaagtaacaggtgaggtcttcccagtgtagttttgcagctgatctcgacagcaacacacctgtcaccgaaatgcttcggtgaccctagatatcaaccgatgcacgatccatctcgatcctgtgatcgaataccggcgtaggtactaccaataaagtcaggccccgtcaaatgctttacatggtgattgaagtctggagcttctcagcaccaccatatattgtgttcagttcctgtgtttattgccatagctaccctttttttctctgatctacgagctagacgtagctttgtgcttggagattccactactatgtttcctctgtcctgtgtatgctttaacggagatgcacgttgtacccgtggtaatatatataaatttgcgttgtaaagatcaagtggctcttttctccgaaatgttatgaagtctcaggtgtcaaacatgcgtgactttttaactttgaactgtacgtttcag

SEQ ID NO: 12768 - DNA, 1342 bp, Zea Mays
aggagaaggggagaggatgtggttcatcctctaaaggtttctctggaggatttgtacaatggcacatcaaagaagctctctctgtcccgcagtgtcctctgctccaagtgcaatggtaagggttcaaagtctggagcttcatcgaggtgtgctggttgccaaggttctggctttaaggtccaaatccggcagttggggcctggaatgatccagcaaatgcagcatccttgcaacgagtgcaagggttctggagagacaatcagcgacaaggatagatgcccacagtgcaagggtgataaagttgtgcaggagaagaaggttcttgaagtgtttgtggagaaaggcatgcagaatgggcagaagatcacattccctggtgaagctgatgaagcgcctgacactgtcactggagatatcatttttgttctccagcagaaggagcatcccaagttcaagagaaagggcgatgacctcttctacgagcacaccctgaccttgactgaatctctgtgtggcttccagtttgttgtgactcacttggataacaggcagctgctgatcaaatcaaatccgggcgaagttgtgaagcctgattctttcaaggcgatcaacgacgaaggcatgcccatgtaccagaggccgttcatgaagggcaagctgtacatccacttctcggtggagttcccggactcgctgagcccggagcagtgcaaggccctggaggctgtgctcccgcccaagccggtgtcgcagtacaccgacatggagctggacgagtgcgaggagacgatgccctatgacgtgaacatcgaagcggagatgcggaggcggcagcagcagcaccaggaggcctacgacgaggatgaggacatgccgggcggcgcgcagagggtgcagtgcgcccagcagtaggcagcagtttggtagcggtgataaaatatttgacggcggcggaaaaatttgtgcgactactgttaggtccaaccgtccaattttacacgcgcgtattaatgttatgatcatacttgtctttgtttattatgtatgttttgcgttacgggatctgtgcggattagttctaggcgatgtttagattcaatttggtgttgctactagcagcgatctccaacccatatgacagttggaacgtgactgtgcctgctatttcctcgatcctgatctgtccgtacaaagcccggaatccgtcgaaccttaaacctcctttggaatggataataaataaataaattgtataggattcaattcctttcctagcagagccttttgacatcctccatagcaatttgggaggaaaataagcatgtttttctgtgcataatcc

SEQ ID NO: 12769 - DNA, 1402 bp, Zea Mays
tgtttttttacatatgaacacgggcacacgaatcgtcggctcacggcctcgtcacgcccaccctctccctcttcgggttccaggcttccaaagttgtcagagacggcgagagtagggggtttccaggaagcttcgccagggcgccggtaagttgactggatttgctgctaggcagtcaggcaagctcgagttttgccatttgagaaggagagggaaaatgatgacctcgtggcttctgggccgccggggcccctccggcttctcctggagttccaccgccgaccaagtcacgcagggcatctccgccgccggcctcaccgccatcgtcactggggcgtccagcggcatcggcgcggagacggcgcgaacgctggcgctgcgcggggcccacgtcatcatggccgtcaggagccttcccgctgcccaggccgtcaaggacgccgtcctcgcccaggcgccgggggccaagctcgacgtcatggagctcgacctctcgtccatggcctctgtccgcgctttcgcgtcccaattcatcgacaggggtctccccctcaacatccttatcaacaatgcaggagtaatggcaataccttttgcgctttcaaaggatggaattgagatgcagtttgcaactaatcatgttgggcatttcctgctcacacaccttctattggataccatgaagaggacctctcatgaatcaaatttggaaggaagaattgtcaacgtgtcatcagaggggcacagacttgcatatcgggaaggaatccgttttgacaagatcaacgatgaatcagtgtatagtagcattggtgcatatgggcaatcaaagcttgcaaacatattgcatgctaatgaacttgccaggcgatttgaggaagataatgtcaacataactgcaaattctcttcatcctggttccattatcacgaaccttcttcgctaccacagtatcctagatgttctccatcggacgctgggtaaattggtgttgaaaaatgctgagcagggtgcggcaactacatgctatttggcactccacccgcatgtgaagggcgtgtccgggaagtacttctgcgactgtaacctgtacgagccaagcgcgaacgccaaggacatggagttggccaagaggctctgggacttcggcgtcgagctcatcacctagctcatgcttcttgttgttagcgacttgttttcagacatggatgtaatgtaaatcccttgacagatggtaaattctgtaggccctcgaggagctcctgtgtggtaaactcattcacctcaatctatctacgtgtattaaggtggattagggtgtaaattaaattaatttacactccaatcgccctcgaggagctccggggtggataatgctttggttggatattttaaaaaacaa

SEQ ID NO: 12770 - DNA, 77 bp, Zea Mays
cccaggaatacgtggtagaatttggttctatgttttggacatctgtgtactgtagagtatagtcaacttgcagaaga

SEQ ID NO: 12771 - DNA, 2937 bp, Zea Mays
ttctagtctcttcgaacacggcaagggggagcgaacgctggacataccatctacaactcagaaggcaagaagtttgctctgcatcttgttccatctggtattctccatgaagggacactgtgtgttgttggcaatggagcagtgatccatgttccagggttctttggagaaattgatggtcttgagtccaatggagtccgctgcgatggaaggatactggtagccgaccgggcacatctgctgtttgatctgcaccaggctgtggatggacttagggaagcagagcttgaaaattcatttatagggacaactaagagaggcattggtccttgttactccagcaaggtaactcgaaatggactgcgggtttgtgatttacgacacatggacacttttggggataagcttgacatcttattcaaagacgctgcttcgagatttcaaggctttcagtacagcaaaagcttgctcaaggaagaggttgagagatacaagaagtttgctgatcgcttggagcccttcattgctgataccgtgcatgtgctaaatgaatctatcaagcagaagaagaaaatcctggtcgaaggcggccaagcaactatgctggatattgattttggcacttatccatttgtgacttcttctagcccttcagctggcgggatatgcacaggcctagggattgctccaagggcaattggcgacctgattggagtggtcaaagcttacacatctagagtcggctctggccctttcccaactgaactatttggagaggaaggtgatcgccttaggaaagctggaatggaatttggcacaacaacaggtcgcccaaggcgttgcggctggcttgacattgttgcgcttaagcacagctgccaaatcaatgggttctcatcacttaatctgaccaaactggatgttctgtccgggttgtcagaaattaaggtgggtgtttcttatacccagactgatggacagaagctgcaatccttccctggggatcttgatacccttgagcaagtacaggtcaactatgaggttctgcctgggtggcaaagtgacatttcttctgttcgaagatacgatgaacttccccaagctgcccgcctttatgtggagaggatagaagaacttgttggtgttcccgtgcactacattggtgttggacctggcagagatgctctcatatacaagtaaaagcaactttatttggtccttggttgggcggaaaccaggctgggactcgggagcatttgcattttcttggcgtggtaacttttgatacggtgaagtcactgactcgtggagtgatgttgctcaataatcattaatcagaaccttgtcctaatacagccgctgagacatcagctaaggcgaataagggaaggatgagtcatttgcaccatgtttgaccaccaattgttaggtggtccatatattttgtacttattgtgagactttgtgctatggatctcaactgtataccttgctggtgcatggctttgggtttacatggttgaaaatgagattggtgtactaattgtctatgtttaaccttgtcaacgcactgaagctagcgaaaaattgttctgagacagcgatgggaaaatccgaaactgcatgcttttttttaaaaaaaaaggaactaaagaacagtaggcactattggtcacatattcattatgccaaactcattgtcacccatcagattatcagaatcgattacatgaacttggaagctaaaggttgtgcgcgagctagtgaaaggtggtgtcacgtgcagcatgcagatgggcaggatattcaacgttgcatggactcgtcgtcgtagtacaaactagacgtcccagacagggatgggcaggcaggttccgaactggtcgacctcatgcagatcgtccatctgaaaccctccgttggcgccgccgtgggctcccgcaatgtcgttgagatccgctgctagcgcgtcccagtcgaactcgccattgccaccgaagcagccagcgtcggcggcatcaccgtgaaggctgcctttggcagtggccgtgccgtcgtcgtcggtcttgagcacgccgatctgctgcaagaactccctgaggtcgagctggggcttgtccgcgccgggcgggaaggcgccgccgccctcgaacggctcggcgtcgtcgaccgtcgtcatggcggccgtggccaccgcctgctccaggtccaggtccagggcgtggaagcaggacatgggcggcggcagagccgccgcagccgcgtgggtggtgacggtggagcagggagacgtggaggccaccgggagatgatcggccggggcgagctgctgctggcgggcagcaggagaaacccgcggtgccggcggcggtggcttggcgggcgagccgttgttcttgagctcctgcagcctctggtggatgacgtgcacgttgtgctgcgcgttgaggttgagcaggccgtaggccgggacggcggcggcggcggcgcccctggcggaggccgggagccacctgatcctctggtgggcggcggcggcggagacgcggaggtgcggcaggttgaggaaggcgtcgggcccgtagagcctgcgcgcggcctcgtcgtaggcgagcgcggcctcctcggcggtggcgaaggagccgagccagaggcgggtgcgcttgttgggctcgcggatctcggccacccacttgccccacgtccgctggcgcacgccgcggtactcgcacgccgcgttctgcgggccgcccttcccacgcgtcgggcccttcttccacgcgcgcttccggccgtagctctccatgggatccgcgcggcgtggaggtggagcgtggggagctcaggagaactagctagggtaggaggagcgagggtttattttgaacgccaagcagaagagagcgaggtagccgcggtggggagtgtagtgaagtg

SEQ ID NO: 12772 - DNA, 1100 bp, Zea Mays
ataaaggataactcggggtcagtttttgaggcaagaatcccactatggatagtccattcatccattgcccaacaagaatcaggtaaagttccgcatgaacatcatgcattcttcatttattacgggattacaaacaaacacatctgctaacaaactatagggaatatatacaccaacgaccaatacaattgccgaataaatttccgactatatatgtacaccggaaactggccataggtacgcaatgtggcagggtatacataagtctgcttcacctatggtcgttcaagaactaagacctccctgagagctgcagcgtcatggagttcgcctcacctatggttcttaagcgctaaaacccttgtggatagagctccaggggttggacggaatgctgctgcaggcctgagcggccaccttcgacactgcttcaggaaggatgccagcgttgcacatgttcgcgaaggatcgcatgtgcttcatcccatactgcgccaaggacccgcatcgcgcctcaaaaaggcttactatggacttgaggcagctccaatcatcaaccagaggttcaccaggtgcacggacggctttcagaacccttggaccgtcctcggagccaaagagaaggcttccaatgagctcaacgctgctgtcaacatgagacctgtgggccatcacttcaagcagttccttccgagcctcatttttcgcatgcgagcttctgccagaagtagacaaggtcagcgtcgcgctgattaacggcttttgagaacgatggcagtgagttatcttctataaaagtgttgccatcgttagcagggtctgtgccaatgtacgaaaacaaacgctgaacattcagctccaatgcgccatattgcatcacatgggaaccatagctgaacgtgtcatgaaccgctgtcctatccttgacctgatcaaccgataagttgcattgattaggcatagtgaagtgtggtttcaaggtagcgtgtacttaatagattcaagttcgaaacgctcaccaacttgtactgctgcttgagggattcagttcgcagattgtggaaatcactgtcaacattgagaaatttcaaacatgagca

SEQ ID NO: 12773 - DNA, 609 bp, Zea Mays
gtaacatcagaatttatgaatctggcaggttgtattggtggcccagttgttctgttggattatgcaattcattggtcatggagttttcgagaagcgagcgcctgctcttcttgacaatcttgtccaggctttcctgatggcaccattctttgtgctgctagagattcttcacacatttggcgggtacgaaccgtatcctggcttccacgacaaggtgagcaagttgattgaggaagcccggaaggaatgggaggacaagaaatcaaagaaatcctcatgagatatgcgtgaattaacggctccgaactgttggggtctgcctgctcgagataacctgctgattggatgaatctattgcaaggatggttaccgaatactgatgctatttatgttgtataagatgatgtgcgctatgttgtctgatgtttttatatatattataatggtgacgaaaccgaggtaaaaaataatttatatatgtatactggtgtgattgccttgctagggcccttgtttctctatgagaggaatgtcttctgttgaggtgtgttacaagcggacccaattcgtatttcaaacataagcaagaacgcgtgtaatctggcccat

SEQ ID NO: 12774 - DNA, 73 bp, Zea Mays
tttataggcacgggacgcagcccgggtaaaagtacatttatgtccttgtcatccgtctacaattataatacga

SEQ ID NO: 12775 - DNA, 75 bp, Zea Mays
cacacacacacatgccccacccgttcatccttgtgatgggacaaaaaaagtaagatgcggcataaaacacgcatg

SEQ ID NO: 12776 - DNA, 1957 bp, Zea Mays
caaacggagcctatagcttgaatgatgaatgtgttgaatgctgatttgttgtggctgattaatcgggttgatcgtcgattaatcgtgattagtcggctgatcgcccttctggcgatcagaaacgataaggcaatctgaaaacattggccgccaaacctccagagcgactcccgcgagccgtgaccaccatagctaaatcaacgcaccagaagctttcacggagctgtctcgtccacgagtgttccagctgactcctattccctgcgtcaatggcgagctctggcaatgaagggcgtgtggtggtggaccttggctccgcggcggagtcggtggctgctgacgaggaggcgcacgccacgcctctccacgagattgagtccctttgcatgcgctgcggcgagaacggcatcacgaggcttttgctgacgttgatcccgcacttccgggaggtggttctgatggccttcgagtgcccacattgtggtgagaggaacaacgagattcagtttgctggacaactccaacccaagggatgctgctacagcttggaggttccgttggggcagagtgagatgctgaatcgtcaggtcgtgaagtctgattcagcgactatcaagattccagagctcgactttgagatccctccagaagctcaacgtggaacactttctactgtggaagggattattatgcgagctgtggatgagctgcaggctcttcaagatgaacggaagaaagtggatcctcagaaggccgaagctatcgatcaatttttactgaagttgagatctcttgggtcaggagaggctgcattcacttttattcttgatgatcctgcaggaaacagctttattgagaatccgcatgctccgttattagatcctttactatctgtgagattctacgaaagaactcgtgaacaacaagcagcacttggctttcttgctgaaccaccaaaagaacaacctggagaggctgtattgcctgcttcagcagtggaatccaattctgatgggttgcaaagcgtgccccatggctcagttggagctgttgcaggtcgtcgtgctatagctcagggaaaccctgatgaagttgctgcagcattgtgtagatattcagcaccagaagaggttgatactttaccatcaacatgtggagcctgtggaacagaatgcgtcacacgtttctttgctacaaaaatcccatatttccgggaggtgattgttatggcaacaacatgtgacatgtgtggttatcgcaattcagagctgaagcctgggggtgaaattccagctaagggaaagaaaattacactgcgtgttcaaaatgcacaagaccttactcgtgatgtcataaagtcagattcagctagcgtaaaagtacctgaacttgagttggaactttcatgtggaacgttgggtggtatggtcacaactgttgaaggtttaattgtgaaaatatgtgaggctctggagagaatacatggatttcaattaggcgatagtacactggaatggaaaaagaagaaatgggatgacttcaaggagagactatccaagcttctgagtttacaagaagcctggactctaataattgatgatggattggcggcttcatttgtggccccggctactgattcgttagaagatgacagccaactaaccattgaagagtatcagaggagttgggagcagaacgaggaacttggtctgaatgacatggatacgtcctctgcagacgcggcttacaacacgaccaacacataatttttttagttttgttgtgccgaatgtatttgttacgctatcagtttactttgatgaactttcagtgtgtatactaatatcaacaacttatatttcctctgacgataaacatcgagcgaacgtgcgaggcgcaaacccgatttgctgtcacccgtgcaggtccatgaattgccaacgttggttcggaggca

SEQ ID NO: 12777 - DNA, 2148 bp, Zea Mays
cggagccgttcaggcggccacccgcaggccgcaacgcagcacaacggctttctctccctgcttccctctccctgcttccctcctgctacaaataaaaattcgtggggcggccaaaccctaaaacgccccacagcgcaagcgagcagatcctcctccctttctgcttcctggcatcctctctgcctccccgcgccgatctcgagcacctggggagaccgcgagacgtgcgcctgatttttctcatcgcagcagccctcaagttccccacctcttttttcttgcagctttcaattaatctggttatttagctacatctttattttactttcattttacctttaatctgtttagttccattgcatcttctgcggttgcggttagtattgctgtttcttgctccttgtttcttgttcttttgcttctaaccatggacgcaggaacctactccatctcatcagagaagagccacacggcggcagcggcgcggccccctcttcaggaggccggcactcggccctacatgccgtcgctgagcacaggatcgcgcaacccgtcggccaagtgctacggcgataggttcatcccggacaggtcggcgatggatatggacatggcgcactacctgctcacggagcccaggagggacaaggagaacgcggtggcagcgtccccatccaaggaggcgtaccggaggctgctcgccgagaagttgctcaacaaccggacacgcatccttgccttcaggaacaagccgcctgtgtctgagaacgtctcggcagccatcacagcttcctctcaccatgccaagctggtcaagcagcgtcgacatattccccagtctgcagagaggactctggacgcaccagagcttgttgacgactactacctcaacctgcttgactgggggagcaacaacgtgctatccattgctctgggcgacacggtatacctgtgggatgcctccagtggatccacgtctgagcttgtgaccattcacgaggacagtggtcccatcaccagcgtcaactgggctccagatggccaccatatcgctattgggctcaactcatccgatatccagctctgggacaccagctccaaccgactgttgagaactctcagaggtgtgcatgaggaaagagttggctcactggcatggaacaacaacatcctcaccactggcagtatggatggcaagatcgtgaacaacgacgtgagaattaggaaccatgttgtacagacatacgaggggcacagccaggaggtgtgtgggctcaagtggtctggatcagggcagcagctggctagtgggggtaatgacaaccttctgcacatttgggatgtgtcgatggcatcccccatgtcaaccgctggccgcaaccagtggctgcacaggctcgaggaccacatgtccgctgtgaaggcactcgcgtggtgtcctttccagagcaacttgctggcaactggtggtggcggcagtgatagatgcatcaagttctggaacacacacactggagcatgtctgaactctgttaacactggatcacaggtctgtgcccttctatggaacaaaaatgagagagagctgctgagctcacacggattcacacagaaccaactaaccttgtggaagtacccatcaatggtaaagatggctgaactcagtggccatacctctcgtgtccttttcatggctcagagccctgatggttgcacagtagcatcagccgctgcggatgagacccttcggttctggaacgtatttggagaccctgaagtggccaagcctgcagccaaggcttcccacactgggatgttcaacagcttcaaccatattcgataggaacaagtcatgagaacgatcccttctgttggaaatggccgtgcatcatatgtgaggtcgattcctattgatgagatctatccacattgagtaagcacacaacatcagcgagcattgccatcatatgcatcattcagaaatccaggatcagggccgtaaaagggttggactatatgtatctgcaacatcgcaagcaacagggaggctgtctcttcagaaattttcaagaggacgtgtcagaaacatactcaggaggccgtctcttcattcaaagaagcagaggaaaatggagcagaatcattact

SEQ ID NO: 12778 - DNA, 1525 bp, Zea Mays
cccgtctctgctcttctctctcttcttctccgatccgcagcccaatcacgacgaaaagagaagagaagcctccgtccctgcctccccgctctgctcctcctcctcctcctcctccctatttaacccgtctccaccggccattgctctctcccttcccgaagtcgccggagccacacgcattcccctgcctcgcacttccccctcctatttaccgcccgcgtcgccccccgccgcacgccttcccacccccgcgcctgcctctgcctgcctgctccccgacgccggggggccccacaacgatccggccccggccccgcgcggtcacagcaagccgggacatggcgcgcggcggcatcgcccgcctactcgccacgctcctcctcttcctcctgctcgccacgcccctcgcagacggagcttccgaggcagaggcgggcctcgcgcagggcgcgtccgaggcggcggcgccggacgcgggcgcggacgcgcagcagcagcacctcctgccgcggcccctcgtcatcgagctcccgtcgtcgcgggccgaggacgaggacgagcccggcgccgacgccgtgccgccggacgtgcgctgcgccagctggcggctggcggcggaggccaacaacctcgcgccgtggagggcggtgccgccggagtgcgcgccgcacgtgcgggactacgtcaccggcgtcgcctaccgctccgacctcgacctcgtggcgcgggagtccgccgcctacgcgcgcgccgccgcgccgctcggcgccgacgggcgcgacgcctgggtcttcgacgtcgacgagaccctgctctccaacctcccgtactacgccgagcacggctacggggctgagttgttcgaccaccacaagtttgacgagtgggtggagaggggcgaggcggccgccatcccctcgagcttgaagctgtacaatgaggttcgcgagctggggttcaagaccttcctgctcacgggcagaagcgaggggcaccgaggcgtcacggtggacaacctcaacaaacaggggttccatgactgggaaaagctcgtactcaggtgaccgcaagaaaacagcgacagtctacaaatcagaaaagaggaaggagatggaacaagagggttacaggatcctaggcaactctggcgaccaatggagcgacctgctggggtcttccatgggtgcccgctctttcaagctccctaacccaatgtattatatcccgtgacagaaactgggaaacaaggccgggtgaaaggtgctgcgtttattggatgcacaggcccggtcgaaaacagaaatcatttcgcaatggaatttaaaactgtacaaatgcttctttcactaacttggtgtacattactcgactgcatgtgcagttacttcaactatgtaagagtgaaaacgggtccggggatcaatgttcctcgatgcaactgtcaaacttaattactgcagcgcgtatattcttagaatttttttatagaataggttgaaaatcaaactacgttctagctgacgag

SEQ ID NO: 12779 - DNA, 2169 bp, Zea Mays
ccaacccagaccaaatccaccgtttcgttgctgttctattcgggtacagaacacccattggtttggaagccatcaccaccaccacctataataaattgcacgagatttgccgcgagaccgcatctccatcccgcatcgcgcatcgcatccaccgccgagcttgctttctttctttcttttttctgggagaagaggaagaagaggggaggcgcgacaaaaagggcgccgcgccccgccccgccccgcatcgcccccgacgccggcatctctccctcgctctccttctcccgatctgatccgaagcgcggcggcgtcgacgacgacgacctaagggcacgatgcattcgaccaacctgctgctggaggagcccatccggatggcctccatcctggagccatccaagaccagcttcttcccggcgatgaccaagatcgtcggcacgctcggccccaagtcgcgctccgtcgacaccatctcctcctgcctcaaggccggcatgtccgtcgcgcggttcgatttctcgtggggagacgccgcctaccaccaggagacgctcgagaacctcaagctcgccatcaagtccaccaagaagctgtgcgctgttatgcttgacacggttggaccggagctgcaggtggtcaacaagagtgaaacccccatctccctcgaggagaacgggactgtcgtgctcacgccgcatcagggccaagaagcctcctccaccttgctgcccatcaacttcgatggactcgccaaggctttgacaccaggtgcaacgatatttgtgggccaatacttgttcactggtagcgagactacttcagtttggttggaggtttctgaagttaaaggagatgatgtggtttgtatcatcaagaacacagctaccttggctgggtcgctcttcacgctgcattgttcccagattcatattgacttgcccacgctgtctgatgaggataaggatgttatcaaaaaatggggtgctccaaataagattgacttcctctctctgtcttacacaagacatgcagaagatgtgcggcaggcacgtgagttcctctcgaaattgggtgatcttagccaaactcagatctttgccaaaattgagaatgttgagggcttgaaccattttgatgaaatactggcagaggcagatggtatcattctgtcaagaggaaaccttggaattgaccttccacctgagaaggtctttttgtttcaaaagtctgcgcttcacaagtgcaacatggctggaaagcctgctgttgttactcgtgtcgtggacagcatgactgacaacctcagacctactcgcgcagaggcaactgatgtggcaaatgcagttcttgacgggagtgacgccattctccttggtgctgagactctccgtggtttatatccagtggagactatttcaacagtgggcagaatttgtgctgaggctgagaaggtattcaaccaagatttatactacaagcggactgtgaagtatgtgggagaacctatgacccacttggagtctattgcttcttcagcagtgcgagctgcactcaaagttaaggcatcagtcatcatttgcttcacctcttctggacgagctgcaaggctcattgctaagtacaggcccagcatgcctgttttgtctgttgtcattcctcgtctaaagacaaaccaactgaggtggagtttcacaggtgtttttgaggcaagacaatcactcatagttagaggcctcttccctatgcttgctgatccacgacacccagctgaatctaccagtgctacaaatgagtctgtgttgaaggttgctcttgaccatggcaaagcctcgggcgtgatcaagtcccacgaccgcgtcgtcgtttgccagaaagtgggtgattcctctgtggtgaagatcattgagctggatgattagacaatcaggctatgctgttgtctactagggcacgtttttgccaatttttttgcctaggccgaaacttattggctatgtataatcctatagcgcttgaaaactgagcagtttttcctatggtgacatcataggatttgcttttacagttccaattatggtgtagttcgaaatttgctcgactaaactgcggtgtaacagttaaatgggcagatggaataatgtaatcatactgttccctcgttaaaaa

SEQ ID NO: 12780 - DNA, 117 bp, Zea Mays
ccttcgccaaacagatgttcagggtcttcaacttcgtggaactcgaagagccagatcacttggtcgtcgaagcttgatcttcgatccctcgaaacttggagatggatcacattctaa

SEQ ID NO: 12781 - DNA, 792 bp, Zea Mays
aacataacgtttgggagatgctaaatcctttataatttctgtgaaagctgggcctggatttctccaatgctctgttactgtgtttccagtagaaggtgggcctatgcccttcagtatttctgaattaaagaaaaactcgatatgtcgtgacacggtgcggaggttgctgtcctctgcatcacaaaatctggtgaggttatcaactatcaagccttcacaaactccaagggcgtgtatactgtcgccgagactatgccggagagcgacaggtgggactcgtgcttggcgaggcctatgagcagcttccatctacattgcacacggcggggtgatgctcactctggggtgaagttcacttacaacaaatcgtctgggaacccgcacaccgtcaagcctttcctctacaagccggccaccgtccctctgtattgtagttaaacaacacatcttgctggaacgcagaagatagaacatacaggaagaaaatatgtattcgtgccccgactccatatgaccatatataagtaaacactgtttgatgtaaatcaaagattcagctgtctatgggagctgttctagtgtctggtcacccatacctgcgaggaaacagatgttgcgtgcttaatgttgataatatcagtgtttttcacctgctgtaaatgttttgcgaatgctattattatcttggttatgatgatattgtttttttctattctaagtttgtaaggactggtttgataacaaggaaattggaggagatgcatagaaaggaaatcccttgctatttaaaat

SEQ ID NO: 12782 - DNA, 1019 bp, Zea Mays
agggctcgcgcctcctctcctccgacccctataagcacccaaccctagcgcaaaaccccgcctccgctggacaccccgctccgcctccactcctcgcgccgctgccgcatctcctctacaggtaagaaggagagaaagagggcgaaatggtgaagcacaacaacgtcatccccaacgggcacttcaagaagcactggcagaactatgtcaagacatggttcaaccagcccgcccgcaagcagaggcgccgcatcgcacgtcaaaagaaggctgtgaagatattcccacgaccaactgctggccctcttcgtcccattgttcaatgccagactctcaagtacaacatgaagtcaagggctgggagaggctttacccttgaggagttgaaggctgcgggcattccaaaaaggcttgctccaaccattggcatttctgtggatcaccgccgcaagaacaaatcccttgaggggctgcaggccaatgtccagaggcttaagacatacaaggccaagctggttatcttcccaaggcgtgctcgcaaggtcaaggctggtgactctactctggaggagcttaccactgctacccaggtacagggtgactacatgccaattactcgcggtgagaagcgctctgtagaggttgtgaaggtcacagatgagatgaaggcgtttgcggcctatggcaagctccgccttgagcggatgaacaagaagcacctcggtgcccgccagaagaaggcagctgaggcagagaaggaagacaagaagtgaagcagccaaactttgtagcctgttttgttctgttcagtcatagcgagatgctacttccatcaagtgcttgttccaagttttttttgggtgctggaaatagagaccagtcaaatattttggtgtcctactgtttgataccttgtatttgtttgcgaactcagctatctaatgggttaatgaattcttggcgacgcacgattctgccttacaaaaaaaaaaaaaaaaaaaaaaaaaaagcagcatgtg

SEQ ID NO: 12783 - DNA, 1158 bp, Zea Mays
tcttttaccaaattggccctctgatatcctcctattctcgcaggcctccacgcgaccacgccgcggttttgcacttctcgccttctctaatctctttgcctccctccaccaccagtccaccaccactgctacccaaccctcgcttccccaaaccctagccaagggacacggtggccggcgatggacggcgacggaggaggcgctggtgcgctgcaccaccacacgcgctcacccgaggacgtcttccgcgatttccgcgcgcgccgagccggcatcgtcaaggcgctcaccacggatgtggagaagttctatcagcagtgcgatccagagaaagagaacttgtgcctttatggtttgccaaatgagacttgggaggtcactcttccagctgaggaagtacctcctgagcttccagaaccagcactggggataaactttgcccgtgatggaatggtcgaaaaagactggttgtctctagttgcagttcatagtgatgcatggctcctgtctgttgcattctattttggagctcgttttggatttgacaaagatgccaggagaaggctcttcaccatgattaacaacctgcccactgtttatgaagttgtgacgggggttgctaagaagcaatcgaaagcccccaacggcagcagcaaaagcagcaaacctaactctaaaccatcaaaactgaccaattctaacagtaagcccgcgaagccagcccacccaaaagaagaggaggacagcggccgggaggacgcagaggaggaccaggcgtacctgtgtgggtcctgtggggagagctatgcgaacggggagttctggatctgctgcgatgtgtgcgagaagtggttccatggcaagtgtgtccgcatcacccctgccaaggcggagcacatcaagcagtacaagtgtcccagctgcagcaccaagcggagccgagaatgacggcaccctgggaacaggacctgctcccagttaacggaagcattttagaatcattaggagctatgaagcggtgtcattagaaccgcttcacctgtttagcgtaccggtgcgcgtgccggctgttgtatcttctctcgacgtgtgttgtaaactgggcagggacatggtagctagtggtggtgtgttgtaaactgggcagggacatggtag

SEQ ID NO: 12784 - DNA, 146 bp, Zea Mays
gaaaagatcaacctcgtcaagaaagaagagaagtcaaactcgatcatctgaggcattactacccaacaaaagttctttctcactataaactttcttaccccaggctattcttgccctaacctacccatcttttataacaaaatgac

SEQ ID NO: 12785 - DNA, 394 bp, Zea Mays
ggaaactcaaggcccccagctaaactggagagctgtcatgtgcacatgcttttattcagaattttattcagaaggaaaaatctggtacaaacactattacattatgcgccacggttacgcgcaccatgtccaggtgctagcgcatcgggttctgccaaatacatacgattgaaccagcatcattttaccagctgtgagcacgccagccgaagatccttgtggggctccctagctgtctacatctacaatcatcagaggagcttcacagccccgagcagccctcttcggtaggagccccaggtgaagcagcatagaattagctttcatcatcatcgtcagtttgagtagcatcttcccttgatttcttcactggacgcagaaattttcctgtgca

SEQ ID NO: 12786 - DNA, 1007 bp, Zea Mays
tttttttgccaaattgtccgtgttagcaccgcttgcacaataatggaacaaatgtcaaaaccatcgggggcaaaaggataggagaataaggaaaaaacaatggcggtgctactccgccgcgccgcggcgctcctcgtcgtggctgctgtctgcgcggacggcgcctccacgttctactcctccgaccccaacctcggatccgcccgcgtcgtcttccagacgaattttggtgatattgagtttggcttctttcctcatgttgcacctaagactgtcgaacacattttcaaacttgtgcggcttggatgctacattacaaatcacttcttccgggttgacaagggtttcgttgcacaagttgctgatgttatgtcaggtcgaaccgcccctatgaatgaggagcagaaaaaagaagcggagaaaacaattgttggtgaatttagtagtgtcaagcatgtcaggggaatcctctccatgggaaggcactctgatccagacagtgctggctcttccttttctattcttctgggcaattcaccgcatcttgatggccagtatgctgtatttgggagggtcactaaaggtgacgatacattgactaaactagagaggcttccaacccggagagaaggcatttttgtaatgccgatcgagcgtatcaacatcctatcaacttactattatgatattgatctagagagctgtgaagcagaaaaatctattctccggaggagactttctgaatcagcatcagaagttgagcgatggagaagaaaatgctttgcttaatggtggaataaggactgcatattccgtttcatgatgctggatggtttcctgaggctggatatggacgacggtgtggaaatgtgtatgccgcgtgttcttatgctatcactgtaatacttgagtagatgttagatgggtcctaaggttccacatggatcttgtttgtaacacatgagcagatgagttgttacaataaaccttcaattcgtttaaaaaaa

SEQ ID NO: 12787 - DNA, 1282 bp, Zea Mays
aaacactaggggcaggctagtaacttcccgtaggctctaccttttttatcgggctcccccaccatccgtggcccgacgacgtccccatttccaagctcctcctcgcgattccaatccacgcacgcctcctccgcttccgcctcgctcaggagattcggatttgattatattaccctgattcgtttaaaaggatgggttgagctgtatttgcgcaacatattttgcgacacttatagtcagtgatggaacacaaggaggcgggctgccagcagccggagggcccaatcctatgcatcaataactgcggcttcttcggcagtgctgcgacgatgaacatgtgctccaagtgccacaaggagatgataacgaagcaggagcaggcccagctggctgcctcctccatcgatagcattgtcaatggcggtgacggcgggaaaggacctgtaattgctgcatctgtaaatgtggcagttcctcaagttgagcagaagactattgttgtgcagcccatgcttgtagctgaaaccagcgaggctgctgctgtaatccccaaggccaaggaaggcccagaccggtgcgcggcctgcaggaagcgtgttgggctgacgggatttagctgccgatgcgggaacatgtactgttcggtgcaccgctactccgacaaacatgactgtcagttcgactatcggactgcagcaagggacgcgattgccaaggccaatcctgtggtgagggcggagaagctcgacaagatctgaggcgggcattgggggagcgaaatggttgcaatctgcaagaattcaacatgctgtctttgctgcgttatcattgaaacttgccattcttgtctgctgctgcgtcccgtgaggttcaatactgtgatgcacacagcatccaggcagccgcaagaatttcatcaaaatggtttcccgtgttggctatgtcgtgacacagcttggtgtttgagtatgctgaatctggattagctacaacctacacaagcacaatttcctggtgaatgttgacactaggtgacctgaattctcaagcaaggcgtttcatattctgcaatctctttccagcgtgcgtacaacgggaacatgcagctcgcctttccgcatgtgattgcaacacgcctaacttgtttttgtatgattgtcacctgcaaagaattggaacaagtctaagcaacttgttttttgtatgatcgccacttgcaaagaagataatgatttgtacgaaatagtattcttctgctgggcatgaaatgttttcctccctc

SEQ ID NO: 12788 - DNA, 82 bp, Zea Mays
cttcaccaaacagatgttcaggatcttcagcctcgtagaacttgaggagtttggtctcttggtcgccgaagcttgaccgtcg

SEQ ID NO: 12789 - DNA, 1839 bp, Zea Mays
cctcgagaacaagagatggatattttacagttcatcaaaatggatatgagcaagatccatatgcgaaggaatttgggatcaacattagtgagaagctaacctatgttgaagcccgagtccttcctgcaccttggctgaagtatcatgacactggaaaagagaaagagtgcttaccacaggttggtcagtggaacatggtaaacaagaaagtgataaacggatgcaaggtgagccactgggcatgtataaacttctcaaggagtgttccagaagccacagctcggggattttgccaggaattggcacaaatgtgtcaaatttcgggcatggaatttaacagtgagcccgtgatgccaatatattcagctagaccagatcaagtagtgaaggcacttaaaagtgtgtataatattgcactgaacaaactcaagggtaaagaacttgaacttcttctggctatactccccgacaacaatggtccgttatatggtgacatcaaacgtatttgtgaaactgatttgggattgatatcacaatgttgcttaaccaagcatgtttttaagatcagcaaacagtacttggcaaatgtctcactgaaaattaatgttaagatgggaggaagaaacactgtgctcctggacgcaataagttggagcattcctttggtcagtgacatcccaactattatatttggtgcagatgtaacacaccctgaaaccggggaggactcaagtccatcaatcgctgccgttgttgcttctcaagattggccagaagttacaaagtatgctggattggtttgtgctcaggcacaccggcaagagctcattcaggacctttacaaaacatggcacgatcctcagagaggcactgtaacaggcggcatgatcagggagctgttaatatccttcaggaaggccactgggcagaagccattgagaataatattctacagggacggtgttagtgaaggccagttctatcaagttctcctttacgagttagatgccatccgtaaggcatgcgcatccctagaaccaaattaccagcctcctgtaacatttgtggtggttcaaaaacgtcatcatacgagactatttacaaacaatcacaaagacagaagtagcatggacaagagtggaaatattttgccaggaactgttgttgattctaagatatgccacccaacagagtttgatttctacctctgtagtcatgctggaatccagggaacaagtaggcccgctcactaccatgtcctctgggatgagaacaatttcacagcagacgaaatgcaaacactgacaaacaacctttgctacacttatgcccggtgcacacgctcggtttctgttgtccctcctgcatactacgcacacctggcagcattccgggcgcggttctacatggaaccagagatgtcggagaaccagacgtcgaagagctccaatggcacgaacggaggcttggtgaagcccctgcctgctgtgaaggagaaggtgaaaagggtgatgttctactgctgacgaggtgaccgctttaacaaccattcacatgctgtagctaacttggtagggttcagtaggggattagattagctttctccaggaacgaagaggaaacgggatgcgtatttggatcatgaacaatcaatctgttagcgatcgctgtaaaatactcggaaatgcctgtataatagttcttgttggttcagatgcatgcatccaatgttccagtgtactatgaaaagggggtgtagaagaaaccttctggtgttttctaggttgaattcaatcaattcattaacatcacgctggagtacaatctctgatgtttctg

SEQ ID NO: 12790 - DNA, 1411 bp, Zea Mays
tttaattgccaccggcacacacgacttgctgtaaagattccctggacccatgattggctgataatttgaatggggagcagcgagaagaccgttaccgcttacggcgagtacacctacgctgagctggagagggagccctactggccgagtgagaagctgaggatttcgattactggggctggtggtttcattggatcccacattgctcgccgtctgaagaacgagggccattacatcattgcctctgactggaagaagaacgagcacatgaccgaggacatgttctgccatgagttccacctcgttgatctcagggtcatggacaactgtctcaaggtcacccatggtgtcgaccatgtcttcaatcttgctgcagatatgggtggcatggggttcatccagtcaaatcactctgtgatcatgtacaacaacaccatgatcagttttaacatgctggaggctgcacgtatcaatggtgtgaagaggttcttctatgcctcgagtgcatgcatttaccctgagttcaagcagcttgacacaaatgtgagcttgaaggaatctgatgcctggcctgctgagcctcaagatgcctatggcttggagaagcttgcaaccgaggagctgtgcaagcactacaccaaggactttggcatcgagtgccgcgtcggccgcttccacaacatctacggccctttcggaacatggaaaggtggccgcgagaaggcaccggctgccttctgcagaaaggctcagacatccacggagaggtttgagatgtggggcgatggtctccagaccaggtccttcaccttcatcgacgagtgcgtggagggtgttctgagattgaccaagtcagacttccgcgagccagtgaacatcggaagcgatgagatggtgagcatgaacgagatggctgagatcgtgctgggctttgaggataggaagctgcccatccaccacatccctggcccggaaggggtccgcgggcgcaactctgacaacacccttatcaaggagaagcttggctgggccccgacgatgaagctcaagatcgagaaggagaagacgcagggggtcgacatcgcggcgtacgggtcgtccaaggtggtgtccacccaggcgcccgtgcagctgggctccctccgcgccgccgacggcaaggagggcctctaaagcgacgacccagggctgtctggcgtaccatggcgggatatactgtttgcggtagaatatcacagtagcagcaaaactagtacttttggaggttcagacatgacggtcgccttcttttctattttcccattcatcgctccatttatttatgatgccatgcaactcgttgaatttttgctgtactccctttatttggtcttggccggccggcaataaaattctccctgtttctactaca

SEQ ID NO: 12791 - DNA, 857 bp, Zea Mays
aagcaagcagcaacaccgccaaaccctaaacaccaaagccccgcatataaataccttcccctcccatcttttcccctctcctgccgccgccgccgctcccgctcccagctcgtgttccgcttcttgcagccgtcgccgcgaagcgctccagagaacttccgtcaacatggggaagacaaggcatacaagaagagccatttgggcaatgagtggaagaaacccttcgctgggtcatcccatgccaagggcattgtcctggagaagattggtattgaggccaagcagcccaactccgctatccgtaagtgtgctcgtgttcagcttgttaagaatggcaagaagattgctgccttcgtgccaaatgacggttgtttgaactacattgaggaaaatgatgaggtcttgattgctggatttggtcgtaaggggcacgctgtgggagatattcctggtgtccggttcaaggtcgtcaaggtttccggtgtgtctctgcttgcccttttcaaggagaagaaagagaagccaaggtcttagattgctcttgctaccaaaatcagcaagcgtggagttgaaacgggagggcgttagatgattaagaagaatggttgcttgctatgtttgcagtgcattcgtgcaattgttaacctaagattttgttggtgaaaacgatttcttttcagacttgcttctgttgagtgctatcattccatatcaatgtacttcctcttctagaatttttgttgcccgcaagttcatttatttgttgtccgccagtttattttttaaactaaaacgatacaaataaaaaagaacagagtgtaattgctttgtacaattgcatatcttgatagagctta

SEQ ID NO: 12792 - DNA, 937 bp, Zea Mays
gctctatgcgatctcatctcatctctgtgccacagccagtcgaatctcacagccacggtgtggacctccttttcgtctccactcttcctgttcctctccttttatttatcccgaaattccactttactatactgtactgtagtactgcaaaaagatctcaaagccgaagcaaacaaatctctcgtgcttagccctagctagctactggtccttttcttctcctctcccgtcttcgttactcggatcacgaaatctatagctactaattactggcgatggaggatctctcggatcttggaggccacggccacccgggtgctgctgcctggcggcccgcggcgccatcattggcgtcctcttccaaggtctcggtgcaagtctacaccgtcccaagctcagctgctaccggccgtgaagcccgaggtcaaggtgttgcaccaatgatgcatgcgtctagcgtcgctggccatggcggccgcgctgctgatctagaccccgtcaaggccaagatcgtctcccaccctagctaccaccgcctgctcgccgccttcttggactgccacaaggtcggctgcccgccggaagcggccgaggagatcgcggcggtggcgcgggagcgcgaggcgtggcagcgtgcagccgcgggcgacgtcgcgcacacaaggccggacccggagctcgaccagttcatggagtcctactgcgagctgcttgtgacgtggaaggaggagctgacccggccgctccgggaggcggaggagttcctgacgacagtggaggcgcagctcaactccattaccaacaccgggccaaccatgggagctttcatctcttcagctgcagctgcagctgatgaacagtcagaatggtgccaatctgaagaaaaagtttctctcaaagggagttagtatgagcaaggtgcatcttgaagaaattt

SEQ ID NO: 12793 - DNA, 1744 bp, Zea Mays
cacaaatagagtggacgagatgcattggtgtaccagcaatccatcggtgcggtttgcagcctggactggccaaggtcaaatttcctggtccaggtgttggatgactctgatgatgctaccacttcggcacttatcaaggaggaggtggagaaatggcagcgagagggtgtgcgcatagtataccggcaccgggtgatccgggatggctacaaggctggaaacctgaaatcagccatgaactgcagttacgtgaaagactatgagttcgttgtcatcttcgatgctgatttccaaccacaggcggacttcctgaagcgcaccgtgccccatttcaagggaaaggatgacgtcgggttggttcaggcgagatggtcgttcgtaaacaaggatgagaacttgctgaccaggcttcagaacataaatctttgcttccacttcgaggtggagcagcaggtgaacggggcgtttctcaacttcttcgggttcaatggcaccgcgggagtctggagaatcaaggcgcttgaggagtctggaggatggatggagaggacgacggtggaggacatggacatagctgttcgagcgcacctcaaagggtggaagtttctctttctaaacgatgtcgagtgtcagtgtgaattgccagaatcgtatgaagcgtacagaaagcagcagcaccggtggcactcaggtcccatgcaattgtttaggctctgctttgtggatataatcaaatctaagatcggtttctggaagaagttcaacctcatattcctcttcttcctgctccggaagctgatactacccttctactccttcaccctcttctgcgtgatcctccccatgacgatgttcgtccccgaagccgagctccccgcgtgggtggtgtgctacatcccggcgacgatgtccatcctcaacatcctcccgtccccgaaatcgttcccgttcatcgtcccgtacctgctgttcgagaacaccatgtcggtgaccaagttcaacgccatggtctccggcctgttccagctggggagcgcctacgagtgggtcgtcaccaagaagtcggggcgctcctccgagggcgacctcgtggccctcgtggagaagcactccaagcagcagagggtaggctcggcgcccaacctcgacgcgctgaccaaggagtcgaagggcaccgaggaggagaagaataagaagaagaggaagaagaagcacaacaggatctacaggaaggagctcgcgctgtccttcctcctgctgaccgcggccgcccgcagcttgctgtccgcccagggcgtccacttctacttcctcctgttccagggggtttcgttcttggtcgtcgggctcgacctgatcggcgagcaggtggattgatagcagttgaataatgggttatatatatatatatatatatatattttcgcttgaagaaatcctcgcaggcatcatcaaattcaaagggctctttgtgaagggaagagcgtcgccttcttggatgcggaaaccttgggtccctgttcctgttccaggaggggtcggaaacgtggggagctgtgtagataggtatagcttggggtttagcctgcgagatgcttttgttcttccaggtttcgattcttttgtaagaatatttgtgcccctacatgcaagggctcttttgtttttttctttttttgacagactttaccttcaaatgaagataatacttgtgttccattccatctcgctactacatgccgtg

SEQ ID NO: 12794 - DNA, 977 bp, Zea Mays
caaacatattagacactccaaactgatcttatattatatactccctccaaaggtttcattaccctgaggcgctcagataggatggatggggtgatctgcttgtacttgggcacctcggagagcagcttatcgtaggtggcctggtcgaagagcacagcgttgttgaccttctccttctgcttacccttgctccacttcttcttcttctgcttcccgcctccggacttggccggcttggacgatggcggcggggccttctccttcttcggggcctgagagaacaatcgaaacggtcagcaacagacggccaggccgcaggtgcgtggagaggagaggcgagattgcgagaaatgcaccatggtggaggtggcgccggaggcgtgaggcgagcgacggagcggaagcggcggcggcgggagtcgatgcgtgtcggggccagcagctggtatatgagttggaggctagggttttgagctggctatgcgtgctctccaccgtctgatccgatcggagggctgggactacgttttcgccttttcggggaggcatatactcgtttacacccccgtgtctgcaaaaattgaagcaccactatgcatgcatgcagagcactccatgttttatttagttattacgtaacactccctaagaaggactggacaagtgctcatgcaaatgttttaggagggtcaaaattaaaacgtaggagtaggtaggacagctttattccgttccaacttccaaggtccgagggctccagaaaccggcaaggggatcgaagcggagagcaagggagcggtcgagcgggtgacatcatcgtcatccagggtttctcaatcggcagcgatggcgaccagggcggcggcgaggttcctgcagcgcaggtttctgtcttccggcggcaaggtcctcagcgaggaggagaaggccgccgagaacgtgtacatcaagacaatctaaaatagaggacgcggaac

SEQ ID NO: 12795 - DNA, 1699 bp, Zea Mays
catggttttacttctaaccttttatctgtcatagatccttcttgctgcaaaatatagaccatatggtgtttataaagactcccgcagcattcttgtaatacataatttagcacatcagggtgtagagcctgcaagcacatatcctgaccttgggttgccacctgaatggtatggagctctggagtgggtattccctgaatgggcgaggaggcatgcccttgacaagggtgaggcagttaattttttgaaaggtgcagttgtgacagcagatcgaatcgtgactgtcagtaagggttattcatgggaggtcacaactgctgaaggtggacagggcctcaatgagctcttaagctccagaaagagtgtattaaacggaattgtaaatggaattgacattaatgattggaaccctgccacagacaaatgtatcccctgtcattattctgttgatgacctctctggaaaggccaaatgtaaaggtgcattgcagaaggagctgggtttacctataaggcctgatgttcctctgattggctttattggaagattggattatcagaaaggcattgatctcattcaacttatcataccagatctcatgcgggaagatgttcaatttgtcatgcttggatctggtgacccagagcttgaagattggatgagatctacagagtcgatcttcaaggataaatttcgtggatgggttggatttagtgttccagtttcccaccgaataactgccggctgcgatatattgttaatgccatccagattcgaaccttgtggtctcaatcagctatatgctatgcagtatggcacagttcctgttgtccatgcaactgggggccttagagataccgtggagaacttcaaccctttcggtgagaatggagagcagggtacagggtgggcattcgcacccctaaccacagaaaacatgttgtggacattgcgaactgcaatatctacatacagggaacacaagtcctcctgggaagggctaatgaagcgaggcatgtcaaaagacttcacgtgggaccatgccgctgaacaatacgaacaaatcttccagtgggccttcatcgatcgaccctatgtcatgtaaaaaaggaccaaagtggtggttccttgaagatcatcagttcatcatcctatagtaagctgaatgatgaaagaaaacccctgtacattacatggaaggcagaccggctattggctccattgctccaatgtctgctttggctgccttgcctcgatggaccggatgcagtgaggaatccagccgaacgacagttttgaaggataggaaggggagctggaagcagtcacgcaggcagcctcgccgtgattcatatggaacaagctggagtcagtttctgctgtgccactcactgtttaccttaagattattacctgtgttgttgtcctttgctcgttagggctgataacataatgactcattagaaaatcatgcctcgtttttattaactgaagtggacacttcgcattcttgcccgtttaccagagatggccactgctgatggtgcattttgacaggagtgcatcacctggacctttggtccaaccgaacaattaatcatcaacaaacaattaatccgcaacagccgactggaccggtggaaccggcctaccagatcgcagaacggatcctgattaatcggtttattgaattcgtgcg

SEQ ID NO: 12796 - DNA, 2243 bp, Zea Mays
cgggtaggagacaatccccacgccaccgcgcaccggagacgaacctgaggagagaaaaatctgcgcccgtcagtgtgctcgcctacttctacgctccgctcgttcccccaaatagttcctcggcttcgctcctttcccctccctgctccggctccggttcgcacacagatggcgctgccatccatgagtcttgtggcaaagggtgtgcttcccttctcagcacgtacctcgagtggtgtcacacaaaggccggtgtcagtgactgcttccttggagcacaaaaccagcgatgccagaaggaagttcctaaaacttgcgcttgggaaccttggagttggactgcccaccttgttgggcgctaagaaagctctcgctgatgagcaaggcgtctcgtcctcgaggatgtcttattcgaggttccttgagtatcttgacaaggatagagtccgtgtgcagcttcctggtctaagccaggagcttcttcaaaagttgagggagaagaacatcgattttgctgctcacagcaaccaggaggactctggttctcttctgttcaaccttattggaaatttggcattcccgcttatccttatcggtggtctgtttttactttcaagaagggcacagggtggcctcggtggacccaatggtcctggctttccccttggttttggtcaatctagggccaagtttcagatggaacccaacactggtgttacatttgatgatgttgctggtgtcgatgaagcgaagcaagacttcatggaaatgtttgttggtgttggagcttccagagttcgtgaccttttcaagaaggccaaggagaatgctccttgcatagtgtttgttgatgaaattgatgctgttggaaggcaaagaggtacaggtattggtggtggaaatgatgaaagggagcagactctcaatcaactactaactgagatggatggtttcgagggcaacactggaattattgttattgctgccactaaccgggctgacatattggattccgctttacttagacctgggcgttttgatagacaggtgtctgtcgacgttcctgatgtacgtggaaggacagagattctaaaagtgcatggtagcaacaagaaatttgattctgatgtttctcttgatgtcatagcaatgagaacacctgggttcagcggagcagacttggcaaaccttctgaatgaagcagccattctggctggaagacggggaaggacagcaatttcttcaaaagagattgatgattctattgacagaattgtagctggtatggaagggaccgtgatgacagacgggaagagcaaaagtcttgttgcttaccatgaagttgggcatgcaatttgcggaactttgacgcctggccatgatcctgtccaaaaggttaccttagttccaaggggtcaagctcgtggtcttacatggtttatcccgatggatgacccaacactcatctccaggcagcaactttttgccagaattgttggcggccttggtggtagagctgctgaggaggtcatatttggagagcctgaggtgaccactggagctgctggtgacttgcagcaaattactggcttagccaagcagatggttgtgacattcggtatgtctgaaattggtccatggtctctgatggagggtggagcgcagagtggggacgtcatcatgagaatgatggcaaggaactccatgtcagagaagctcgcggaggacattgattcggccgtgaagcagttgtcggatgaggcctacgagatcgctttgaggcacattagaaacaacagggaggccattgacaaaatcgttgaggtgctcattgagaaggagacagtgaccggagacgagttccgggcgatcctttctgagtttgccgagatccctgttgagaaccgggttcccccagccacaccggcggccgcgctcccagcctaaaccctagccttgtaggggaggattttcttgttgtatggtgttcatattttggattcttggtgtacactaactctactaaatctgccggattttcggtacacgacatgtaagatgtaacttactcatggtgaattaatagtaaaatgtaattagattaaaataataggcctggcgcaacattttcagtttgtagcttcgcttctggcgagcgaaatctcttgctatatgttccacggttcctacttcataaaactatatgttctaattaagaacttgccattttgtttttggaactg

SEQ ID NO: 12797 - DNA, 804 bp, Zea Mays
cttttgtatgctgaagctactttcctttttgatactggaggcaagaaaccatggtggatgctctgttgcaattgcaagtcattttttcctcacgaaaaaatttgctctagtttctttagcagatctctgagaactttgttcctggaagaatgtataattgccgatgaagggagcgaatggctccatgaactcgccgtcaacaattctgttctggtgacactgaacttctacatgacagaactcaaagtggagcctgccgatctggagcttcttgcaaggaactgtaaatcattgatttctctgaagatgagtgactgcgatctttcggatttgattggttttctccaaacctccaaggcactgcaagaattcgctggaggcgcttttttcgaagtcggagagtacaccaagtacgaaaaggtcaagctcccacctaggctatgcttcttggggggtcttaccttcatgggtaaaaacgagatgcccgttatctttccgtattctgcgtcgcttaagaaactggacctgcagtacactttcctcaccactgaagatcactgtcagcttatcgctaaatgccccaacctactggttctcgaggtgaggaatgtgattggggatagaggactggaagttgttgccgatacatgcaagaagctacgaaggctgagaatcgagaggggggacgatgaccccggccaagaagagcaggagagtctctcagataggcctgacagccgtagctgtcggctgcgggaactggagtacatagcggcatacgtatccgacatcacaaacggggag

SEQ ID NO: 12798 - DNA, 1263 bp, Zea Mays
aagtgctgaccaaatctgtcaacaaggagtgctttctccaaactccaaacacaacgaacagtctatgtggttacaagattgttactgggcaaccatcagatagacttggagaggacttctcagagcattacaaagatttcacagagaggttaactggaacagaagagacggtacgagcagcctccaagcgactaactcaggggatggcagatttcaacaaggcaatatcttcagcaaaaactgacgaggaaaagactaaaattaaaggcgatcagcaaacttcaacaaggacaatgaggtcatataacaatatattggcaatgacacagtcattgcattcaaaatcccctttatttatcggtgataagaaaatcactctgtcatggatggagcagcccaacaaagcagcagctacgaaagcaggggggaagaggtcacaacctagtacaaatgggaatgaccctgcaaacaagaaggggagaggaggaatgcaaaaccagctagtgaacagagcttttgaaggactgtctcatgttggaagaggcagtggaagagggcggggcaggggtggccgaggaagaggaagaggatggagtgggtaccactgagatgacctggaaattctgttcaaacctgacaagggatgagctttctgcttccaccagagagtaaactccaaggtcgatgttttattggtgtgcattactgcaacgcgttgaaatggatcaaggcacacaacagcagaaatgcgtacacagagaaaggatgctaagaaatgtctgcaagtttgtgcatctttcttattcatttaccatctcatcgtgttctttgccaccctaaccgtcgtgtcacttgcgttggctggctgtttgatgaactgggcagttcgatatctttgttctttattttattttacagtgtttgaagagacgaccaagcttgtgctgactttgtttgagttcgttttatgtttcgtccttgtactgacacagatgtattagtgatgtttaacttttatgtaacgattgatctagctgtaatataagttaagcatttaatgagatataaaaatgaaaagaaatatttggtgtcaatcaatacaaatttaacaaatcatgatttccatttgagaaaaataactgaatcagatcatccattagcagggaaccaatgaacatcctgatcaacactaatgtgtctggttcagctataaactatgaaaaaaactgtttttgagttgtctgctttgaaaaaaaaaatata

SEQ ID NO: 12799 - DNA, 1582 bp, Zea Mays
gcacaactctggagttgataaaagcttttttttctcggctagaatatgcaattccgatgctatattgtgggcaggaactaattaatggtaatttcacgactgcatttcttccaccaccatcaatttattacaccgggccgccacggaatatttcgcctccttggagaccagatgacaaggatggacactatgtttttgcggttggagagaatctcacaccaagatataggatacttaacaagatgggtgaagggacatttggtcaagttttggagtgctgggacttggaaaaccaagaagcagtggctatcaagattgtacgctcccttcagaaataccgagaggctgctatgatagaaattgatgtgctccagagacttgggaagcatgactttactggcagccgttgtgtgcaaatacggaactggtttgactatcgtaatcatatttgtatagtatttgagaagcttgggccaagcctatatgactttctgcgaaagaatagctaccgttcatttcctattgaccttgtccgagaatttgccagacaaatattagagtctgttgcatttatgcatgacttgcgacttattcacacggatctgaagccagaaaacattctccttgtttcatcagagtctatcagggtgcctgattataaggtttctatacgaccaccaaaggatggttctttctttaagaaccttccaaaatctagtgctatcaagctgattgattttgggagtacaactttcgagagccaagaccacaattatgtggtgtcgacaagacattatcgtgcaccagaagttatccttggtcttgggtggaactatccatgcgacttgtggagtgtgggttgcattttagttgagctttgttcgggggaagctctctttcaaacacatgaaaacttggagcatttggctatgatggagaaggtcttagggcctctcccaaagcatatgattgtcagagctgatcggcgtgctgaaaagtacttcaagcgcggagtaaggttggactggccagagggagcggcctcacgagagagcatgaaggcagtctggaaattgcctcgtctgcagaaccttgtgatgcaacatgttgatcattctgctggagatctaattgatcttcttcaaggacttcttcggtatgatcctaatgagcgcctgaaagcacatgaagctctacaacaccctttctttaccagatgcatcagaagatgtggtttctgaggctacactgagattgaaaatgtcaatgctgtatttcttcattttgatgtgtaagaactacaaaaaagtggagatgttctacgaaaaatgaaatatgctaacttgcattctgttcaatgatttgaaagtactagcaggtagcatgcagaaatccctaaccaggtggtgtcaattgaggataaatgggattaagtggtttcatggaagattggaacactatttaatggtggcatacagtgatctcgggtcaacagaaccgtgaacgatgtaatgctgactaaggctgacctggggaccctataccagttgggatttggtaccgtttgaccacgtgattctgg

SEQ ID NO: 12800 - DNA, 2322 bp, Zea Mays
gtggcaacaaatcaaccgccccagaggtatccgcctccggcctatcccctccactcccgaccccgcgatccccagacccggtccaccagaccaccacgccgcctccgctttcttccctgcctctactagtctacttcaactgcagccatccgccattcccgaagcttccagaagctcgcctgcaatggcgaggcttctcgtgctccgcacggcgccgtaccgtcactctgcccacctttgcgctgccaccctcctcgtgctccctccctcccagcaccgccacttcgcctccttcacctcccctgccccctttgccgcgcgccgcatcctcccctcgccactccgccttcctatccgcgcagtggagtcctcgcccgggcccaccaaagaggatcaggagccgtctccggccgccagtgaggcccaggagcagctagcgcccgcggtgcctgcgttcgaggtcgaagagcttgggtgggggacccagctcgccgtcaagctccgcatgctcgtagcgccgccgtggcagcgtgtccgcaagggaagcgtcctcaacatgaagcttcgcggcgagatatctgatcagttgaagacacgcttctcatcagggctgtcgctaccacaaatctgtgagaattttgttaaggcagcatatgacccacgaatctcagggatttatctgcacatagagccactgagatgtgggtgggcgaaggtggatgagatcagaaggcacattgtggatttcaagaagtctggtaaatttgttgttggttatatgcctgtttgtggggagaaagaatactatcttgcttgcgcgtgtggtgagctatatgcacctccaagtgcttatgttgccctgtttggcctaactgttcagcaaacatttctcagaggtgtccttgagaaagttggaattgaaccggaaattcaaagaattggtaaatacaaaagtgccggagatcaacttgcacgcaagagcatgtcaaatgaagttagggagatgctggcagcactgcttgacaatatttatggaaactggctggaaacaatatcttctacacatgggaagaaaaaagaagaaattgagggatttattaattcaggggtctaccaggttgccagactcaaggaagaaggttgggtaacagatttactgtatgatgatgaggtaatgacattactaaaggagagagtagggcagaaagacaagaaaagtctgcgtatggttgactacagtaaatactcgcgtgttagtaaaaagactcttggattacaaggtggaggagaacaaattgctataatcagagcatctggaagtataacacggactcgtagcccattgagtgctcctagttcaggcattgtcgctgagcagttaattgagaagatacgaactgttagagaatcagaaaagtacaaagctgttatcctacgtatagacagccctggtggtgatgctcttgcttctgatctgatgtggagagaaatccgacttctagccaactctaaacctgtagttgcttcgatgtctgatgttgctgcaagtgggggctactacatggcaatggctgcaccagtaattgttgctgagaaactgactctcacagggtcaattggagttgttacagggaagttctgccttcaaaagttatatgagaggattgatttcaataaagaaattatatccaagggtcgatatgctgagcttaatgttaatgatcaacgacctttaagaccagacgaggcagagctttttgaaaagtcagcacaaaatgcttatgcattgtttcgtgataaagcagccatgtcgcgatcaatgagtgttgatcagatggagagtgttgctcaaggtcgagtgtggagcggccatgatgcgttttcaagagggttggttgattcagtaggtggactctcacaagctcttgctattgcaaaacagaaagctaatatacccaaggataagaagatccagctagttgaagtttcaaagccctctccatcattaccggagatcttatccggcattggaggttcgttgcttggagttgacagggcagtgaagggagtgctccaggacatgacctccctaagtggagtccaagctaggatggatggaattctgtttgaaagtttaggagacatgtcaggagaaaaccagttattgttgcttgtaaaagatatcatgaactattttgattaattctagcattcaggtccttatgttccaaacatttgtatttagagatgaggggaaattcataatgtcactacacatctatcttgcacagaaacaggtagcttgtgatttgtgtaaaaaaa

SEQ ID NO: 12801 - DNA, 1722 bp, Zea Mays
gacgaaagcgacgccgcaccagcagcgcacctgcgcggcgcccacccccacaggcagttgggggcgggggcttccaggcacgcacgttcgacgcgcggcgggagcggtggactggtggaaccgcgtgcgtgcgatcgcagacgcagagccaggccggcaggccgcccatgtgaggcgcgcagggacgggcggggaaacggacgacccgaagaatgtggacgctgcctgaggcaagtgagattgctaggccgaatgcgaatgtggaggaaggcaccgtgccgattgccgcggagtgtggttctaaaaaggtccaagaaaagcaggattacagagatattttacaggttcaagatagccatcatgatgtacaaacactggataagacgatagcaagcctagagacagagctctcagctgcaagatcgctgcaggaatccctgctgaacggctcccctgtcgcggaagagtataaagtttctgaatcaatcgggaggcgaaagtaccttatggtgatagggatcaacaccgcattcagcagccgcaagaggagagactccatacgttacacctggatgccccaaggtgaaaagaggaaaaagcttgaagaagagaaggggatcattattcggttcgtcattggccacagtgctatatcaggtggaattgttgatagagcaatcgaagcagaggacaggaagcatggggatttcatgaggatagatcatgttgaagggtaccttgcattgtcaggcaaaaccaagacctactttgctacagctgtttcactatgggacgccgacttttatgttaaggttgacgatgatgtccatgtgaacatagcaacgctcggacagattctgtcgaaacatgcattgaagccgagagtgtacatcggatgcatgaaatctggacctgtcttatccgaaaagggcgtgagatattatgaacccgagcactggaagttcggcgaatcggggaacaagtacttccggcatgctaccggtcaattatatgctgtttcaaaggacctggcgacttatatatctataaacaagcatatccttcacaagtacataaacgaagacgtttcgttaggatcttggttcatcgggctagatgttgagcatatcgatgaccggaggctttgctgtggcactccgcctgattgcgaatggaaggctcaggcggggaacgtctgcgccgcgtcgttcgactggaggtgcagcggcatatgcaactccgagggaaggatctgggaggtccacaataagtgcgctgagggcgagaaggcgctgtggaacgccactttctagcacacacacaaaataaaaaaggaagcagcaacagaagctgctatataatagatcaaaccattttggtttgttgtctgtacattgtcccacggtttgtgtgtacgtaattcattgtaggtagctgcgggtttttttttttggttgttgttgtaacgggcgaaagcggaccaccattttaggtagtgtctgtcagccggtgccggtgaagatgatggagaaggatatggtgtgagcggtgatgtattcttttgtgcggtaaatgtgtggaggtggtcatcttgttgtgccgatctcctgtactgcatgtatggctgccgagatacgtgagaccgacaaacactttcgtgccataaaagtagagctagtaaataaatctggtaattgctgtccactctatgccgtaaaagaa

SEQ ID NO: 12802 - DNA, 1879 bp, Zea Mays
gaaacctgtgagggtcagtactataaatatccgatctcgtcggaaccctacccttttgagaactccccttctccgccactaccgaagcccttgtacccctcaccgccgccgctgctgctagggagcttccatccgcgcgcgcctacaacgagagctagcagcggtagcggccgttatcttgtcgctccggctccgttcgtgtacccaagtcccagcctagatgccgcagatggaggggtccactgatcagatcgccgccggctggttcgctaaggagccggcttccgagcggcccgtgggcttgccgaggaccggctcttccagtcgcctcaacgcgcaggcgccggagttcgtgccgcgggggccgccgccaccggcgccggcggttgtgctgccgcctccgccgcaggtgatccgcatgttcgccgcgcctcccccgccgccgcgtgggggcttcttctccgcgccgcagccccggccgttcgagtactatgcgcctatcggtgaacgcagcggatttgctgccaaggagcaacaggcgccggagctggaagcggagatgctcccgcccgccgcggtgaagacggagccggtggtggatgggctcgacgacgaggtggtgcacaagatcaccaagcaggtggaatactattttagtgacatcaaccttgctactacagaacatctgatgagattcattaccaaggattctgagggatttgtgccaatatcggtaattgctggctttaagaaagtaaaaacttctgtgcgcaataatgtgatgcttgctgcggctctccgaacctcatcaaaacttgttgtaagcgatgacggtaagagagtcaaaaggcagcagccatttacagaatctgatttgcaggagctccagtcccggattgttgtagcagaaaatcttcctggtgatccctcctaccagaatcttaagaagatattttcagctgttggaagtttgatttcaatccgaacttgctatcctcagactccaaatggcactggtcctgcaactaatagatcttccaagttagatatgctttttgctaacaagctgcatgctttcgtggagtacgaaactcctgaggatgctgcgaaggctattttggagctcaatgatgagaaaaactggagaaatgggcttagagttcggttgctgaatacttgcacggtgaagggggcaggcaaaggaaaaaacggaatgaatgaaactgatggaaatagtgaggaggatgtctccactttgaaccattctaacgagaaacagtttgaacaatcctctcaactgttagatgtactgccggaacacttgtttgatgagaatttcaacaaggaagttcccaagcgcggcaaagggcgcggtcgcggtggcagagggcatgggcgtggcaaccatcaatataacaatcaccatcacaataaccagcaccaccagaacaaccagccgcagtacaataaccatggcaacaaccaccttggtgggaaccgtggcagccttcactctgttggtactacaccgcataacctgataaccaagcttgagccgcatccgcagctgcctattggggccaacaagcttccaccaggcccccgcatgcctgatggcaccaggggtttcaccatgggcagggggaagccacaggctgtgctacctgggttgtgtgctgttggtgttgagtgaggcatgcagattgctgcttgtatgcttgtattgtatatctttgtggtgggagtatttgtgcgtcacactttgtggacacggcgagctgtcaaaaccagtatattacattcgctttgtaatcgtgtatctggcaatttggtcggttggcacgggtatgaatcaattttttttgaaatcaaaaaaaag

SEQ ID NO: 12803 - DNA, 269 bp, Zea Mays
tactgtcaactgaccagggaaaagcgcaaggttttattgcaaccgtgcagtctgtagctatattgttggcaccactatttatgagtccactgacctcttacttcatttcagaggaagcgcccttcgactgcaaaggtttcagctttattgtggcgagtttcttcttggaatgaaggacaagggcacaaaagctgccgtttcagacagcgctgatgaggaagcagcgcaagcaccactactggcaaaatggaccagaccatgactccagg

SEQ ID NO: 12804 - DNA, 1830 bp, Zea Mays
agattgggctggtccggccactccgacacccttatataaagtcccgaaccctagaggccagcaccttcctccccaactcgccgtctgccttctgcgcctccatttcggcctctgtcccttgcaagttcaatctcacctccaaccatgggtaaagagaagtcccacatcaacattgtggttattggccatgtcgactctggcaagtcgaccaccacaggacaccttatctacaagcttggaggcattgacaagcgtgtgatcgagaggttcgagaaggaggctgctgaaatgaacaagcggtccttcaagtacgcgtgggtgctcgacaagctcaaggctgagcgtgagagaggtatcaccattgatatcgctctgtggaagtttgagaccaccaagtactactgcacggtcattgatgcccctggacaccgtgacttcatcaagaacatgatcactggtacctcccaggctgactgtgctgtccttatcattgactccaccactggtggttttgaggctgactgtgctgtccttatcattgactccaccactggtggttttgaggctggtatctccaaggatggccagacccgtgaacatgctctccttgcgttcacccttggagtgaagcagatgatttgctgctgcaacaagatggatgcaaccactccgaaatactccaaggcacgttatgatgagattgtgaaggaagtctcatcctacctcaagaaagttgggtacaaccctgataagattgcctttgttcccatttctggttttgagggcgacaacatgattgagaggtccaccaaccttgactggtacaaaggcccaaccctgcttgaggctcttgaccagatcaccgagcccaagaggccttcggacaagcccctgcgtctgcccctccaggatgtgtacaagattggtggtattggaactgtaccggttggtcgtgtggagactggtgtcatcaagcctggtatggtagtcacctttggtccaactggcctgactactgaggtgaagtctgttgagatgcaccacgaggcgcttcaggaggctcttccgggcgacaatgttggcttcaacgtgaagaacgttgctgtcaaggatctcaagcgtgggttcgtggcctccaactccaaggatgaccctgccaaggaggctgccagcttcacctcccaggtcatcatcatgaaccaccctgggcagattggcaacggctatgccccagtgctggactgccacacctcccacatcgccgtcaagtttgctgagctcattaccaagatcgacaggcgatctggcaaggagctcgagaaggagcccaagttcctgaagaacggtgatgctggtatggtgaagatgattcccaccaagcctatggtggtggagacattctccgcgtatcctcccctgggtaggtttgccgtccgcgacatgaggcagacggttgctgttggagtcatcaagagtgtggagaagaaggacccaaccggcgccaaggtgaccaaggcggccgccaagaagaaatgatgcgatcccgtgtctgcttttgcagtgcctggataacttgccactaaagttgtgtatgcggttgttgctgttattgcgtggactgtttgctgcggtgtctcctgtttgtttgggtagcgcagcgtcggcctcttcaggtgtctgttgtctgttgtctttactatcagtaatgctcctgagacttgtatttctccttttggcgccgctaaatggaattttcgaacaatgattttcgtgttattattttacaaccttttcgaacaatatttacacgtctgatgtgttttgctgaga

SEQ ID NO: 12805 - DNA, 3587 bp, Zea Mays
tgagccttcctgggatgctttgaatatgcggtatgcagctatgcacattgttatgttaccaaccactgtcagagcaccttgaagggctacaagaacctgtgggtcaagcaagaaaaccattatcacgaaggcaaacaatacgagcagaagatctgtttcaaatgttgggttgtacttttgtctattttcatgaaaactccgaagggttaacatgtgtaataattatgtcatcataagaagtagtaaaacatgactgcataaggatctcagcgaaaagaatatctgaaaatagtcgctggtctacactaatcaatgtttcattcatagcaggaacacaatggcatctcacaatcaagaacataaaaattggggacagatacgtttgataatcatatcagcaaacaacaaacacgaaactgcacttttaacccaaaggaaatatcttacttcaagagactctgaattgtagaagaaatgccacgtgcaagcacacattgctccacctagaagtggaaccatcccccacgagaggcctttccaacccttgagccccgtcttctcgccgtagtcccaaaccagccacatcgccgtcaccctgcaacgcaaatccccgtcagggattcagacattcactcctcacagagcttacaggcgcggaagcagttgttgctagccggtagcagagagaagcggcaccactcggcgacgctggagacgtggacggcccaggtgggcagcgagagcgcgttcgccggctcggacagcgcggcgagcgccggtggtgaggcggccgcggccgccgccacggcagcagctgccgccaggcccatcccacctgtcagacggactgcggaggacggtctccgctgcttacgtcgaggtggcggcggaggaccggagggcgctagcgttgccacgagccggagggatgccattggagccggaggttggcgctagcgctaccgtccgtgaacggtcaaaaatatcagtggcaacgtcagcactcgaacctgtcttgcggtcggtcacgtgcccctcacgcgctgcactagggtttccgcagcatatctaaatactggagcacccccgtccgatctccccctcttttccggctgcgccttcccctcgcagccgccagtcctcaacgccactatcagcagccaccgcccgttacttgtgatgtctcccgccctcgccgctgccgtggagcccatggccgtcgacgactccgcctccaagaaggccaagcgcaagcagctcaaagccgctgccgccgccgccgccgcggaggcagaggaggaggctgcttcggccaagaagaaagagaagaaggagaagaagcggaaagcgaaggagccgtcccctccgctcccgtcggccgcatcatctggcgaggagaagagcagcaccagctccgaggagacagcccccaccgcgaagaaggcgaagaaggacaagacgaagaagaatgtcgaggtctcgtcttcagcctcagatgacgacggcgagatcacggccggcagcgacgaggaccccgcggacccgaacgcgctgacgaacttcaggatatcggagccactgaggcagagcctcaggtccaaggggatcaaggcactgttccccatccaggccaccactttcgacctcgtactcgacggcagcgacttggttggccgagcgcgcaccggtcagggaaaaactttggcttttgtcttgcccatattggaatctttggttaacggggcaaataaggcatctaggcggactgaacatggcaggaccccaagtgttctcgttctgctaccaacaagagagctggccaatcaggtgcatgccgactttgagttttatggtgcaacatttgggctttctgcatgttgtgtgtatgggggttcaccttatcgtcctcaagaaatggcattgagaagaggcgtggacattgttgttggaactcctggtcgtatcaaggattttattgtaaaaggaactctcaacttgaaatgcttgaagttccgtgtccttgacgaagctgatgagatgcttaacatgggctttgttgatgatgtcgagctcattcttggcaaggtagaagatgctaccaaagtacagacacttctgttcagtgccactctgccagattgggtgaataagctctctatgaggtttctgaaagttgacaggaaaacagttgatcttgtcggtaacgagaaactgaaggccagtgcatctgttaagcaccttgctcttccttgtaacaaggcagcaagggcacaacttattccagatattatccgatgttacagccatggaggccgaaccattatcttcactgagacgaaggattctgcatcagagctttctggtttgattcctggatcccgtgccttgcatggagatgttgtgcaagctcagcgtgaagtcattcttgctggatttcgtagcgggaagttccaggttttggttgctacaaatgtggcggctcgtggtctggatattaatgatgtgcagcttatcattcagtgtgaacctccccgtgacgttgaagcttacatacaccggtcaggtcggacagggagagcaggtaatactggtgttgctgtcatgctttatgagcccagatataagtacagtgtcagcagactagaaagggaatctggggttaagttcgaacatatctctgcaccacaacctactgatgtagcacaatctgctggcagtgaagctgcagatgccattgcgagtgtgtcagacagtgttattcctgtcttcaggcagcaagcagagcagttgctaagctcttccactctgtctgcggctgacttgcttgccaaagctcttgcaaaggcagttggttacacggacataaagaaaaggtcattgttgtcttcaatggaggattacgctacactacatcttcaaactggcagacagatgtggtcacctgggtttgcttttactatattgaaaaggttcatgccagaagagaaacttgcagatgtaaagggtgcaaccctcacggctgatggaacgggggttgtatttgatgttcctgcagcagatgttgaagattacattcaagcttcggagaatgccgcacaggtgacaattgatgaagtccagcaattgccacccttgcaagagaagcagcagcagcagtcaagaggcaactcggggggaggaagatttggccgtggaggtggcgggagattctctggtggtggccgtgggggcggcttcggtggtggcggaagaggcagaggtggtggtggcggcagggggaggcggcggcaatagatttaacaggaggaattagaagctgctgcaatcttaacggacgtttcagtgacgtagttttgaggaagagggggagggaatattctcagttttggctgcaattgtatcgggttttgtttatttgttagcgttcgtcaacgagaatacgacacacatttttgccaacgcaagaattcgcgtttatctactcgaaatcaaccaacgtgttattactaagtaaagctataaacctattgttttaacttgacatggatgctgactcggtctcctttggtcagaaagtgtagtttcta

SEQ ID NO: 12806 - DNA, 968 bp, Zea Mays
cagaccattcagtacaatcttggtagaagagtggtgctgctttgttggttgaagctgcaaatatgggtgatccagatgcacagtatgaacttggatgtcgactaagaattgagaatgactatgttcagtcggatcaacaggctttccattacattgagcaagctgttgatcagctgcaccctggtgctttatatcttctcggtgctgtatatctaactggggactgtgttaagagagatatggcttccgcgttgtggtgttttcatagagcttcagaaaagggacatgctggtgcagctatcgcatatggatccttgcttcttaaaggtgctgaaatacctgaagttattacaaggttcaactcaggcaagagtccatcaactgggaaaatgcggaaaaggacccaacagcaggatccagtaaagctagcgaaagaacagtttcaaattgcagctgaggcaggctgtgatctcggtctgcggtggttgaagaggcttgaagcttatgaaaaccaagaagaaaagctaaagcaggttcagcaatgatatccactgaaagaatcccattgcatttgtcgcatacaagtatggtatatggcagcatggttgctgcacataggtataccaataatttcctttcctgccttcattatgttggaggctattcgatcctcggatgttcgggtcaactttgcaggaagatatactgaaatttggatatttagactaacttcttggattataggcgattggatgttcactttgtacgatgtattagcgttgacattactggaagccctaattgtgagaagtagaaacatatcatgtgtgttgctacgggcattatggatgatttagaataaaattagactatataactacttatacgaaggaataaattgtggcatatgatgatgtggataacaaaatgttctgtggcttcctgacatcataattgcatgcgttagg

SEQ ID NO: 12807 - DNA, 1730 bp, Zea Mays
gttccgtatacataatttggttccaaatggaataacccaatgcagcagtagccgtctgcctcctcgctttccctttcgtccgtacgccgccgcctcgcaccgccgacagtcctcagtccagaactccagatcgagcctccctctccccagatcgggtcctaggctacagcagccgccgcatccgtcaccttcacaccgcgtgcgtgctctctctccccctccccctctccgtgcgacgactgggtgggctaccgccgccctacgcaaggtgccgagaacttcgccgatatctgcgccggagaagagcgcccaccagatcaggcgcttagaaggcgcgctggccggtggatgacgatggcgggtggcgggggactgaaccggtcttcatcgagggggcagctgccgccgcaagagctgcttgacgatctctgcagccggttccttctgaatgtgcccaaggaggagctggagtcgttcgagcggatcctgttcctgctggagcaggcgcactggttctatgaggacaactccgttgagcacaaccccaacctcaagtccctctccttcaaggacttcacttccctcatgttcaagagctgcactgctctccggccctacatcgcgcacctggatgatatctacaaggacttcaacaactacaagtttcgtgtgcctgtgtccggcgccatcatcctagacgacacttatgagaggtgcttgcttgttaaaggatggaaggctggggccagctggagctttcctcgtggaaagaggaataaagatgaggaagaccacacatgtgctgttagagaagttctagaggaaactgggtgtgatgtttctagactattaaatctggatgattacattgaagtttcaattggacaacaaagggttcggctctacatcataacaggggttaaaagagacactgtgtttgcacctcaaaccaagaaggaaattagtgaaatttcatggcacagaattgatgacctcttaccagctagtgatgatgcagtatctcgtgcagtgaatggaatgaagctgtacatggttgcgccatttttgacgggtcttaaggcttggattgccacacatcctccaccactgcatcagaaaccagagacatctgctagaggtactgtgtggagggcgaagggttcgtcgagcggcacaaccccagtggagaatcctgttgctaaagcaggatctgacgtgcagcacgctgccgaccgccctggttgcagcttcagaaacttcaggtttgacaccgcaagcatcctgcaggccatggaggcttccttcctacgcacctagaatcctgacgaagcatcaacacctgcacccttgatgtgtatagaccgcggaccagcgctatctgtgttgtcaatctgtctttgtttcgtctttctcgccttgtatctgtactcttcacagcaatcctgtcagacgcttgaacctgattttgctgctgccccgtttggtggtggttgtccataaagttctaacgatggtgctgcaaagtctggaaagggccgacttgcgatcttcgtgctgatggctcggatggggccaatccattgggccgctggagccactgcccgcgttgttctacaagagttagttatcctcgcggttgacacagaaaggataaaattgcaagttgtgtctcagtttggcactcgaagggagcttgtgtgggtgttgttgtttttttttttttggtggag

SEQ ID NO: 12808 - DNA, 93 bp, Zea Mays
aatacagcaaaaaaaaaaaaaaaaaaaaaaaaaaaaaaaaaaaaaaaaaaaaaaaaaaaaaaaaaaaaaaaaaataaaaaaaaaaaaaaaacc

SEQ ID NO: 12809 - DNA, 1222 bp, Zea Mays
caccgagatgcttcaagcttcaagtatcactcactcactcctgccgtcacccctagctgcatcggatggcgatcgtacggacaggataccacgacgaacggaacctacgccggctgcgaacgcgaatctgaatacaacgaggtagatcctcctccgtaaagcgaaagcaaaaaccaaccaaacaagctagctagagctagccaagccgcggcgtgcctccgctccggccggcccgcccctgtcagagcccccaccgccgctgccacctccgccagccgtcaccccaggcgttggatcggggccctctcgatccgcgcccggcgaatccagacggacccgcattggggttggggccccttcgatccggcgcttggtgggggtttggctgggagctccaggctgaggggacggggcggggggacctgatccttcattccgttcggatttcgcttttcccccgtggggtctcgactgccggagggggaggaggacatggatttggcgtcggtcaacgaggagctggccgagatcgacgggcagatcggcgatatcctccgcgtattgcaaaatgggttccagaagctggagaagatcaaggatgccaaccgccgcagcaggcagcttgaagagcttactgataagatgcgagactgcaagagactcatcaaagacttcgagcgagttagcaaagctgaggctgagcatactgatccagcaacagcaaaaatgttgcatgacagaaagcagtcgatgatcaaagaattaaactcctacgttgctctaaagaaacagcaggcaagtgaaaacaagagaatcgatctttttgatgggccaagtgctgaagatggctttggtgaagaaaatgtcctgttagcatcaaatatgacaaaccagcagttaatggatcaaggcaatcaactaatggatgaaactgatcaagctattgcacgatctaagcagactgtccaagaaaccgtcaatgtgggcacagaaactgcagctgctctgaaagcacagacagaacaaatgagcagagttgttaatgagttggattccatccatttctccatcaaaaaggcatctcaattggtgaaagaaatcggtcgacaggttgcaactgatcgatgcatcatggccatgctttttctcattgttgctggagtcatagctataataattgttaaggaaccttatttcaaaatagaagagaagaagaaaaagg

SEQ ID NO: 12810 - DNA, 186 bp, Zea Mays
gggtattaccccatgacctggtgaaagggaccactgagccgtaatgcaaccattataactctgaagataatcagtcatctaacatttgattattcaactagatagatgatgcctccttatgggacaccaccaccatatgcagcaatgtatgcacaagggttcacacccatacagtccttatcctat

SEQ ID NO: 12811 - DNA, 69 bp, Zea Mays
agtcgggttgtttgggaatgcagcccaaatcgggtggtaaactccgtccaaggctaaatacaggcgaga

SEQ ID NO: 12812 - DNA, 820 bp, Zea Mays
tgatttctgatacaggaagattacttttatctatactccaccttctttcgtggctatggcactagcagctatctataaccttttcatcattaacaaatccggcggccttatatactacaaggactatggttcagcagggaggatggataccaatgacagtttaagattagcaagcctctggcattcgatgcatgctatctcgcagcaactgtcccctaccactggctgtactggcattgatctcttacaagctcataactttgatctccattgctttcaatccctcacagggacgaaatttttcgtcgtatgcgaaactggagctccaaatatggaaatgctgctgaaagcgatttacgagctgtacacagacttcgttctgaagaatccgttctatgagatggagatgccgattcggtgcgagctgtttgatcacaacctggctcaggtgatccagaaggaccgtgttgcgctcctgggtcggtgaaattggaaagcttttggtcctaaccataccatgtatcttgtactttcccccctttttctacattatgctcggacttcctgtgcaattgtctcggcagaagacagctggcgaccaacaactgtttggtcctgactattagcaccgtatttggaacagatctatggacgatccgccgtgtgttcttctcatcgtcaatttccagtttttttccccttacaagagccaaaagatgccatagcccatggatgggtcgtttgaacactagtgagcatgaggagacgcgagatcctccgacgtcaaaacaagcgacctcgccagtcgctaattgccatg

SEQ ID NO: 12813 - DNA, 867 bp, Zea Mays
cttggtatgatccccgaaagcgtataacagctgcacaagctttggagcatgaatactttcggatggacccactacctggacgaaacgcgcttttaccatcccagccaggggagaaaattgtacagtatcctattcgtccagtagatactacaacagattttgaaggaacaacaagccttcaaccaactcaaccgccatcagggaacgctcctcctggaggtcaatctgtagcaagacccatgccacgacaaatgccgcagcaacctatggttggggggattccaagagtggcaggtggagtaaccatggctgccttcaacgctgcctcacaggctggcatggctgggctaaatcctggtaacatgcctatgcagagaggcgcaggtggtcagtctcatccgcaccagttgagaaggaaggcggatcaagggatggggatgcagaaccctgggtatcctcagcagaagagacgattctgacgctatcaagatggagccatctgctgtatatcaggtgtttgaaacacgttgcctgtgtaagctgctgtagttttgttatcagcatccgaatgccaatgctggcacctgtaaaacacattaatcagtcgagagtccagataccagttgtccttatgggttatgatctaagctgctcgaatttggctgatttggtttgcaacagaaaggtcttgcttttgctcatggcccagtggaattatccacatgcgtaggaaatttagcatctatttggcttgagaaaagattttcattaaattctagtggcagtaaatatttttatggccacaaactacacagaattgagcagttgagcttgtgttgattttgatttttgatagggacatgcaaa

SEQ ID NO: 12814 - DNA, 1798 bp, Zea Mays
tcgtgaatcagcatctgaactacctgtaccacctgtgcaactgtgcttacacaggcaattcttactgaaggatgcaaggccgtggcagccggtgtcaacgttatggacttgcggaatggtataaacaaggcaataaatgctatcactgctcacctcaaaagtaaagcgtggaagattaattctccagaagaaattaaccaggtagcaaccatttctgcaaacggtgaaaaggaaattggagatctaatatcaaaagccatggaaaaagttggaaaggatggagtcattactattgttgatggcaaaacattggacaatgagcttgaagcagtacagggaatgaagctgtccagaggatacatatctccttactttgtgactgatcaaaagactcagaaatgtgagatggagaaccctcttattcttatccatgacaagaaaatctcaaacatggattctctccttccagcattagaaatttctatcaagaatcgcaagcctcttctcattgttgctgaggatgttgaaggagatgctctgtcaatgcttgtactgaacaagcatcgtgctggactcaaggtatgtgctgtcaaagctcctggatttggtgaaaatagaaggcacaatctagatgacatggctgtgatgactggaggagaggttattagcgaggaacgcggtcttgatcttggcaaagttcaattacaaatgcttggcactgctaaaaaggtaactgtatcccttgatgatactatcatcctagatggtggaggtgacaaacagcagatagatgagaggtgccaacagcttagagaatcaattgacacaagcactgctgtattcgacaaagaaaaggcccaagagcgtttatctaagttatctggaggtgttgctgtactcaagattggtggagctagtgaagctgaagttggtgagaaaaaagatagggtgacagatgctctaaatgctgcaagggctgctgtggaggagggcattgtgccaggtggtggagttgcccttctttatgccaccaaggagcttgacaagattagcacagcaaacgaggacgaaaagattggagttcaaattatcaagaattctttgaaggctcccttgatgaccatagctgcaaatgctggcattgatggagctatagtcatagggaagctgattgaacaagaggacctcagtttgggctatgatgcagcaaaaggggagtacgtagacatgatcaaggccggcatcatcgatcccgtgaaggtgatccgcaccgcacttcaagacgctgcaagtgtttccctgctgatggcaaccacggaggccgctgtctccgagctcccggcaaccaagtccagaatagccagccgtatgccgcagatgagcgggatggacttctgaggaaattcaggcgccgtgtatgatgctgatctgtgacctgtaaggctaggaattgggaggttggggacgaactttgtttccctagcggatagtcggatacgtctacggagttcattcgaaacgaggtgcagaactgtcaccgagttgcagtttttgatgcagtgcggcgttcgatggtggggtaataaagctggactgatagcgccttccattttgaatgctctgtctgaggcatcgtttggtgccgtcgaagcagctgaattccctttgtacgagcgcagctgagtttctttctgtcaccgtctcgagttcaaccttcacacgacacgagctacatttttacccgtctggtttttccgtagctgagcacagagcaacagcacatgtcagcaaatttgac

SEQ ID NO: 12815 - DNA, 1912 bp, Zea Mays
ggccattggtgctacctgtttcgatctggaagcgtgcgagatgcggcagaggatggagggggcaggcaaggatggcaacccgttgaggaattatcggattggcaagactctcggaattggctcattcgggaaggtgaaaattgcggagcatatcagcactggacacaaggtggcaatcaagattctcaaccgccgtaaaatcagaggcatggagatggaagagaaagttaaaagagagattaagatattgaggttatttatgcatccacatattatccgcctctatgaggttatagacacaccggctgatatttatgttgttatggagtatgttaagtgtggggaattatttgattacattgttgagaaaggtaggctgcaggaggaagaggctcgccgtttcttccaacagattatatccggtgttgaatattgccatagaaacatggtggtgcatcgtgatctaaagccagaaaacctcctattggattcaaaatgcaatgttaagattgcagattttggcttaagtaatgttatgcgggatggtcattttctgaagacaagttgtggtagcccaaattatgctgctcctgaggtgatatctggtaaactatatgctggacctgaagttgatgtgtggagctgtggggttattctttatgctcttttatgtggtactctgccatttgatgacgagaacataccaaacctttttaagaaaataaagggtggaatatatacccttcccagccatttgtctggtgcagcaagggatttgattccaagaatgctagttgtcgatcctatgaagcggatcaccattcgtgaaattcgcgaacatgattggttcaaaattcttctcccgcgctatttgactgtgcctcctccagatagtgcgcaacaagtcaaaaaggttgatgaggaaactctccgtgaggttttaggtatgggatatgacaagaacctgttggtggaatcaatccaaaaaaggctgcaaaatgaggcaactgttgcatattacttactcttggacaataggctccgtacaaccagtggctatcttggagctgaatgtcaagaagctatggactcctcattctcaaacatcgcatcatatgaaacaccaagttcagcacgtgggaatagacagcaaatatttatggagtctccagttggcttgagaccacatcttccagctgagaggaaatgggctcttggtcttcagtctcgagcacatccaaaagaaataatgtctgaagtgctgaaagctctgcaagaattaaatgtttactggaaaaagataggtcactataacatgaagtgcagatggagtcctggctttcctgctcaaattcataacaatcataacttcagtgcagggtccattgaaactgatagcctgagtgagaggttaagtttaattaagtttgaaattcagctgtacaaaacaagagacgagaaatacctcctcgatttgcaaagagtcagtgggccacagctcctctttctggacttgtgcgcggcctttctaactcaactgagagttctttgatttctggtgtcagctttccatcagttgcattccttgcgtttcactagaggaatgtctaaatcgctcacaaagctgtaaatagtaatctccagtagattggattttctggagtatgtagatggtaggcatgagaagatgttatgcctggcggcgatcttctgaaccagactgtgtggagtaacttatctcctaattctttacggctggccagctgccggtgaattagatcagtgcttttgctggcataatgtctatctacattaataatttcagctattacaacggttaattaaatgctgtgctgcttacaggccaaatgagattatgttttgaaggcaactctttttttttgcattaatt

SEQ ID NO: 12816 - DNA, 2319 bp, Zea Mays
aggagagcaataagcaagcaccacatcgccaccaccttgaattaccgcacacggctccgctgcttcgcgactcctctccgactctccgcacaggactccaaccgcctcgccgttgcatcgccgcgggcgtcaacctaggctgctgccggtaccggtgcgtccccagccatggctcggccgccgcaggaggcgatcgacaccttcgtcagcatcaccggcgccgacgaggtcaccgcagtccgcgtgctcgaggaacatggtcatgatctaaatgaagctgtgaatgcttattttaatgaaggagataggaccaccaccagaatcaatcagaatcctgtgcctgccactgccagttatgatgacatgatggagctggatgaaccacttgatcccatgttcaacagacctttgttccctagaactttgggcaacccttttgcccttttggatccaggttttgctgacataactgctggtgatatatttggacgtggaccccgagttacacaacctagggacgtgaggcagatacctattgaagttaaggacagcaatactcaaacaggcagttctggtcagggtcccattattgaggatgttactggacgtgaatctttctatggtccagaggtccatgggaccgttatagttgacgaagatgatgaagacttgccattaacactatctgctcaggatcctaagatcccaagcagtgctttgcacccaaaccatttcatgcctagtgcgcctccagtggttgatgttagtgaccataacaatgatatagaagaggagatgattaaggcagcaattgaagcttcaaaaagggaagctgacgggatgaaaaatgttctaagtagtggtcaatctgaaaacatgtcacgtggcagaggtgatcatgagcttgctcgggcggtttctttgtccttggagacagcagagcgagagagagctctgcgccaagagggaatgtatgtagcagatcactctcctgacttatctgataaagaaggcggtcaaggaggaagtgggataagcgaaaggcgaggactaactacaggagaagtgggaacttctgagcaaacagtagatgaagagaacttccaagaggacaatgaagatggtgaagaacaacctttagttaggactcgttctaggcgacttcgaggcagaactattgagccagcagaaactgttcaaagggctgacagcccgccctcaagtccccaacctcatgttcaaattggtcatcagcgtaatgtggggtttccttcagtagagtggggtggtatttcttctgaagagcgtgatgaagctcttatgcttgaggctgcaatgtttggtgggattcctgaaggagcaccatatccattttccttcccagcccatggcaggtcgactcactatcccctagtagcacgtcctccatcaccatcattaacggcacagcggttgttaagggagcagcaggatgatgagtatcttgctgctctccaagctgatcgagaaaaagagttgaaggctgtgcaggaggctgaacttcgcagggtagaggaagctgcagcaagagaggctgctcttgaacgtcaaaagaaagaagaggaggagaagctaaagaaacaacgtgaggaagaggagttggaatccaagcttgcagccaaacaagcatcactacctaaggagccactacaaaatgacgagggggctgtcacagtggtagtccgcatgcctgatggtagtcgtcgaggacggcgctttctcaaatctgacaggcttcagtatctttttgatttcatagacatcagccggactttcaaaccaggaacttatagactggcgaggtcttatcccaggcgtgccttcactgaattggagagccagatgtcactgagcgatctcggtctcactagcaagcaggaagctctgttcctagaaaaactgtctgcgtagagtacaaggttctggagttatggtcgagtagtatatgcacttataaaatcggtcatttagatcgtgcctggcgtgtgttcatgaaaatactgcagcggttgaatgattactgatctctagagatcccgtcgccatcttctgtgctctgaaacggaggtgtttcgatctgactgtgcagatgggcagttctacattcagatttcagaacaactgtagctcttgcggttttaagacttgagtatggtttactttggagatagtggtttagaccatccgtgttggtctcctgagcggtattcttacgtgatcacgtgtcaaaacgaacagaatcctttgttgcagtcattatagttaaccgtctcgctggaa

SEQ ID NO: 12817 - DNA, 1535 bp, Zea Mays
ttttttgcgactgtgccgtggcaccaccatccatgccgaggcgaggggttgttggtggcattgattatggattcaccggtgaagttaaaaaaatagatgtttcacggataagagaaaggcttgatagagacagcatagttgttgtgagcaacatggggtactccagcgcaggagaggtcttgaattgcaatacctatgaagttgctacagcatgtgctttatccatagaggcggacaagcttatttgcattgttgatggccaaatatttgatgagcatggtagagtcaatcgttttatgtctattgaagaagcagatatgttgatcagaacacgtgctaagcagagtgaaattgctgcaaattatgtgaaggttgttgatgaggaggacatcaatcatgtccgctgcctcccaatgaaacatggtacagaacatggtatgaatggaagggaccatattaatgggtatactgcatcttttcggaatggtgtgggtttcaatgatggaaatggtctgtctggtgagcaagggtttgctattggcggggaggagcgcttgagcaggtcaaatggttacctatcagagttagcagcggcagcatacgtatgccatggtggtgtccaaagagtgcatatcatagatggtactgttggtggagcattgttgctagaactattcactagagatggtgttggaacgatgatagctagggatatgtatgaaggaacaagaatggccagagaggaagatctttctggtattagaaagatcattcgtcctctagaagaatctggtgtcctggtgcgccgaacagatcaagagcttcttgaagcattgacatcatttattgtcgtggaaagagatggctcaatcatagcgtgtgctgccctcttcccttttcttgaggataaatctggggaagttgctgctattgctgtatctgaagaatgtcgaggccaaggtcaaggagacaaattacttgattacgttgagaagaaggctttgtcccttggacttgagaaactattcttgcttaccacaaggacagcggattggtttgttcgtcgcggctttaaggagtgctcgttcgattccctgcctttggtgaggagaaaacgtatcgacctctcgcgcgggtcaaaatattacatgaagtggctccaggcagcagaggttgggcatatggctgccgacggttttgccatgagatgatgagtgctgcaaacaagcatctctacgaatctagtcgatggacgtgaggtttctttatgagctgtgcagtcgcttatacatcgtagaaatgtatatttattgtgcaagaaaataatcagtcaataatcgaagatgtggttgtgtttcttgagttgatttcttcttgagcatagcaatgctcaaaagagttgttgatctgcacactgctgacaaagcctgcacgactgcgctttttaaactgataaatacttagctgcaaattcagcaatgttcttgttgagctccctccatcgcctcctctagaaaaaatgcgtatgttacgca

SEQ ID NO: 12818 - DNA, 1082 bp, Zea Mays
cttgtgtgcaatatggcaatcaatttctggtgacattgagagtgatgatggggaccttgatgatgaggttgatgatggacctgaggatgaacctgaacatgatgcggaagatgccccagccgaacctgctatcaggacagctgcggccccggctgcgccacccaaggacacagaaaggcagctgtctaaaaaggagttgaaaaagaaggaactagcagaacttgatgcagtattggctgagctgggactctctgcaaattctagcagcactgcacaggatgctgagaagaaaggtaccaaccaaattggtgatgcagagaagaaggaagatgctcctgctcctcccgagagcaaggcctccaagaagaagaaaaagaaggacaagagttcaaaggagggaaaagaaacacaagaagcacttgatgggtcagaggagactgccagtgcaggacctgatgaagatacttctgctgtggatgtgaaggagcgcttgaagaagatggcatcaatgaagaagaagaaatcgagcagagagacggacacagctgccaaaattgccgctgccgaggctgcagcaaggagtgcaaggcttgcggcggccaagaagaaagaaaagagtcattacaaccagcagcccgtgcggtaaatgggcataaagttttgagtttgggtgctgtgagtttgatatccccttgttcgttttggactcgcaataaaacttttttgagttatcgtatttatgactgggaagtgcctttctgagtttcattttcagaatttaatgaaaggcctttgtggttgcaaaacggtggtgtaattgtgctttaaattgttcatccaatgataaacttcgtgaacaactccagcaccgcctgtagtccgatttttaaatccttgcattgatgaggagggcgggggtacacttgccgaaattatccccagcctgatttcttttatcttatatatataaatgtgccttttatacttctatagactgcagtacctttgaggcgatccccgtggctttgttcggttactagggaataaatctcactatatatttaatctgggtctgtattgta

SEQ ID NO: 12819 - DNA, 95 bp, Zea Mays
cgtcgaacaggtaaaggtcagtgctcatcatcgcctagacaagcctgctagtcatggcaaatgttacaaattcactgaaatgcatcttgatgttg

SEQ ID NO: 12820 - DNA, 89 bp, Zea Mays
gtaacatttaatatttccacctaaaatacaagtcatttaggtagctcaaagggagtattcctgggagtcagagagataaccaatccgat

SEQ ID NO: 12821 - DNA, 198 bp, Zea Mays
acagcctgtccacccgattttccgctattgtgtgacattgttctgtcaggacaggggtaacactagaagctccaagttcttggatatctcttcaactcacactggatgaggtcataggggaatgggcagagctgctcaactctacatatagcaacatcagtgcgctccgtcttccttctttcttcatccagttcgtag

SEQ ID NO: 12822 - DNA, 3316 bp, Zea Mays
cagaattttaatccaagcgagaaggtgtccagccgaggaggacgtagagctgggcatataacgagctagatttcaaaaaaaaaaaagggaaccatgaagaaagtgttcgatcagacggtccgggacctaaaaagagaggtgaacaagaaggtcctcaaggtgcctggaatagaacaaaagatccttgatgccacaagcaacgagccgtggggtccacatggatctctactggcagacattgctcaagcgacgaataactatcatgagtaccagatgatcatgcacattgtgtggaagagggtcagtgacactggtaaaaattggcgtcatgtttacaagggattgattgttttggattacctggtggcgcatggcactgaacgagttattgatgacatcagagaacatgcttatcagatatcagcactagctgatttccagtacattgattcttctgggagagatcaaggtagcaatgtacgaaggaaatctcagagccttgtcagtttagttaatgataaagaaaggatacaggaagttagagagaaagcactctctaccaaggacaagtacaggagtgcgtttgcccccagtggcaggagcccaggtggatatggtggtggttatgataatgaccgctatgaaggcagctatggcagtagatatgacaacagaaatggaaatgggaggggagactatggatacagggacgatgacagatatggtggacctggaggtacacccaatcgggaaggagatcgttattccagagattctaatgaacgctatggcagagattatagagaagatgaatacaaaggaagtcatagcaaccatgaatatgctgaaggagcaggtcgcaggagctatggtcaggaaagagattcatatggggatggtgaagcttattcatcccgtggtcgtggcagcaatgctgatgatcctactcaggatgataggcctatagagcgaaagctttctaaccagcaaatttcttcaccaccaccgaactacgaagatgtcacaagagatggccaggacaatcttcacgatgacagaaatggaggaagtgttcctgctgctgtatcaagggtgccctctccttcagttcctgcaacaactgttcctgcagtacaggtgaatggggttcatgacagcactgttgaagatgtacctgcaccaccaactgctcatgccgagcctaatggatttgatgagtttgatccacgtggatctgtaccagattcttcccctcctgtaaaccctgcatcagtagcgaatagcttggagatggatttgtttggatcagatcctattagttcgttggctttggtgtctgtgcctcaaccaacgactacatcaaatgttgaagcaccggcaaattcaggttttgaaacaaatagttttgtgggcatgcctcctgcttcaactggatttggcgagattgatgcttcaaatccttttggggatcctacacctttcaaggcagttcttgatgaaagtccagcactacctcagacacatgctgcaccagctggttctttccaacccactggacctggtacggatgtgaaccctttccagcctgcttcagccgcaagctttggttttggagacactcttggtgatctcacttttgcaccaaatgctgcacctgagctgcaagatatgtttgcaaacacagcctccttgccttcagaggtagcaccagcaaacccatctgtggttctccaacagccagttcctactaatttctcctctcaggtatctcagccagttgctggcacattgcatgctgctcctacagcatttgctccttctcaggctcctcccacatcatttgctcattctcaggcacctcaggctgcccctgcattttcttattcacaagggcctcatcctggtgctgccatccagtctcaatttccccagactgtcgccccatcatttcctccttcgcaggtgcctcaatctgtaacacccaatctgccaccaggccaatcgaacttttttttgcaatcagcatcagggtctggtattgacagcctgtctggggttcctacccagaatggagcaccatcctacattcccccacagaattctcagttcactgctccggcaaatcaacaaccattgcagccaagcttcatcccacaaactagcacaccagcactccagccggccttgatctctaggggggcatcccagccccttggtgtgccaaattcagtgcctactagtggcagcttcccgttgcagtcaagttcatcagctcccccagaaacaatcgtttctgctttgcaagtcaatcaaactgagccagtgaagaagtttgagcccagatctaaactgtggtctgatactttgagccgaggtctagtcaatctggacatttctggaccaaaagcgaatcctcatgctgatattggagttgactttgattcaatcaatcgcaaggagaaaaggcaggaaaagaaaatcaaccaagcacctgtggtgtctacagtcaccatgggcaaggccatgggagctggttccggcattggtcgggctggtgtaggtgcaatggcacctcctcctaaccaaatgggtgccgggaggggtatgggtcctggtgccggtgccggttatggtggtggaatgggaatgaaccggccaatgggcatggggatgggaatgaatcaacaacagatgaggatggggatgaaccaacaaccgatgggaatggggatggggatgaaccaacaaccgatgggaggaatgaacatggggatggggatgaaccaggggatgccgatgcgtcctccaatggggatgggtcctggtggaatgcccggtgctggctacaatcagatgggcgcggcgtacggtggccagcagccatacggtggatacaggtgaggaggggctatgcagtcccccacaccacagatttatgggggcgaggtgttgaagaaacggttttggaggcatctgtattttgctcacctggttttgctttgggtatgatttcttgtttcttttgggggtggaggtgagaagggtataattttcgtcactattcttttacagtctatgttggatactgtacctactttactaaatagcaaaaagcaaacatatgaacaagggcggtgctacaactactgcgttgtgttggatgtaaagccttgatatattatctctttcccatgtagttgtggctataggcggcttcttttcagtgaacatattgtctgttccagcgttcttgctggatggatagtaaatggctgtaccatttggttgaattatcatggtttttgctttgatgtta

SEQ ID NO: 12823 - DNA, 128 bp, Zea Mays
cttgccttcaccaaacaaatgctcagggtcttcatcctcgtagaactcgaagagttcgatcacttggtcaccaacgcttgatcttcgattcctcgaagctcaggaatagatcgcaatctatctgcgac

SEQ ID NO: 12824 - DNA, 1119 bp, Zea Mays
aaagcgagagagctaagctaagccgagctaagaagcacagcaagtctcaccagactagcggctagcgcgagaatggccaaggacatcgaggccgcggcggcgcacgagggcaaggactactcggacccgcccccggcgccgctggtggacgcggaggagctgaccaagtggtcgctgtaccgcgcggtgatcgccgagttcgtggccacgctgctcttcctctacatcgtggcgcagtgcctcggcgccatctgcggcgtcgggctcgtcaagggcttccagagcgccttctacgtgcgctacggcggcggcgccaacgagctcagcgccggctactccaagggcaccggcctcgccgcggagatcatcggcaccttcgtgctcgtctacaccgtcttctccgccaccgaccccaagcgcaacgcccgtgactctcatgtccccgtgcttgcccctctccccatcgggtttgcggtgttcatggtccatctggccacgatccccatcaccggcaccggcatcaacccggccaggagcttgggcgctgctgtcatctacaacaacgacaaggcctgggatgaccactggatcttctgggtgggtccattcatcggcgccgccatcgccgcggcgtaccaccagtacgtgctgagggccagcgccgccaagctgggatcgtctgcctccttcagccgctagatcgatggcctcccgccggacaaggacagccggaggcgtgaactgtagatataccagaggctggacaaggacagcgtgtcgtcgttggttgcctctagccatgcgtcgttatatatgcatgccttatgatcagtttgtatttccactgcattttgcttgctttaattttccttccaagctagtgtgattgttgtgctgtacttatccgtgtacgacgagtcgacgactgggtaaaatgaaaaagaaaagaaaaaaatgcatatatttaagtttttaaagggtttgtacgtttgtttggatttctcctctgaactttggagctctaaactttagagttaaagctctaaacaactgctctgaagtccaccttatattagagctttagagttaaaaaataaactgaggtgctctaaaactttt

SEQ ID NO: 12825 - DNA, 636 bp, Zea Mays
cttaattatagtaaaaacttgtcgcaaatggaactccatggtgactatatttggcgtacataatggagctggaagctgaggtggcaaaactcaaggaccagaatgaggagttgcagaaaaagcaggttgaaatgctaaagaagcaaaaggatgaggtcctggagcgtatcaacagccaacatggaccaaaggcaaagaagctttgcctgcgccgcaccctgactggcccatggtagcctgctgaagcttgcacaaaattgaccgaagtcaagatcgtcgggctagatgtgcccgtgtgtatatatcagatgaagtcaagagtactgagtaccccgttacccctgtagaccgccgctacttcagagctgccgttcttgttctgtgacgtgggtagtctgcgcctgacagttcgctgtttaggttcggttgcgcgatcctcacatgaacaatgaggcgtgccatctaatttgtttattaactcactcctatctatggtgagataatgcaagtaacctggagtatgtttggttgatttgccgttttgaaaaatatgctgtgagctgtgtggaaaaacagcggtggcccgtgtggaaaatagaagccgtttgattttacagctatgtcttttgaaaaaaa

SEQ ID NO: 12826 - DNA, 1584 bp, Zea Mays
ggcattttgatctgattgttcgatgcataggacctgcagtggcgagctggggggcctacttgctgtcacgcgacattcttgccatgtccttcgccccgcgagactcccacgaggcgcaggttcagtttgcactagagcgtggtgtgccggcgatgattggtgtcctcgcctccaatcggctcacctatccggcacgttcctttgacatggcgcactgctctcgttgcctcatcccgtggcaactttacgatggcctgtacttgatagaggttgatcgtatcctgcggcctggaggctattggattttgtctgggccaccaatcaactggaagaaacactggaaggggtgggacaggactaaagaagacctggatgcagagcagaaagccattgaggcagttgccaggagcctctgctggaagaagatcaaggaggcgggcgacattgctatctggcagaagcctactaaccacattcattgcaaggccatccacaaagttagcaagtccatacccttctgctctaaccaaaacccagatgctgcctggtatgacaagatggaggcttgtataactcgactcccagaggtcagtgacttaaaggaggttgccggcggtgcgttgaagaaatggcccgagaggctcactgcagtgccacccagaattgccagtggcagcatcgagggggtcacggaagagatgtttgtggaagatactgagttatggaagaagagagttgggcactacaagtccgtgattgcgcaacttggtcagaaaggccggtaccgcaacctactcgatatgaatgcaaagtttggcggcttcgctgcggcattggtgaatgatcccttgtgggtcatgaacatggtccctactgtggggaactcaacaacccttggggcaatatacgagcggggcctcattggaagctaccaggactggtgtgagggcatgtccacttatccccggacctacgacctcattcatgcggattcactgtttacactgtacaatggcagatgtgaggcggacaacattctgctcgaaatggacagaattctgaggccagagggcacggtcatcatcagagatgacgtggacatgttagtgaagataaagagcatcacggacgggatgagatggaatagccagatcgtggatcacgaagatggtccgctcgtccgggagaagctcctccttgctgtgaagacatactggactctggacgacagcaaacaatagcaataacgtggaatagagagttagaatgattattgacgtgatcggcaaatcttgcgactgccttaccgtttgccctgtgaatctggtggactttgggttccattttctttttgggtattcattggggggagatagttcacataatggagatataatctccttgttaagatataagactgaacccagcacagattttgacataaaaaacatacattgtgcaaagtgggtaaatagaaagtacaatattgggactacctttttctccggatgcacattgtctggttatggctatgatgtcatatgatccctttcacacaaatctaaactaggactaatcgtcatc

SEQ ID NO: 12827 - DNA, 1899 bp, Zea Mays
gcggccgaggccgagggcgcgggcggggtgtcaaggaaattcaatcatctcttcaatccttggagcttaaaacaaatgatgctcatgtggttgaagacgatgtagaggaaacaaaacgacatttgaatgtggttttcattggccatgttgatgctggaaaatcaactaccggaggacaaatattgtttttgagtggtcaagttgatgataggaccatccagaaatatgagaaggaagcaaaggataaaagtcgggaaagttggtatatggcttacatcatggacacaaatgaggaagaaagggttaagggaaagactgttgaagttggtagggcccactttgagacagaacacacaagattcactatcttggatgcaccgggtcacaaaagttatgttccaaatatgataagtggtgcatctcaagctgacattggtgttctggtcatatctgctcgaaaaggtgaattcgaaacaggttatgaaagaggaggacagacccgtgaacatgtactacttgcaaaaactttgggtgttgctaagctggtagttgtaataaataagatggacgaacctactgttaaatggtctaaggaaaggtatgatgagattgaagcaaaaatggttccattcctcaaatcttcagggtacaatgttaagaaagatgtgcaattcttgccaatatctggtcttgtgggaaccaatatgaaaaccaggatggataaaagcatttgtagttggtgggatggcccatgtctttttgaagttctggaccgtattgtagttcctttacgtgaccccaaaggttcagtaaggatgccgattattgataaatataaggatatgggcactgttgcaatgggcaaaatagagtctggcactatcagagagggtgacagtttgttggttatgccaaacaagtcccatgtgaaagtcattggtttgaacttggatgagagcaaagtacgtcgtgctggacctgctgagaatgtccgtgttaaattgtctggagttgaagaggaggatgtaatggctggttttgtactttcaagtgttgctaatcctgttggtgccgttagtgaattcattgctcagttgcagattttagagttgcttgacaatgctattttcactgccggctacaaagctgtgttgcatattcactctgttgtcgaagagtgtgagattgttgagctcatagaggaaattggcatgaagaaaaagaaagaagaagatccaaagaagaaaaagccaaagaggaagcctctttttgtgaagaacggtgcaattgttgtttgccgcattcaggtgaataacttgatatgcatagagaagttctctgatttccctcagcttggaaggtttacacttagaactgaaggaaagacggtagctgtaggcaaagttgttgatattccgcctgctggtagcccaacattctgagcttaagtcaattttgaacaggatggataatcatgaagcagtgcgttcgcttaagatacttttttttgggaagtgagattagttgttgaggttagattttttttcagtccatcttgagaatggtctatgcctttatggtttaggctagcaagtcttagattggttgcataaaattacatctctggttacatgtgaggttgtaaaatcagtatggaattatggatgagtgtaccaaccttaatgtacccgttcaagattatggtggtatctttgcgtacaatgctgtaactatccatttttttttgtgtgtgtgtgaagttaaatataagatgaccacacgtggacaggccgcattaggcctcattcgtttatgtgggattgtaccggaatcattccactccacattattcctcatttcagttgttcaaagtttatataagggtgcgtttggttgagg

SEQ ID NO: 12828 - DNA, 1341 bp, Zea Mays
gctctccatttttaggcacgggagatcggttcctgcgtgcagaggcggcaacaagcgctgcagagggaggagggatttgggatggctggtgacgaccatgtggtggttgacgtgaacggcttagcaaaatccaaggatgacgggggttccaagaagctgtctgaggatgcaaatggttcggctccggctgctgcatctttgtcagcagctgttgacttggtccaggaggaggaggaggaggagggtgatggggaggaggagccgctaatccaggccgcggagtgccgcatatgccaggaggaagatagcgtgaagaacctcgagaaaccgtgtgcttgcagcggcagtctcaagtatgctcacagagcttgcgtgcaacgctggtgcaacgagaaaggagacactacttgtgaaatttgtcatgaggaatacaagccaggttacactgcgccacctcgtgttcagccagatgagacaaccatagacattgatggtgatttggttatggatttgcgagacccaaggattcttgctgtagcagctgcccaacatcgtcttcttgaggcagagtatgatggttacgctagtacagatgctagtggtgctgcattctgccgttcagctgcgcttattttaatggcactgttgcttctaaggcatgcattgtctatgtcagacaacgaaggaaacgatgatgacgcttctaccatattctcgctttttctgcttcgagctgctgggtttctgctgccgtgctacatcatggcatggatattcagtattttgcatcgccgtcgacaaagacaggaagaggctgcactggcggctgcagaggtggccttcatcctacagtcggccaggggccgcgccctccagtttgccatcgctccagactcccccgccaccccgcagcatgagccagtgtcgcagcaacagcaatagtggctgacaaccacatccccagtagttgctcacgactactgaccatacgtatctgtttcgttttcttgggcatcatactgagtcacaaaggttaagcctgggcttctgcctcccgtggccagtttgggtgtcagtgtcacccaaagttcgttacacccgaaaccttgtgctttgtattaaaccgagtgtgatccgagaatataccaatttaatgtaaattcattcttgttcttactgcggcatcattattaaccgttgtatgcactgtaatgtacagtctttcataatactatttatttttctatatggcatatttgatagatgtgaacgatgtggtgtatggaaattgaaacctctattgtttattgtgggaactaatagtgtgtttggattgagaac

SEQ ID NO: 12829 - DNA, 1032 bp, Zea Mays
gaaatttggtccgattgcttcgtctagctgcgtagtttgttttgtctatgatggatgatgatgagagctgttaagagaaaacaagagaatgctggatcgatccatcagggaaattgagcgagagaggcaaggattgcaggcccaggagaaaaagctcatcactgagatcaagaaaacagctaaagaaggccagatgggagctgtcaaagtaatggccaaagaccttattcgtacccggcatcagataacaaagttctaccaactcaaatctcagctccaaggagtttctctaagagttcagacactaaaatcaactcaagctatgggtgatgccatgaagggcgttacaaaggcaatggctcaaatgaacaggcagctaaatctgccagggttgcagaggataatgcaagagtttgagcggcagaacgagaggatggagatggtgagcgaagtgatgggagatgccatagatgatgctttggaaggagatgaggaggaagaagaaactgaggagcttgtgaatcaagtacttgatgaaattggcattgatatcaaccaagagcttgttggagccccgtcggccgctgttgctcaacctgcttcagcgggaagggttgcccaggctgaaagtgctgggaatgctgacactggaatcgacgccgatttgcaggcaaggctggacaatctgaggagaatgtaggtgctacaccagcaaaagagtagtgccttctagctctgttgcctgcgaatgtgaatacctagtcaatcaaagcaaaacgtttacaagccagtgtgtatgttgaaatgaatgaagcgttcgatatgccggtagtaatgacaaatgttaaatatacatatttacaatttcttcccctctgagttcatgatggattgatgcctgcagatgcggcatgtcagctgcgtgctaactgtgatttgcaagctgttgcttaaatacacagcagatatctaagctttaaattgccatgcttcctttccggcgattcaacgtcgtcgaagctccgaatcgtt

SEQ ID NO: 12830 - DNA, 537 bp, Zea Mays
aaacaacgtccgcgccgcccgccgcttctcccctcccctccccgcgtccgccgattgtttgtgtggttggggtcccccgcccgatgcttggcggcgcaacggcgcctataaatccttggcctctcctctttctggcaacacaaaacacatccatcctccttgcaactccagtgctgctcactgccactgccagcagatcgagctgctccgtctcacaaaccctctagcttgctttgctgctccacctgcaagtctgcaaccgcgtacagagatgtcgacggtgagccgtgcgtccctcgaccagaagctcgccctcgccaagcgctgctcccgagaggcgaccctcgccggagccaaggcggcagccgtggcgactatcgcctccgcgatccccaccccgtacgtacgtacgtacgcgtcgatcggtcgcgaaacagcccgtcgtcggccagtctctaataactgatcgtcgcttcttcagctggccagcgtgcggatgctgccatgggccaaggccaacatcaaccccaccggcca

SEQ ID NO: 12831 - DNA, 1206 bp, Zea Mays
gcccagccagccaacccaaggaaacctgcccgttgctttgctccccccttcggcatctctacctgcgtgcgtcaccggcatttaatcccgcgttccattccgaacagcgagcacaaccaccgctgctgcgatctcgccgtctccctcctccacgccgtctcggtctccctcccatggaaggcaagacctcgacctcctccgcgcccccctactacggcgcgcctcccccatcctacggcgcgccgcccccctcccagccctacggcggcgggggcgggggcgggggcgggtacgggtacggcgcctcgcagccgccgccctacggcggcgccccgcagcagcagcccccgtacgggggcggggccccggcagggttcggcagcccgttcgcgtcgctggtgccctccgcgttcccgcccggcaccgaccccaacgtcgtggcctgcttccaggcggccgaccgcgacggcagcggcatgatcgacgacaaggagctgcagtccgcgctgtccgggtacaaccagagcttcagcctccgcaccgtccacctcctcatgtacctcttcaccaacaccaacgtccgcaagatcggacccaaggaatttacttctgtgttttacagtcttcagaactggagagcaatatttgagaggtttgatcgtgatcgaagtggcaggatcgacatgtcagaactgcgcgatgctcttctcagtctcggatattctgtgtctccaactgtccttgatctgcttgtgtctaaatttgacaagactgggggcaagagcaaagcaatcgaatatgacaacttcattgaatgctgcctcactgttaaggggctgacagagaagttcaaggagaaggacaccgcctactctgggtcggcgactttcacctacgaggccttcatgctgaccgtgctgcctttcctcattgcgtagtggcagtccactccgccgctcaaaacaagctttataagcttttccaatagtactgtaatattatgcctgctgtaaagagatttatgttcgcagagttgtttttagacgagttgttttgattctggatttaacttgtgttgtgaatcataaagttgctctgaaatggagaatgtacctgttggttgaacagatgctttgtggttgtggtatgtggttggtattggtggctctagggatggcaatgggtaagctatctactggacacaca

SEQ ID NO: 12832 - DNA, 76 bp, Zea Mays
acgtatcgaaccatctagtagctggttccctccgaagtttccctcaggatagctggagcccacacgagttctatcg

SEQ ID NO: 12833 - DNA, 76 bp, Zea Mays
atttacttatgaccaaaggggaagcaattacttcgaaaggctctaatgattccgtttttggcgattcatgccaaaa

SEQ ID NO: 12834 - DNA, 1006 bp, Zea Mays
cttgcagccattgttcccatatccatgtctgaaatccatgtttggcgattaacgacagggcgcagggagctggttgttttgtcgggagcgcacacgattggagggaaaagggtttcgggagtcccagttgttttcgacaacacctatttcaaggtgctgctcgataataggccgccgcagacatcttcgaaagctggcaatggcatggcggcgatggttgggctgcgcacggactgggcgctcactgaagacgacgagtgcttgagatggatcaggatctacgcagaggaccaagctaggttcttcgacgacttcagggacacgtacatcaagctcgtagacagcggagcctcgtggagaacagcttgactagaactgcctgtttctctacagtgttaggccttgttcggttataagggaataaatcccaccatggatttaatccggatctggattgggtgaatccatatgtcacacccaatcctatggtgggattaaatacaccatttaatccatgtatctcttaaaactagttattcttttgattcatggattctaatataaacttgtgcaacatcttcatggatttgctccatacataatgagctatggatagaatccatgcctttcatagtttaaaaaattcctaaactcttgggttataatccatgatgggtttaaccgaatacaaaaatttgagtaggcttggattgttttgggatatggattgtgccatgaatttaattccaatccatgctaatccagagctggattggtgtaaacgaacaaggccttaacggatccgcccctgtagaacataggggttgcgctgaaattttacgaaaaacaaaggatttttattatttgggggaaggttgggtgggaaaaggttgctgtcagtttagattcattggatctgtattctatttctccctagcaatgaacccacaagtttcttgcatgcacaaaacttgtggaacaggagtttacaacacaactcgaaacc

SEQ ID NO: 12835 - DNA, 1037 bp, Zea Mays
cagcccagcacacagcccataacgatggcccccggcctattcgggctcgcctaccatctctcctccggtccttcctatcataccggcgggcggcgcggggcagctaatcggcaatccggcttcgcctcgtcgcagtccaatccgcactcaccgccgccctcccgcccctcacctgcccgcggcagtgtcggagtaaaccctaccggacctatcgtcacgcgactgcgggagttgcttgcttcttctgccgctctctcgctccgtcccttccgcccatggagacctcgctgcgcttgcgcagtggcggcggcctccgcatccacgccaaggagaagctgcccctcggccacagctcgctgctgcaggctcatgcggagctcgacctccacacaagccccgccggagttactaccccgagttatctcgctctctttgtcaggcacttctactcgcagctatcagccaatctcggagctggcgtccagttgcacaacggcgatgacctcgcctacagttttcgcgccaagaaggccgtcctgttcaaaccagataatgggttcctaggtctgaaccttaaagggcgcctacttaccgataaagagttgaagccgacgaagacaactggatccgttgaactggcatggaccatacttgacttgaaacagggccaagacgtaaggctcaaagttggttacgaattgtgtgacaaggtgccttatttccagctcagagagaacggttggacgctgaatgcttatatggatgggaaatgggatgttagatttgaaatgtgaatccacttgctcagtagtgttaccaattctacttgtctgtactgcacttggaactgttgatctggtaatatgtaaactggagagctttccatattcatctagttctgaagcgtacgttgttggctcactgcatcatcagctttggttctagtagccgctattcatccaaacgtcacaacatgtaatgtgacgtgggaattgagacttcatcatcattattatatacttagggctagtttgtca

SEQ ID NO: 12836 - DNA, 3261 bp, Zea Mays
ccagcccacgatgtaaccctagtccctagatgtttaaggagcagctgtgttgccgcattcacatacctatccctgttggtcgcccctcctggagctcgccgccgccctctcgctttattttcccgaccacaacgccaccgcccgacgcaaagttgccgctccctgagtctcgacaaccgagcaagccttctagaagttaaggaagcagcagaaccatggcatcccgtttctggggacagggggacagtgagtctgaggaggaggaggtggaagaagttgagtcagaacagggcagtgatagtgatgatgatggaggtcgaggtggtgcgggacgcggtgcccaaaaccgatacttgaagaatcaagaagatgacagcgatgagtctgatacaggtcaccgtgtgatccgctccctgagggacaagcgcaacgaggagatgagatctattgttgatcagatgcgtaatgcaatgaagatcaatgactgggtgagcttgcaggagagttttgagaagcttaacaaacatcttgagaaggttgttcgtgtcaatgaatctactgaggtaccaaaaatgtatatcaaagctcttgtgttgctggaggacttccttgctgaagcccttgcaaacaaggaggccaagaagaagatgagcagcagcaattcgaaggcattcaatgcgatgaggcaaaaactcaagaagaacaacaagcagtatgaagagcagatccagaagtgcagggagcatccagagagttttgaagatgaagctgcagatgataaagatacggatgatgacgatgttgatgaaagtgatgcagagattgaagatcctgataaaatagctatgtcagaatcagaagaggaacaagatgaagaggatgatgacaaggatggttgggaacagaaaaggagtaagaaggataagctgatggataagcagttcttgaaagatccaagtgaaatcacatgggatattgtcgataagaaactcaaagagattgtagcatctagggaaagaaagtttgatgttaaccctagtctacttgggcatatgccagtcaatgtgtggaagaagtgtgtcaataatatgcttcttgtgcttgatatactccagcagtatcctaacattgtagtagacacctcgtttgagcctgatgagaatgaaactcaaaagggtgcagactacaatggaacaatacatgttgtgggtgacctggttgcattccttgagagactggactctgaatttttgaagaccttacagtgcacagatccgtacacaaaagattatgttcagaggctcagagaggaacccctgtttctggttgtcgcacagaacgtccaagattatcttgaaagggttggaaacttcaaagctgctgccaaggttgcactgcgccgtgttgaactagtttactacaagccccaagaagtgtacgatgcaatgagaaaactcgcagagcagcctgaggactgtgtggacgatgatgatgcagaggctggtgatgaacataaagcagtagatgacaatagaggaccatcaccatttgttgtgattccagaggctgtgcacaggaagcctacttttccagaaagcggtagaactttgatggatggattgatgttcttaatctacaagtatggggatgaaaggaccaaagcccgtgcaatgctgtgtgacatatatcaccatgcgatctctgatgagttttcagtggctcgcgacttgcttttaatgagtcatttgcaagatggtattcagctcatggacatatcatcgcagattttattcaatagagtcatggcccagttagggctgtgtgctttcagggctggtttgataaatgaagcccatggttgcttgactgagctctattctactgggagggtgaaagaattgcttgcacaaggtgtgcaacaaagccgataccatgaaaaaactcccgaacaggaaagacttgagaggagaagacaaatgccttaccatatgcatataaacctggagcttttggaagccacacacttgatctgtgcgatgctgattgaagtccccaatatggctgccagcacctatgacaagcggagacctatgagcaaaacattccgaaggcttcttgaagtgagtgaaaggcagacatttgttgggccgcccgagaatgtgagggaccatgtaatggctgccacaagagccctcaacaagggtgatcaccaaaaggctttcagtgtcataaattcgttggagatttggaagcttttgaggaacagagagcatgtccttgagatgttgaagcttaagatcaaggaggaagctcttagaacctatctcttttcatactcgtcttcgtacgagtccttaagccttaaccagctcactaccatgtttgatctcagcgagcagcatgcccacagcattgttagcaagatgatgatgcatgaagagcttcatgctagctgggaccagccaacaaagtgcatcgtattccatagtgtggaccaaactaggcttcaggggctactcttccagatggcagataagctctcggtcctggtggagatcaatgagagggcatacgaggcaagaactggtggtgctctcgagggggtaccgcccaggcgcaggggcgagggtcaggataatatgggaaagtggcaggataactttgtctcgtcacaggggcggcagggtggtggcaacaggtttggatactccagcagaggtgcagtatctggtcaaagtggtggtggacaccagagggacaggggcaatcagggttaccgcgggggctatggtggcgtttcaaggtttcaggatgcaaggggtcgcaaccagtctaatccatcaggcagaggtggtgatggtggtgcacgcatggtgaacctgaacagggttggtagagtttagaagtgataattttcagctcaagtaatcctgaaattctcctaaaagccaagttctgaatcactgcattttacatagtttcctgttctgggctgagtcatctacctgtttcctacatttcgttgtagccttttaaattaaggggctaagaaattgaactaagagtttggtactgttttgtgggagtgtgacgatgtattcgctccaatatttgatatctatccgtgacacttgctataaactgtacttttctttgtgttatgtggtgttcattgggttatgaaaaagaaaaaggcatgtcgaagagagaagatcgttattctattcgcgttcggtaaggtaagattgtgtgagcctatct

SEQ ID NO: 12837 - DNA, 1275 bp, Zea Mays
cgcacccgtcactattttacgtgcccacatttccgccaccgccaccgccaccggctaccacctgccgcctgcgccctgccctccctctgtttttctagacccccggatcgctcagagattgagtcgtagtcgtacccgactagtcgccgcgtcctcctttccccgcgcagcagcagagcaccacccggtgaccgagcaatggaggcggggggcgtgggcctggcgctgcagacgcgggcggcggccttcggctccggccagcgccggggcggcctacagtcgcccatcgggaggctgagagtcgctgaaccggcgggagctgcggttgccgtgcgggttcgcgggtccaagcccgtcgtaccgctccgtgcgaagaaatcatccggaggtcatgaaaacttgcataactccgttgacgaagctctcctgttgaagagaaaatcagaagaagttctgttctacttaaacgggaggtgtatttacttagtgggaatgatgggttctggaaaaagtactgtggggaagatcatgtctgaagtcttgggttattcgttctttgatagtgacaaattagtggagcaagctgttggaatgccttcagttgctcaaatattcaaagttcacagtgaagccttctttcgggataatgagagtagcgtcttgagggatctgtcctccatgcgacgattagttgttgccaccggaggtggtgctgtcatccgaccagttaactggaaatatatgaagaagggcctatccgtttggttagatgtgcccttggatgctcttgctaggcgcattgctaaagtgggaaccgcttctcgtcctcttctggaccaaccgtccggtgatccatacacaatggccttttctaagctcagcatgcttgcagagcaaaggggtgatgcttatgcaaatgcggatgtaagggtttctctggaagagattgcatctaaacaaggtcatggcgatgtctctaagctgatgccgactgatatcgcaattgagtcacttcataagatcgagagtttcgtcatcgagcacgctgctgataatccagctagcgactcgcaagctgagtcacagatccaaaggatacagaccttgtaatatcttaatccttctgttttgtaccgaagcgtaccccctagagcatcgttggtttatttgttcgttgaagtgtcacgagggagagaaaaaaaaccctgaagtatttcttcttgtaagttgtaaaggaatggaataaaggagctaataatccgaaaaaaaaaagaa

SEQ ID NO: 12838 - DNA, 343 bp, Zea Mays
aagaatacgaggccgtcttctcctctgtcagaattcggaaacacaccaaagctagcctccgctccctccccttccagcttcgtctagacagagtccagcagacacggccaacagttaaaaccggttgctattagtacgcgcccgccaccacgctcgcacagacacacacacacacacacacacacacactcaacagcaacagctaagcctctcccacaagacagcaacatggctgaggaggaggccaagaaggtggaggtggaggtcacgctgttgttgttgttgttgacattcaagcagacattttgttttcttctggtttttaaatcataataagaaaaaa

SEQ ID NO: 12839 - DNA, 931 bp, Zea Mays
tcccgataggaatggaacccaggatttggagactccaagatgtggctgggtatggagttgccttggcagtaaaggatatctacgctgatgcctttggagaaagaaatttggactctgaccttgtggatttgatggtaaaggatggacgacaaggaaaggtgaacggcaaaggttactacatttatgagaagggtgggaagccaaagccagatcctagtgttaagcatgttatcgaggagtaccgaaagcacgcaaacacaatgcctggtggaaagcctgttactttaacggatcaagatattttggagatgattttcttcccagttgtgaatgaggcatgcagggttatggatgaaaatgttgtaattcgagcttctgatcttgatattgcttctgttcttggaatgggctttcctaaatacaggggtggtcttgtcttctgggctgacactgttggagcaccttacatacattctaagctaagcaagtgggctgaaatttatggccccttcttcaaaccatcatcatatttggaacagcgagctaagagtggtgtaccattgagcgcaccaggagcttcgcagcaaggttcggcgaggtcacgcatgtgaggtgctgtccagcattgagcagaataatgcagaatacttgcgggatgagccattgacggctgcttcgctgatcaaaacacctccgtgaacacaaacatgaggcacagaagaaatgatgaaaaataaagggattgtaacagttttggtgcctttgactgtaactggcagagtttctggggacagagtggcatggattaattgcacctgatcactctgtatgtcgctgtcatgtgtgcaatgttcaatacgtacgtaataaagaatggaaatatatgccgcaatcagtgcgtcgtcttctcgagttaatcgcttgcgccaac

SEQ ID NO: 12840 - DNA, 1047 bp, Zea Mays
caggacttccccttcgcggggctcggcgccatggtcggcgccatcggcacgctcgtcgtcgacaccgtcgccacgggctacttcacgcgcgtccacttcaaggacagcgccgccgccgccgtgggcgccgccgccgtcggcgacgaggagaagcagcagcagcaggcggcgtcggcgccgcacgtcgacgacggagcagacggcgacggccacggccacggcgggcacgtgcacatgcacacgcacgcgacgcacgggcactcgcacggcgcctcggcgctcgtggccgccgtcggcggcgccgagggcgacaaggagcacgcgctgcgccaccgtgtcatcgctcaggttcttgagcttgggattgtggtgcactcggtgatcatcggcatctccctcggcgcgtctcaagaccccagcaccatcaagcctcttgtggtcgccctcagcttccaccaaatgttcgagggcatgggtctaggcggctgcatcgttcaggccaagttcaagctgcggtcgatcgtgacgatggtgctcttcttctgcctgactacgccggtgggcatcgtggtgggcgtcgggatctcgtcggtgtacgacgaggacagccccacggcgctggtcgtggagggcgtgctcaactcggtggcggcggggatcctggtgtacatggcgctggtggacctgctcgccgaggacttcatgaaccccagggtacagagccggggcaagctgcagctcggcatcaacgcctccatgctcgtcggcgccggcctcatgtccatgctggccaagtgggcctagtttactagccacttttttgctctgtgccctctcgattccagtttttttagttgagttgctgtaaaaatactactgttatggagaaacgaacgaatacaacaactcttttttctgaaacccatcgcgacatggatggttgcttgcggatgcggagattttttttccttctcccgatcaatgtcgacacactgtcgccaccctttgtttttttgtttgcttgggaaaaaaaagagtacttcgaag

SEQ ID NO: 12841 - DNA, 1083 bp, Zea Mays
cgttggagcaagaccatcacaacctattaagttttcaaatgatacagaaaggctgcagcacatcaattcgattaggaaatctcctgttggagcacagatcaagcttgtcattgaacttctttacaagacaagacaagcttttactgcagagcagataaatgaagcaacttatgttgatattcacggtaataaagctgtctttgacagcttgagaaacaaccccaaagtaagctatgatgggaggcgtttctcttacaagtccaagcatgacctgaagggaaaagatcaactgcttgttttgattagaaagttcccagaaggtcttgctgttgtggaagtcaaggatgcatattcaaatgtattggaagatttgcaggctctgaaggctgctggtgaggtttggctgttatcaaacatggactcccaggaggacattgtatacccaaatgatccaaaagcaaagatcaaggttgatgatgacctgaagcaactcttccgtgaaatagagctgccacgtgacatggtcgacatagagaaggagctacagaaaaacggtttcaagcccatgacaaatactgccaaacgacgagcagctgcccagatcaatggcgtaaaacccaaggctaagcccaagaagaagcagcgtgagatcacaaaacggaccaagctcacgaatgcccatctgcctgagctgttccagaatcttaacacttaaacgtgctacagtatctgacgacggaagatggttcattttactcctatttattgctacgttgtgtgtatgtgttatgcagctatgctgtatggcttatggttatgagcgccacaaatttgtttgtcaagattctggatgatatacttatgcattctgacataataggaggcaaaacctcaagattttccttatttttattttatcaattacagcattttctgagtttgcggcattatgtttggttgattttgggtcaattaggttggtgtgaggacaagctgaacatattttgatggattgcttagcttgaaatgataccagaatttaaacctcataattacgagtactgcggatctgcaggtttagct

SEQ ID NO: 12842 - DNA, 70 bp, Zea Mays
agctatttttgaaaagcaaaaatctctttaacgttctatggttgactgtggttagggttgagaaacctag

SEQ ID NO: 12843 - DNA, 90 bp, Zea Mays
tgtaaaactggtatatcagctgtgctcacggtaatgagcggctcggaccctcacatgagtatcttatggaattaaatttaattagtcatt

SEQ ID NO: 12844 - DNA, 940 bp, Zea Mays
cctctgcgtcgtgatgtactgatgttgtcaacggggaagattttcctcccatgaaggacctaattcagctatacaggacagcttttctagaaggaaatgaggaggttcttggtgtagttgagaaggcaatcactgctgtggaaaaagagaagagtacgatagcttcccaatttgaaagtattacaaccgaaataacttctgggaaggaaaagtttattcgcttaaatgccgacctggagaatttccggaaacagactgaaaaggaccgtgcaaagttaacatcaaatatacgggtggaagttgttcagagtctgttacctctagttgatagttttgagaaaacgaatctagagaacaccccagagactgagaaggagcaaaagatcagcgcaagctatcaaggcatatacaagcagttagttgaaacactaagatatttgggtgtgggagttgtggaaacagttggcaagccatttgatccttcggtccatgaggccatctcacgagaagcatccatgcaattcaaggcagggattgtcatgcatgaagtccgcagagggttccatttgaaggagaggctgctaaggcctgctactgtgaaggtctctactggctctggcaaacaaagtgcaagctcataggcgggggacaaagatgctgctttgtgaatctgatcaaacgaccaacaggaactgatagacacacatttttctgttcataacatgccgaatgtgtttgatctcaaatgagacgggatcagctatgtatggtgttgacagggagcaccagcttgaagttttgctgttgcttgtaatctgctagaattttgtccaccagaagagagagaatgaaacattggacattcataccggatttatattgagttccttgctcacttcattggacatccataccggatttatattgacttccttgctca

SEQ ID NO: 12845 - DNA, 1357 bp, Zea Mays
cttcgactctcccactcctctgtcgcttccgccgacacctgagtcttgtcgctgccgccgggatggccggagtcaccgccaccgggatggccggagttcccgccaccttctcctcagccaccgctcagatcgggggcttcctctcgaagaagccttacgcgccgccgttgtgggccacgcacctctcccccatgccttgccataccttctcgctcggccatttcccaacaccgattcacaagtggaatctgcccaatttgccggaaggaacggaagtgtggatcaagcgagacgatttatcaggcatgcagttgagtggaaacaaggtccggaagctggagttcttgatggcagatgccgtagcacaaggcgcagactgcgttattactgttgggggtatacagagtaaccactgccgtgccacagccgtggctgctaagtatctcaatcttgattgctacctgatactacgtacctccaagcttcttgtggataaggaccctggtttggttggcaatcttcttgtcgagagactagttggggcacacgttgatcttgtgtcaaaagaagaatatggaaaaattggtagtgtggctttagctgacctgctgaaaaaaaggcttctggaagaagggaggaagccgtatgtgattcctgttggtggatcaaactcattgggaacttggggatatattgaggcaataagggagattgagcagcaaattcagcaatcttctgatgttcagtttgatgatattgttgttgcatgtggcagtggtggaaccattgctggccttgctttaggatccagattgagcagcttaaatacaaaagttcatgcattctctgtttgtgatgaccctgaatacttctatgactatgtccaaggcctgattgatggacttaattctggtttcgattcacatgatatagttagcatggaaaatgctaaggggttaggctatgccatgaacacagctgaggagcttaagtttgtcaaagacatagctgcatcaacaggcattgtccttgatccagtctacagtgggaaggcggtttatggtttgctaaaagacatggctggcaatccagccaaatggaaagaatggatcttgaagattctgttccacgcaaagatggcactggtaagatgttctgatcagtacggtccatgtgattccatgatggctcattcttgcaaacattgtatccattacagagttattactcttaaatttgtgcaagaaaatgcagaatagatggttcacattgtatagaacactgatgcaatttaagaataaagcacatctttctgccatttggaaataaatattttttatgtggaggtttgtgtgtc

SEQ ID NO: 12846 - DNA, 889 bp, Zea Mays
aagacgacgtcgctctgccaaattcgaagccagcaggcagcagctcccacgaccacatgttgtgccctcttatcacaaatcgtcgagctccaccaaccacaggcggcactcaccactagagttggtgccgcgactgcgaatccggcgcaatggccgcggcggcgatgggcctcgtgcgtgagctcctgcagccacagggaaccacgagcacccgccggctctgcagcacaggtgtgggcgtgggcgtggcggcgggcttcctcagcgccgggaccgtcgcgtcggcatccagcgcatgcccggcttacccgtggtcacaggacggggcgcggggcgggcacaaggtgttcatgcagcacgactgcgcggcgtgccactcgggcctgccgtacgctggcctcgccgacgaggccctggcggccggaggcgaggtggaagccaaggcggccgagatcgtggttgtccatgaccacgaggaggaggcagcgctgacgacggcgacgacgctccacggcggcgcctgcccgccggacctctccgccgtcaccaaaatgctggaagggctgcgccgcggcaacctgtacagcgcggacgagatcaagacgacgatgtcgctggcttctcctgtctggctgcagtttcttcagtcgtacgtgaggattccccaggcaccctgaaatgccagccagattcgtcactagaacatcccagtcccagctctagtgacgtgagtattctgctgcagtgtgcctgtgtgtctgtttcttctttcttggaagctgccatgtccgtgtgcgggaacaacatttggatcctcctcctcctccatttgtactgaaataaatcaatcctatcctacaatgtactgtggttgttggcagtaaaaata

SEQ ID NO: 12847 - DNA, 645 bp, Zea Mays
tttttatggacgtatagtggaaattgacttgaaaattccaccaaggcctcctggttttgcttttgttgagtttgaggacgcacgtgatgctgaagatgcaatatatggccgtgatggatacaactttgatggccataggttgcgggtggaattagcccatggtggacgaggcacatcttcttttgatcgatctagcagctatagcagtgctggacaacgcggtgcctcaaaacgttctgattaccgtgttatggttactggattaccttcttcagcatcatggcaagatctcaaggaccatatgcggcgagctggtgatgtctgtttcactgatgtgtatcgtgaggctggagcaactattggaatagctgattatactaactatgaagatatgaaacacgcgataaggaagctagatgattctgagttccgtaatgctttttcaaggacatatgtccgggtgagggagtatgatgctaggcgcagccgttctcgctccagaggcagaaaccgctctaagtcaagaagcagaagccacagccactcgtactcaagaagcagaagctgcagttatagcaagagtaggagcccaagatctagatctgcttcagagtcaaaatcacctgttaagctgagtgttgcaca

SEQ ID NO: 12848 - DNA, 860 bp, Zea Mays
aaagaaaaagagctcccacaagaagcatacgaatactcatgacaatgacagtacggacaagaatggagagcccgatgtgggaggtgatcacccggggagtattcacacagaaaatgaacagatcggcgaaccaaggcctaaaagatcaaaaaggctgatgaagagcattactgataaggaactagcggctgctgcaggtgatgaggaaccggcagaaaatcacagagcccatgattatgatggtacagaagaggttcaagacggcactgcagcctgatccacttgacatataaacgagaaccgaggatgatacatggcaagacgagtaatttactatgctgagcttgggcatcagaggtgtgtagatcaggagccttctacatggtacagacatgggaagcacacagattatttaaccacacacctcccatactaaaatcagcgaaatcaggtgattaggccgtcagtgcggtggtccgtagcaataagctgacagagggagagggtgttgccttttagaggcgagggctatatcctccagaggttaacatgcagtccacatctgcagtattcgttgtgctggctgtgaccataatggaggaggtggagggtccatgaccagcacacacagaaatagtttcgcgtaaagagggtagctatatctgtattggcgatagttttggtgttgataattaaagcaatggaacacggctggaaaatagctgccgtgatgttgtaatgtattttaaggggggcgtttggtatggctcaatcctaacttcagagttgtaaagtagttttgggagctgcagtataaatttaattttcgacttttggaacacagctgtcaaacaccctct

SEQ ID NO: 12849 - DNA, 6331 bp, Zea Mays
ccacgcgccgcggcggcggcagcgccagtgagataatagacacaggagtgctggaagcatttcaccctgcctccgcgaatcaacaccccaccggccaccctctcgactcgcttcaggggccaagccagtgtcgcttttgaatccgcctccgttcggttttccccaaaacgccttccttccactactgcttggcatccttggattcgtaggcagtcagatcacgcggcgcgcctcccctggtgactgacctagggctcgccgcgagcgcgcggcgatggcgtcgtccacgtccaggcgccggaggggtgggggcctcgagcgggtggcggacaactgggagcgcctcgtgcgggccgcgctcaagcgggaccgggaccacctccgcgtggggggagccccggctgccgtgggagggcagaggcttgccgacgccgtgccggcctcgctgggtcggaccaccaacatagagcagatcctgcaggccgccgacgacatcgaggtcgaggaccccaacgtcgcgcggatcctttgtgaacaagcgtacacgatggcccagaatctggatcccagcagtgaaggtagaggggttcttcagttcaagacaggtttggcatctgtaattaagcaaaaacttgctaagaaggatggggctccgatagaccgacagaatgacgttcaagtcctgtggaacttttatcttgaatacaagagtcgttgtcgggttgatgatatgcaacgtgagcaggagagactgagagagtcaggaacctttagtacagagatgggaaatagggcaatgaaaatgaagaaagtttttgctacattgagggctttgcttgatgttctggaaaatcttgttggtcagtcaccaactgatagacttcatagacaaattctggaggagataaagagaataaaaagatctgatgcagccttgagaggtgaacttatgccatacaacattgtaccccttgatacatcatcgtcagtggcaaatatttttgggtttttccctgaggtcattgctgcaacagcagcaattcagaactgtgaggacctgccacgattcccttttgatacaccccagctaagacaaaaagacattttcgaccttttgcaatatgtttttggcttccaggaagataatattcggaaccagcgtgaaaatgttgtacttatgttagccaatgctcagtcccggttaagcctgcaaattgggtcagaacccaaaattgatgagatggctgttactgatgttttttgcaaagtcctggacaactacataaaatggtgtaggtacttgggcaggcgtgttgcatggaccagccttgaagcagtaaataagaaccggaaaatcatattggttgccctctactttctgatttggggtgaagcagcgaatattcgttttctcccagaatgcatatgctatattttccacaatatggcaaaggaactcgatgggattcttgattcatctgttgctgagactgcaaagagttgcactactgagggttccacttcatttcttgagaaaataattacaccaatttatgataccatggcagcggaggctgaaaataataaagatggaaaagctgcacattctgcttggaggaattatgatgacttcaatgaatatttctggtcacgctcatgctttgagcttggttggccacctgcagagggttccaaatttttgcgcaagcctgctaagaggaaacgtacaggaaagaccaattttgttgaacatcgcacttttctgcatttgtaccgcagtttccaccgcttgtggatttttctgctattaatgttccagctcttagctattattgcctttcaccatgggaagatggacattgacaccattagaatactacttagcgctgggccagccttttttgtactaaacttcattgaatgctgcttggatgtcatactcatgtttggtgcatataagacggcaagaggttttgctatctcaagattagttattcgatttctttggttaactgcagtttcaacatttgtaacctatctctatgtgaaagtcctggaagagagagacacaaggaattcagattcgacttatttccgaatttatggtcttgttcttggtggttatgctgctgttcgaatcatgtttgcactgatggctaagatcccagcttgtcataggctctcaagtttttctgatcggtctcagtttttccaatttttcaagtggatataccaggagcgatattatgttgggcggggactttatgagagtattagtgattatgccagatacgtgatattttgggtcgtcatactggcatgcaaatttacttttgcatattttctccagattaggcctttagttgaaccaaccaatattattgtgcaactccatgatttgaagtattcctggcatgatcttgtatcaagggggaataaaaatgctttgaccattctgagcctatgggcaccagtcttagctatatacctgatggacatccacatttggtacactcttttatcagcacttgttggtggcgttatgggtgccagagatcgccttggagagattcggtcaattgaaatgcttcataaacgttttgagagctttccagaagcgtttgctaaaaacctttccgcttcaaggatacctagcagacgcattgatcgtgtaaatgaatcagaaattacaactaagacgtatgcctcaatattttccccattttggaatgaaattatcaagagcttgcgtgaagaggactatatcagcaacagggaaatggatctgcttatgatgccaagtaactgtggaaatttaatgcttgtacagtggccactgtttctattgactagcaagatcatgttggcaaatgactatgcttctgactgtaaagactcgcagtatgagctatgggatagaatatcaaaagatgaatacatggcttatgccgtcaaagaatgttactacagcactgaaaaaattcttcactctttagttgatgctgaagggcagcactgggttgtaaggcttttccgagatcttaatgacagtatagcacagggttcacttttagtgactataaatctgaagaagttgcagttagtccagtctagattgacgggcttgaccggtcttctgatacgcgatgagactgctggccgtgcagctggtgttactaaagctcttcttgagctttatgaggttgttacccatgaatttctttcacagaatctgagggaacagtttgacacgtggcaactgttgttaagagccagaaatgatggacgcctattctctaagattttgtggccaaaggatccagaaatgaaagagcaacttaagcgattacacttacttcttactgtcaaggacagtgccaccaacataccaaaaaatcttgaagctcggagaagattacaatttttcactaattctctattcatggacattccacaagcaaagcctgtatctgagatgatcccttttagtgtctttaccccatactacagtgaaacagttctttatagcatgtctgagctttgtgttgagaatgaagatggcatttctatacttttctaccttcagaaaatataccctgatgagtgggctaacttcttagaacgaattggctgtggtgaatcatcagaagatgattttaaagaaagtccaagtgacaccatggaactccggttttgggtatcttatcgtggccaaactttggccaggacagtgcgtggaatgatgtactatagaagagctttgatgttacaaagttacctggagaggagatgccttgggggtattgaagatggaaattctgcagcagaatatattgacactcaaggctatgagttatctcctgatgcacgggcccaagcagatataaaatttacttatgttgtttcttgccaaatatatggactacagaagcaaacaaaaaaacaagaggctgcagatattgctctcctactgcaaagaaatgaggctcttcgggttgctttcatacacgaagaggaaatcatatcaagggatggtaaggctacaacaagagagtattattccaagcttgtgaaggctgatgttcatggcaaagaccaagaaatatactgcattaaattgcctgggaaccccaagcttggtgaaggcaaacctgagaaccaaaaccatgccataatcttcactcgaggagatgcagttcagacgatcgatatgaatcaggataactacttggaggaagcaatgaaaatgagaaatttacttgaagaatttcataatgctcatggaaaacatggcatacggaagcccacaatcctaggtgtgagggagcatgtattcacggggagtgtctcttcgctggcgtcatttatgtcgaaacaggagactagttttgttactttggggcaacgtgttcttgcttacctcaaagttcgaatgcactatggacatcctgatgtttttgatcggatatttcacataacccgaggtggcattagcaaggcgtctcgagtgattaatataagcgaagatatatatgccgggttcaattcgactttgcgccaagggaacatcacacaccatgaatatatccaggtggggaaagggcgtgatgttggcttgaaccaaattgcactatttgaggggaaagttgctggaggcaatggtgagcaagttctcagccgagatgtgtaccgtctgggccagttatttgatttcttcaggatgctaaccttctttttcaccactgttggttattatgtctgcacgatgatgactgttctaactgtgtatatcttcttgtatggaagggtttatctggcactctctggccttgactactcaatatctcgccaagctaggtttttggggaacactgcactagatgcagctttgaatgctcaatttttggtccagattggtatttttacagcagtgccgatgataatgggtttcattctggagctggggctgatgaaggctgtttttagttttattacaatgcagctccagttctgttcggtgtttttcaccttttcgcttggaacaaggacacattactttggtagaacaatccttcatggcggtgcaaagtatcgtgctactggaagaggttttgttgttcggcacataaagtttgctgaaaattataggctctattctcgaagtcactttgtcaaagcgcttgaggttgctctcctcctgatcgtttacattgcatatggatacacaaaaggcggttcatcttcatttattctgattactatcagtagttggttcctcgttatgtcctggcttttcgcgccttacattttcaacccttctggtttcgagtggcaaaagactgttgaggactttgatgactggacaaactggttactttataaaggtggagttggtgtaaagggcgacaacagttgggaatcttggtgggatgaggagcaggcgcatatccagacattcagaggacgtattcttgagacaatcctcagccttagatttctcatgtttcagtatggcattgtgtacaagcttaaaattacagatcataatacttctcttgcagtttacggcttctcatggattgtactctttgttatggttcttcttttcaagctttttactgcaactcctaggaagtcgacagccttgccgacttttgttaggtttctgcagggcgtccttgctattgggataattgcaggaattgcccttcttatcgtgctcacatcattcactgttgctgatttatttgcaagtgcacttgcttttatagcaaccggctggtgtgtcttgtgtctggccgtaacatggaagagggtagtgaaagtccttgggctatgggattcagtccgtgagattgcaaggatgtacgatgcaggaatgggagccatcatctttgtgcccatcgtcgtcttctcatggttccccttcgtgtcaacattccagtcacgtttcctcttcaatcaagcgtttagtcgaggtctggagatctccctcatccttgcagggaacaaggcgaatcagcagatttgaaaggccctgccgcatccatcgtatttttctgttgtatattctgggaattactgagagctgcttagttagtttgaacaatttaatgagctcgatttgaatgacaaccttctacataattgcccctgtaatttgtacactaattatgcggagaggcagctacggcagtagagatgagctgatgtatgtcgatttgatcttaaccaaacctctctttaaggctacgacggttcagtaggcctgcactagtatgttgcacccatccacagatataaaaagaaaaatattcttaatataaaataa

SEQ ID NO: 12850 - DNA, 77 bp, Zea Mays
cttcgtgcctcgctctgaggcgagctacccagttcccacatttcggaagagatggccaggggcctggatgcaggaat

SEQ ID NO: 12851 - DNA, 141 bp, Zea Mays
ggtgcggtgtgacacacacgcaacgcaggcagggacagccggacagcacgccgtccgtgcgtgcgtgcgggcggcggcggcggcggcccccagctgccagacaactgtgtcctggcaattcaccctgctagtctagggaag

SEQ ID NO: 12852 - DNA, 154 bp, Zea Mays
aggacttcgacgagttcgaggattaggctagcgatcacccccaatcagctgcatgtggtgggtttatttacgttagctacgtttctattctgtgtactttgattcatattatgtaagtgactctagtatttaatatcattatttattctttatt

SEQ ID NO: 12853 - DNA, 653 bp, Zea Mays
attctaagtcatcacaagaacaaaatccagctatcattcatggacatcctcgatctcaggcgcacccttacccaccgccaccagatgtgtacccgcctccccctcggggccatggacatccaccaccaccccatggcgtgtacccgccgccgccgcagggtccttaccccccaccacagcagcctccaccggggtaccagggctacttcaacgaccagcagcgtccttactacccgccgccgcatggagagcatcaacacaaccaccaccagggaaaccagggtagctcctctgggttcctcaaaggatgtttggctgctctctgctgctgctgcgtgctggaggaatgctgcggctgcttctgagacgtgagatgtccgggaatccgatcgcaagttatcgtcgctagcattcgggagcaccccagttattatcatataatagtaactgtgcttgtaaataatctggagcagcagtgttcatgagctcccagccccgcatttatattctcataatttgtagtacgttctatgatttatccgaaaataaaggactctatatatgggattctaaataaggtatttgcatatttcatgggattcaaacagtttttttttgtccgtaaggcgcatttccggccgtttggacacgtg

SEQ ID NO: 12854 - DNA, 325 bp, Zea Mays
cgattactatgaattacgaactgaacttaaatcaaatacttcagtattggtctctagagaggaagctctgccaaccattattaataactgagaagatgttcgcgtacagggagacggtgttggaggaggcacatcagggcatggagctacatgagcactgccgccatatagttgacaacgatgaccaacactgtagattccattctctgtgtgtacaccaagttgggctgaggaacactgagcagcaacaacaatatcgtaaggagagtgcatatgttggacaaatggagttaaagtgcacatacctaatcaagtctgtgggtct

SEQ ID NO: 12855 - DNA, 91 bp, Zea Mays
tgactgggagacgacgacctagacctctcacgaactcatcgtagcaccttcatgctcctcatcttggcggtacctgtccttgacctagttg

SEQ ID NO: 12856 - DNA, 744 bp, Zea Mays
aacctgaagagtagttacaaggcaacatgtatacgtgcatctagagaggctttttgcagaaaataaggaccagcctggtgtatctctgcccagctgagcacatccctccaaaaattgaggtggacctgacaaatcttgatgtcggagatagggtattgatgcatgacattcccgtccatccatcgctcaagttgctgagtaaaaacgagaccatgcccgtctgcaagatcttggcctcaaagccagacgagtaggaggcgctgcaaatacttcagagctgataacattgtacctttaggtggtacagccctccagcagctccgtccctagttcttggcttgctttttggtcatctgccccctaggtttcaatgtgatagtggattcagacaagctatgggcttcaagtaaagatacgaaggaacaaaatgaagaaatatcactggagagacattgtctgtaccaaccgctatagaataacatcctttctcattcagtttgggttcagggacacatgacatgtaagacgactatcctttgctgtggcctgggtgaattcattctctaagctactcttgcagcggctcacaattcatcgtcctgactgcatgcattgtactgtcatgattctacgtattgaatgttgtattcatgcaaacgatccggtagatgagtgttgccctgtacgggcaacctaccttttcatattaaccattgtgtgaatgtctccagatcccagtcgccg

SEQ ID NO: 12857 - DNA, 939 bp, Zea Mays
gctatgctcaattttgcggcgcaatatgttacaaattgcgaaatgaccacaaggatattacaaacaaaattggtaaaaatcttgaggttttacactcagcaaagttatcaaggaatgaacaatcaacctcaaggagatctgatacaacagatccttcacactttggatcatctcaaagtgaacctatggaagaggaccatgtgactggacttccttttgccatgattgatgaaatcgctgatggttctcctgcttctgtggatggtttgcaacttggagatgagattgtaaagtttgggaatgtggaagctggtgatcagttgcaggaaaggctcatgtctgaagctctttccaatgaggacagtcaagtatctttagtcatcattcgccagggatcagcggtgaatttaacaattacaccaaggaagtggcatggaagaggacttctggggtgccatttcagaatgctatgaagagtccgtcgttcttcagcaggatgcgttggtctatcatgcttgcactcgtggagagtggagacggctctagcgatgccatttcagccgcaaagtgaactgatttaaccgaatgtgtgacatcttccaaaatactggttgcgtgtacttaacttgtggagcgcttgaaacatactagtgtaccaggctgcctgtgttgagacattttacttgtacacatggtcggttttcgttcttcctcgcttgcgtatcggtatcgcacaccaacttgaaattgaaagtcgtcaacgttcttctagttcatacggtcaggaccctgagtttgcatcaatcaacagctaaaaaagggccatatgctagcgatgcaagtttgaatccatgagcagattagggaacctttggtatcagctctacaccttctgtagggatgtttctgtcacgcttgagaataatatatgaggctaac

SEQ ID NO: 12858 - DNA, 713 bp, Zea Mays
atccacaactctactagtgcaacgcgcaagtatgagatcatatccactgctctaatggtggtgcaagtaggagatcatcttgctcaccggtgcaggtagtctggtgaaatacgtacacgtatatgcttcatgtatcacatgatcacaaacttgcactgataagatgtatggaccacgtttccttgccccccacaaaaaaaaggatcgaactgaagctccttcattcctcggaatcagactcgagtgggcaggagccgtcgtcgacggtggccagcgggtcgaacatgtcggagctggggtccgtgcacccgctcacgatatccagcttgcaccgatcccccccctcgtcgaggtagccgtccatggcgcagctggtgatggcgatgttctcgtccgggtagatggccaggtcgcaggcgccctccctgttgagctcgtccgccaggccctcgttgaagaagctcagcggcttcttctgccatggcttcgggaccctgaacttgagggtgtacggcccgtcccactcggccccgttggtgaaggagaagatcaagcttgtggcgtgctgcggcacgcgtatcctgatggtgtagatgggcgggtcggctttcccgcggacctgcagcgtcatctgcctcggctcgccgccgcacatgatgggctggttgaagccgccgttgaacgccacgccgaacacgtcgttcggggccatc

SEQ ID NO: 12859 - DNA, 1123 bp, Zea Mays
ctgccattcaatgtatgccaccgtgatttgaagttggagaacacacttctagatgggagtgacgctcctcgcttgaagatttgcgatttcggttattccaagtcatctgttcttcattcccagccgaagtccactgttggaacacctgcttatattgcacctgaagttttgttgaaaaaagaatatgatggcaagattgctgacgtttggtcatgtggtgtaaccctctatgtaatggttgttggcgcatatccttttgaagatccagaagagcctaagaacttccgcaagacaattcagcgtatcttgaatgttcagtacgcaattccagacaacgtgaacatatctccagagtgcaggcatctaatttcgaggatttttgttggcgatcctgctacgcgaataacaatccctgaaatccggaatcatagttggttcctgaagaaccttcctgctgatctgatggatgatgatagcatgagcaaccaatatgaggagcctgaccagccaatgcagaccatggatcagatcatgcagattttaacagaggccaccataccacctgcctgttctcgcagtataaatgtcctagctgatggactggacatggatgacgacatggatgatcttgattccgactcagatcttgatgttgacagcagcggtgagattgtgtacgcaatgtgagtaacatctcagcagccatctcagcagtcaaccaaggaaccaatcaggcatgggatgccctgttgtatactctggcaaagggcatgcttccttttgtgaaaaacatccatgtagttttctcaaggaatcgcaatgtgttctgtggaacacatatgttgtagtcaaactcgggttactcagcttgtaaaactagcctcctcttgcttcctggttactgggctttggatactctcaggcttcgacttgtgtgttgctgttaaatatgtataagaaacttctactcaggttgatctgtgaatctggattccggtagtggttttgctcagtgttgggtgtattcccgatttctgcatttcaaactctgatgattaggtcttgtatttaggcggtttctggatttcaaaatttgtgtttttttgtgcaatttacattttcg

SEQ ID NO: 12860 - DNA, 2399 bp, Zea Mays
ccatccgtccacggaaagggaaagacatgcatcccagtccggcggccaccacggatgggtctctttgatcgcctcctcctcggcggcggcgatcgcagcagggggacggaggaccaggagcgcggcggcgccgaggcggccgccatggggtcagacgtgccgccgccgtcggccatccctcccctctcagccgccgcggcctccgtcgttcgccagtgcgcccggatcgcgggcgtgccggtggaccagctcctccggcgggtggacgcggaggagcaggcccgcgggccgctggagtacgccaggagcgtcgtggagtactgctcccacgtcgccctgcgcgtggaggccaggcgcccggaccacctcggcgacagggagttccacacgctcacctacgacatgatgctcgcctgggaggcgcccgacgaggagaccgacgccgtgttccagaaaacggcattcagtgttctccgtggagacgacgcggacgacgacgacagtgggtccatcttctattcaagcccgacgcagatggccattcaggtcgatggcaggcggacagttggacccgaggcatttgccaagattgctcctgcatgccctgccatggcacaccccatcaccgtccgtaacctgttcgacgcgatcaccaactccaccggaggacggctgcatttccttatctaccacaagtatctcagaatcctgaacgaggcgttctgctctgcgaagcgtgtgctaggggggcacagagccccagccctccagctctccgacgacgaagtgatccttgacatccacggcgctgcgacgaccaagccagttctccagcacatcggcacgtccacatggcctgggaggctcacgctgacgaaccacgcgctctacttcgaggctatcggcgtcgatttctcgtatggagaggccgtcgtgtatgatctggcaagggacttgaaacagtcggtgaaacgagagtccactgggccatggggtgctcacctcttcgacaaagctgtcatgtacaagtccagcctgacaagtgaacccgtgttctttgaattcccacaattcaaaggccacacccgccgagactactggtttgcggccatcaaagaggtgctgcacgcacacaagttcatcaggaagtacaagctcgccggtttccagaaggcggaggcgctctccgtcgcaacgctagggattctgcggtaccgcaccgtgaaagaggggttccacatactgccggcgcatttcaagaccatcctcgccttcaacctggcggagaaactgcccaagggggacaagattctggaggcactgtatggccagctcaagcagcactgcccgaggttcagaggaggccaggatcttggccagagcagttccgaggaactgatgcttgctgaccccttcccgctctctgcgtataccatggtgacgatgggtttgctgaagctgaaagaggaggacaacgccgaggagagggatttcgctgtgcgtgacgtgcagattggagggactagctcagttcagatggctctagagcgttcggttgggtattcgggtagagtggaagcggcaagggctacgcttgatcaggaactactatttcctctgattgaaataggcaaaaggttgctcgctttgtctgggtgggaagagcccttcaagtcttatgtcttcttgttatgtttcctctacatggcttacagtggttggatctggctcatgtttcctggcttcttgcttggctctactatcttcatgctatggaacaaacactataggcatgggcgctcggtaggagcgtttgagatcataactcctcctcgaagaagaaccgtggaacagctcttagctctgcaacaggccatctcgcagctggaagcgcacgtgcaagcaggaaacatttttctcctgaagctccggtccctcatgcttgcagcgtttcctcagagcaccaacagagttgcagctgcactggttgctgtggctgcgatattcacgttcgtgcccttgaggaccatcgttctactaatccttctagaagaatacacaagacagatgccggtgaggaagaagagcagtgagaagctggtgaggagattgcgggagtggtggctccggatcccggctgcgcctgtacagcttgtaaagcctcgggagacgaggagatggagatccaggttgagatgagataagtaagccaaaaaatgttggtttgtttgcttttagttttacaccatgttccgtgcacattctttgagcggtagggatcttggtatcacgccttcaagtgaaagcaagaccttggtgtaagctgggactggttttaacaagcagaaacagatgaagaaatcgtgtcttattcggtgcaacaaacgtatactaactct

SEQ ID NO: 12861 - DNA, 1717 bp, Zea Mays
cggccatatgttagggccttgttggtgcatgtgcaggcgtatctgacagactctggggctttcacatgcgctcacttcattcatgtggctctgcggccctattgccggcttagtggtccaaccgctggttggcctgtacagcgacaggtgtacatcgagatgggggagacggaggccgtttatcctgacagggtgcatgctcatctgcgttgccgtcattgttgtcggattctcgtcagacatcggagctgctctaggggacacgaaggaacactgcagcctctaccacggtcctcgttggcacgctgcgatcgtgtacgttctggggttttggctccttgacttctccaacaacactgtgcagggtccagcacgtgctatgatggctgatctatgtgaccatcatgggccaagtgcggctaactccatcttctgttcttggatggcgctgggaaacatcctaggctactcctctggctccacgaacaattggcacaagtggtttcccttccttaaaacgagcgcctgctgtgaggcctgtgcgaacctgaaaggtgcatttctggtggccgtggtgttcctagtcctgtgcctgacggtaaccctgatcttcgccaaggaggtgccgtacagagcgaacgagaacctcccgacgacgaaggccggcggcgaggtcgagactgagcctaccgggccacttgccgtgctcaagggcttcaaggacctgcctcccgggatgccgtccgtgctcctcgtgactgccatcacctggctttcgtggttcccgttcatcctctacgacaccgactggatgggccgggagatctaccacggcgaccccaaggggagcaacgcccagatctcggcgttcaacgaaggtgtccgagtcggcgcgttcgggctgctactcaactcggttattctagggttcagctcgttcctgatcgagcccatgtgccggaaggtcgggccgagggtggtgtgggtgacgagcaacttcatggtctgcgtcgccatggcggccaccgcgctgatcagcttctggtcgctcagggactaccacgggtacgtgcaggacgccatcaccgcgaacgccagcatcaaggccgtctgcctcgtcctcttcgccttcctgggcgtccctctcgccatcctgtacagcgtcccgttcgcggtgacggcgcagctggcggccacccggggcggcgggcaggggctgtgcaccggcgtcctcaacatctccatcgtcatccctcaggtgatcatcgcgctgggcgccggcccgtgggacgcgctgttcgggaagggcaacatcccggcgttcggcgtcgcgtcggccttcgccctcgtcggcggcgtcgtgggcgtgttcctgctgcccaagatctccaagcgccagttccgggccgtcagcgcgggcggccactgatcgaacccggccggggccggccgccggcacgcagcccggcaagagctgtatgttgttgagagttgaacagaaaccatgcatgtgtgcttctgtagttctgttgtttgtggtcgatcgatgggcgttgcgtggcagcgtgggcaagcgaggcgaggtgcgcggatccaaaaaaagggccattcgatcaatcaatgtgtagtagagtacaactagacgatgatgttcacatcatttgtctttaatacataccggtttctattgtctttacaatatttttgtctatattaa

SEQ ID NO: 12862 - DNA, 92 bp, Zea Mays
taccagcatggaatcgagaaatggttggatgctccaatacaaaatcgcacagatcaattcgaccaaacatgtaagctcctttcttggacctg

SEQ ID NO: 12863 - DNA, 918 bp, Zea Mays
caaagcttaaaatgtttgacttaagacatcctcaaaatgacttgctttagggaactggagggagtatgtctcaaaacataattcaaatgggacgatgtgaaggttgacaagcatcgggagaattaccttggtcatagtgttaaggctccggttggtagatggcagaaaggaaaggatctttactggtatactcgggataagaaatccgacacggaagatgctcttaaggaagaaatcaggagagtgaaggaagaggaggaacaggctatgcgtgaggctcttggcttagctcctaagcgcagcaatcgaactcagggtaatcgcttggataagcatgaatatgctgagctgattaagagaggatcaactgcggaggacttgggagcagggcacgctgaagcagcacaagtgcagggtctaggattgtacaaggcccctcgcgatgagggtggatcaagttctttgagccttgaccctcaaatggagcctgagcaggctgaacccctactagcacccaagcaggaggatgatttggaagataataggaaggggaaaaggccacgtgaacgtgacgagaagagaggggagaaggagcggaaacgagacaggcatggtgatggaaaggagaggaggcgggacaagcacgagaggaggcacgacttggaggacagatcaaagcggcaccgcaaagacaagcagaagaggaggcacgattccgattctgattgataacggccctgcgcctgctcctgtatgactactgtatactgcgaaatttcaaacccatggagccgcttttgtttgatgtatgcctacgctttaaattatgtttgccctaatgatgtttaaggataaaatggcccgtatgctcctctccactcaacgttatatacctgatgtccttaaaagaagtttgtg

SEQ ID NO: 12864 - DNA, 2308 bp, Zea Mays
tgagaatgagatgagaggtttgccatgatcaggcttgttggggaagtccgacagggaacgacaattcgtccgcgctgtatcgcgagatgtatgagaggtccattaaggacccggccgggttctggtcggagattgccgagaccttttactggaaggagaagtggaaccccgccgaggtctgctcggagaacctcgatgtcaccaagggacccgtccagatcaactggttcaagggagggaaaaccaacatatgttacaacgctgttgaccgcaacatcgagtctggcaatggcgacaaggttgcaatgtactgggagggtaatgagcccggtcaggatgggaagcttacctattccgagctcctggagaaggtttgccagcttgcaaattacttgaagagccttggtgtcggcaagggtgatgctgttattatatacctaccaatgttgctggagcttcccattgccatgcttgcctgtgcccgcattggtgccgttcactcggttgtgtttgctggcttctcagcagattcgctagctcaaaggattgtcgattgcaagcctaagcttgtcatcacgtgcaatgctgtgaagcggggagtcaagcccatctttctcaaagatatagtggatgcagctttggttgaaagtgagaagaatggagtctctgtaggtctctgtttgacgtatgaaaaccagtcagccatgaagagggaaaacacaaaatggcaagcagaaagggatgtttggtggcaggacgttgtcacaaaatttccaaccaaatgtgatgtggagtgggtggatgcagaggatccattgttccttttgtacacaagtggcagcacagggaagccaaagggtgtactgcatacttctgggggctacatggtgtacactgcaacaacatttaagtacgcatttgactacaagccaactgacatatactggtgcactgcagactgtggctggattactggacatagttatgtaacatatggtcctctcctgaatggtgctacggttctcgtttttgaagggacgccgaactaccctgattcgggccgatgctgggatattgtggacaagtacaatgtgacaatattttatactgccccaactcttgttcgttcactcatgcgtgatggcactgagtatgttacacgttactctcgaaagtctctccgagtcctgggaagtgttggtgagccaatcaatcctagtgcatggagatggttctacaatactgttggggattcccggtgccctatatcagacacctggtggcaaactgaaactggcggtttcatgatcacccctttgcctggcgcctggcctcaaaaaccaggttctgcaacctttcctttctttggtgttcagccggtcattgttgacgagaaagggcaagagattgaaggggaatgtagtggatatctttgcataaagaaatcatggcctggggctttccggactctgtatggagatcatgagagatacgagaccacgtacttcaaaccatttgctgggtactatttcactggtgatggttgcagcagagacaaagatggttaccactggctgactggaagagtagatgatgtcatcaatgtcagtggacaccgaatcggcacagcagaggttgagtcagctttagtgtcacatccacagtgtgcagaggctgctgttgttggtgttgagcatgaggtcaaaggtcaaggaatttatgcttttgtaactttggtggatggtgttccgtatagtgaggaactacgaaaaagcctcataatgacagtgcgcaaccagattggggcatttgcagctcctgacaagatccactgggcaccgggacttcctaaaacccggagtggcaagatcatgcgaaggattttgcgcaagattgctgcacggcaactggatgaacttggggacataagcaccctcgctgaacctgctgtagttgaccagcttatttcgctcagcaattgttaggttgcaacgtaattggatggtggatacatccttgagcgcatgttgcgtttgtctgtaatatgagtagaaggtgcatttcaatatcgagaactcaagtgggacgtggtgacatgttgtcgatgtttccttttaaacttttgtatcagatatcaagataggtccatcagaatgtattattgattgacacagacaaatatatcaataaaattgttaatttttcatttggtttcgtttggataaactttgcccttgtttttgggattcagtttgacaaagtaaacttcctgcattattagtgatattcaggttttgtgacttttgac

SEQ ID NO: 12865 - DNA, 560 bp, Zea Mays
ttttgggctatagttgagaaagataaacttgttttttttttcaatccggtctcgcaagtcgcaaacaaacgcccgttaaaagatccaaactttgtgccgccgcctcctgtttgcacagaggggaagagagagagagagacggaaagggggagatgagccggagcctggggatcccggtgaagttgctccatgaggcagcgggtcatgtggtgacggtggagctcaagaccggcgaagtgtaccgggggtccatggtcgagtgcgaggataactggaattgccagctcgagaacattaccttcaccgccaaggatgggaaggtttcgcagctggagcacgtcttcatcagaggaagcagagtgagatttatgattatacctgatatgctcaagaacgctcccatgttcaagcgcttggaagcgagaattaggggcaaaggatcagctattggagttgggcgtggacgtgcagttgcaatgcgtgctcggggaatgaagaaataagtttgcacgacacattctttttaccattttgtgaactctatagtgcatcttgtcagt

SEQ ID NO: 12866 - DNA, 124 bp, Zea Mays
agaaggccacatcacccaaccggtatgcgccccggtccccacgatcctgatctaacggctaggtgcccacccactactggatctaatctcatccgcgctatttggatcggacggcccacgactc

SEQ ID NO: 12867 - DNA, 660 bp, Zea Mays
atggccgcctccagcgccgacccggctcagcaccacgcctcctcgaggccgccactcctcctcgccgtacgccacctgcccttcccgggcgtcccccgaacacgcacgttccccgtccccggccccgacgtcctcgcccctctcgcccgccgcctcgaggagctcgcgtccgcggcggccgcccacccgctcctgaagccgctcttcgccgcccactcccacctctcctccttctcccagggcaggaggcgtctggtggcggcgcggcgtgccacggtgctgtcgtccggggagctctgcttcgcggcggtgctcggggactcggtggccgggacggtggtggccagcggcatcaataacttcctcaacctttacaacacggtgctcgtcgtcaggctcgtgctcacctggttccccaacacgccgcccgccatcgtcgcgcctctcagcacgatactcgctttcctcgtcctcaacgccttcaccagcacggccgccgcgcttcccgcggagctgccaagctgctcggcaacggcgcagcatcaccagaggactgctgtctcaccctgctcggcgccgcatgaggcgacgctcagccagaggaaatggatgcggagaatgcggtcacagaagccacagggagacgatggtgatcactag

SEQ ID NO: 12868 - DNA, 483 bp, Zea Mays
agccacagcccaccacctttgcttgctctgcccctccatcatcgccagcctgccagtgccgccgctaccgtagtaccgtaccctcagctagtcagctacctccatccaccagaccagaccataccagaccagaccagaccaatggccctgcgcctaccaatctcatcgtcccacgggctggcctccacgccggcgccaatctccacgacgacgtgccggccggccgtcttggcgacggccgcggcccagaagaggagcctgctgctggcgacggcctccgagacgaggggagtcgcgccggtgaggtccagcgggatcgagacgagcacggtgggtctgggatgtgaggccgtcaccgggcaggtcacggaggtcaacaaggacaccttctggcccatcgtcgaggccgccggcgacaaggtcgtcgtcctcgacatgtacaccgaatggataaggatatggcttaattactctatctttacc

SEQ ID NO: 12869 - DNA, 109 bp, Zea Mays
gctgattcttgtgcatgtaagtttgatttattcattcccagattgaacatgtggtgtgtttgatctagatttatactaatacaatcttccatttcctctataccttagg

SEQ ID NO: 12870 - DNA, 866 bp, Zea Mays
accactgactcgtccggcccaactgaacaccgaacctaacaggaggaatgtatgtagccaaccgtgcttcagacaagattacccaattgacagacaatgtgtacgtttgtcgctctggatctgctgctgatacacaagtcatttcggactatatacgttatttcctccaccaacacacaatccagcttggacaaccagctactgttaaagttgcagctaacttgattaggttgctagcttatcagaataagaacatgttgcaagctggcatgattgttggaggatgggataagtacgagggaggccaaattttctcagtccctcttggtggaacgatcttgaagcaaccatttgcaattggaggctcaggttccagttatctttatgcacttcttgatcatgaatggaaagagggaatgagccaggaagaggcagagaaatttgtggtgaaggtagtttcccttgctatggcccgtgatggtgctagcggaggggttgtccgtacagttacaataaatgcggatggcgtgaagaggaacttctaccctggcgacaagctacccctgtggcacgacgagctggagccccagaactcgttgcttgatattcttgctgccgggaaccctgatcccatggtgcagtgaatttgccctccacttccgttgtgaacttttcactgtacctgacttgttcttgatttcaaccgaagaaagaattggaacatttcctgtcgaactaatgtcgcgccagagtatttacatactgttgttatcacaccttagtaaattcatggttactactgctgtcgtcgttttatctgacgagtatgcgattttgtcagccgcctacttatatgcggtactgat

SEQ ID NO: 12871 - DNA, 121 bp, Zea Mays
tggatgctgtgatgagttcgtgagtggtctaggccgccgtctcccagtcaactttggttgctcgatcgttgtctttgtatgatctaattatttaactattttgtacagaactccattatat

SEQ ID NO: 12872 - DNA, 2832 bp, Zea Mays
tttctattccacgaccttatccacaccagcagattcgaaattcacggacaggcccatggacccggcgaaagccagcggtggttcagcccctgacgtgcgggtcccactctccagccgcaccgcctagagaggcagaggcatcccttcgcgtggaagcaaacgaggcgtgataaagtggggctcctcggtcccggcgttggccgcatcgacactcgccgcgcaccaccaccaccgctgcggctcacggctacgcagcccgctctcccgacccccccgtgccctcctctttttgctactagcacatagagtttcgcccgaatcgatcgccgactgactccgctagggttcggcccgatcgccgcttcgtcctcccggctcccgcggggaccccgccgagatgtctgactggagctcgccggctgcgccgacgttcttcccttttggcccgcaggccgaggggtgggacgtcaccttcaaggtcaaatatggtgatacacttaaaaggttttatggttgtgccaatgggagtcattttgacatgaatttatctgctctacgggcgaggattgatactgcctttaagtttggtcctgacgttgactttgttctgacttacaccgatgaggatggtgatattgtcatgctagatgatgatgatgacttgcgtgatgcagctctccgtcagagattaaaccctctcaggattactgttcaactgaagaaaaatcaaccaactgaaaaaaaagatacttctgcaccagtgaaatccgctgctcaggatccactatcccagttaatgtcagctattgaaggtttgaagcctgttcaggaagatagtctggcccatataaaatcagctattggtgaagcaatcaagtctatcccagagccaatacctgatgcccttgcaaaactttctcatgaaatacttgatgcagcaccaccaccattagctgagctgatgaaaccttttgcacaattgatggcaccaaacaataatggcaatgggccatctgatgtgcatgctgaggggtcatctagctcttccagtgcacaggtgccagctgaagctaaaaatgagcccaaagttaggccaagtttgggtcttaagaccgtgttgaaagaggctgctggacctgttcctaatgctggagcttctcaggttcaacagccattaatgtatccatctgttgaggagatgctgttcccctgtaattcagtcgacaaatctgtttgcaaagggaagattgatgctcaaagtaagggaaaatctgttacgtcctcaggcatccaacctgctcctcattctcttcgtactcatgccccacctccaccacatccgtgcatttcagaatggtcccgagcacaaagaagccaacaccgtcaattgaaatttgaagacaatgcaaaagccactaatgattctagatggcgcattccgatgtataaaatgccctatgcaccaccacctccagcagtgccacccccaggctatgtaccttctccacattttccttatccaggccgcctcttatcttctgggcatccatacggagatctcgctggtaacatggaaaactcagcaccacatagtctgcatagatggattcagtgtgatggctgtggagcgcaaccaattgttggtccacgttataaatctaatgtgaaggaagactatgatttatgtgattcctgtttccagcgcatgggaaatgaaatggagtacaccaaaatagacaagcctattttaccccacaggtttctaagagatccccatgtgtaccggaaggtgcaccatccacgggttctaatgaagtcaagacgggagaaacttgaaagtcgcttcattttggatgtgactgttcttgatggaacactgatgacaccttctaccccgttcactaagatttggcgcatgcataacaatgggtctgttgtgtggccacggggcacacagcttgtctgggttggtggagatcagtttgcattgcagacatctgttccattagagattcctgtggatggttttcctgtggacaaagagattgatgttcctgttgattttgtggcacctacaaggccagggaggtacatatcttactggaggttggcttccccttctggtcagaaatttggtcagcgagtttgggttcatatccaggtggaagacccttcttttgttaatgacaataacaggaatgctgctattaacctgaatctgcctccagagagctatagttcaaacacaaccaacttaattgatgtgaacattgagcctgctgactcagcccttagtgcacatgctaagcgcacaaaggagttccatttctgttcaactgattttcctgaacccagtaagtctgtgccttttacgttggccactacctctttgtctgcagcagctcctacaaaccaaactggtgatgttcccatgtccagtacacctgctgctgcttgtttgccctctgttaatgtgcctatgcatgaagtcgttactactcatacaccgtcacctattacgcctgtcttgcctacaactatacacttttcagccccagtatctgctcctgcaattgcccctgagcttgcatcaggggctgttggtgtgcctccacctgttagtgctgtggtacctgagctgtcagaactggatgttcacaatgaggagaagttgctgagggagctggaggaaatgggttttaggcaggtcgatctcaacaaggaaatcctcaggcagaacaattacaatctggagcagtctgtcgatgacctatgtggcgtcaatgaatgggatcctctccttgcagagctggaagagatgagatgacccag

SEQ ID NO: 12873 - DNA, 1054 bp, Zea Mays
aaaaaaatgcttttcgaatcctaagacttgggcccactgtcagcctcggtagatatcacactcactagtccactcccctcttcactcccgtcggtggattccatgtccaaccgcgtcgccggaggccggaaccatgaagcctgtcagtgtcgccgaacacaacaaccaccagcctcgcctgcactcccccacgccggcgtcggcgaccaagatctcgatccccatctcttcgagcgaggcggcgctgttcgggaagggtaggtacaaggtgtgggccctcgcggccatcgcgctcctagcgctctggtccatgttcgccgcctccgtcacgctgcgcttgtcctccgtcgatctcgccaccacgttcggggacgcgagcgatccgctcatcgacgaacttgatcccctggagatggagcaaagagaaaagctagtgcgccggatgtgggatgtgtacacacgcacagataatcatctatatctgagattgctcgcatgtcaatccataggcctgaggttgagcaatcgtcgaataaggattaggagatcagaggaacaggacagatatttggaagggtggaactggtacgctgaaggtgaagaacgttaaaaatggtgccgtcccatctaaagacggagttgcaaagtctgacccttagcgccgcagcaatttaaggagatgtttggtttgaataatcaatctattttagatgaggtgatgtatcataagttcattccacaaatttggtagaataaatttattcctcatattatgactaattattaacctatgaggaataaaattatggtggatcaacctattctattatttaaaccaaaagtaaggagtaagaagatggactatctcatttctcaaactaaacatctcataagctttataagttgcgttgtctttaatttgttagttttgtttacaacctattctattatttaaaccaaaagtaaggagtaagaagatggactatctcatttctcaaaccaaacatctcataagctttataagttgcgttgtctttaatttgttagttttgtt

SEQ ID NO: 12874 - DNA, 1179 bp, Zea Mays
aaattacatttgcattgttttatattatacctatcattgagggatgggtgacgttgcaactaactagagaacagggatttggcagaggcttcttttctcctagatctgttactggttttctatctgatgtttgttcagctgctgcagatgaagttggcaaaatatacctaacagcagatgagaacgtccaaggagcagtcttcgatttacctgaggaaattgcaaaggacctgcttactatggagctccccccaggaaacacattaaccaaaatttccaagctgcctgcgttgcaagacgatggccctgctactgatagctacggtcgcttttcaaacgaccgaggttccaggaacaacaggcgttctaggggtggcggcgcttcaagaggccggggtggttgggacactgacggcgaggaccgattccgccgtggtggtaggagcttgaggtctgacaatgacagttggtcagatgatgactggtcaggcggtgggagaaaatcaaaccgttcctcatcattcggtagccgctcatcatcctacagcagccgtggctcaccatccttcggtggccgctcatcatccttcggcggtagggagagaagcttcagcggtgcttgtttcaactgcggcgaatccggccaccgcgcaacggactgcccaaacaagtagtaagatggaagagatggcgcggtctccccttgccgcacggggtcgatgatcctgattggccggagcatcaatcaggatgcacgcagagcgaaatcccaaagcccactccacctgctgatcggtgtactacgcccgacacccagccgacgttattactggctacagttttgcgtggtcgtctggcgtcggaaaacagaggaaggttttggcatcctgactacagttactacatcaagcggagttccttcagcttattcatgtcacacggacactactctacactacagggatatgttagtatttctttttttatatgtattttttttgtggtgctcttgatttgaggatctcggtataactgtaaccacacgcactggttacggttgcttctgcttcacaatcgctggcgacggttggattctttgaatgttatagatctgtatgctgtcttgcttcggacgtgaacttccatccctagattagcccccctttcgcttcttttggc

SEQ ID NO: 12875 - DNA, 374 bp, Zea Mays
tgcaaacaccccgtgcacaaccaattccccatcgagacatcggtccgtccgtacgaatccctgcgctcaacgccgcaccgaacctgactcaggcactcaccgctatgggcggcgaccatggcggtgggcacgccggcggtgacttccgccagaaggtatggagcatgacgggcggaccctactgccgcccggtccactggcgccgtaacaccgccatcgccatgttcggcgtcttcctcatctgcattcccatagccatgaagtccgccgagctcgaggatggatcccattatccccgatgatgaggcaagacacattgaaccaatagaagaagttgttgcacctgatgatgatgagaggcagtatcctgagtt

SEQ ID NO: 12876 - DNA, 939 bp, Zea Mays
ctgagtggcctaagtggggcaattagacaaggcaaacacaactaatactggagtatttctaaataagcaataagccccacgaaagcgcacaccccatctaaaaaaggccgcaaggcaaagagaaaacgaaacgcgaagcaaacccttttcggcgtccggcgtccccatccccaccccaccaggccaccacggcgggatgaggccggcgtcggacgcgcaccagtcgcggctgctctacgagctctgcgcgctcctgctgaccgtcctccgggcgtcgcctgacgacggggcggtggcgcggccgctgctgccgcgacatgtgacgcccgccggggtggcgtccatgctgctgggggcgtccatggcgctgatgctctgcggctcggtcaccttcatgctcggcttcttcctcatgccctgggttgtcgggctcggtttcctcttcctcttcgtcggcttcatcaccaacctctccgggatctggagggacatcatcctctggccctccgtcgcgtgctccgcatcggactcacccaaggaggcaccctccccatgcatatgttttccaagccttcatccatgtcgacgtgaagccaagtacaaagtaaggctcccacggaggtccacagaagcagggagttgttggagcagcagccattgccaacctatattttccttcctggacaacccttcttttacatgtgacaccgcagcaagttgccaagttttaaatggttttgtactgtgtctaggaggatacgggatacttgcttgtacatacggaaaagaaggtcgcgtctaaacatcacgtgcagcttataattgtttcagaaatgctgttctttgggctgaacatgaagaaatcccatatgttgtgtgccatcgcgccagtattgctaacctgactatatgttgctgggctccagctttgacttcgag

SEQ ID NO: 12877 - DNA, 141 bp, Zea Mays
atgcaattcagggtgaggcttcctatcactcactgtatcgcagattcacaagaacgctgaaggagcaggggtggagtggacgtggaaacacccaactaccaaccaaccaaccaaccaagcttcgagccgtcgagtcgaact

SEQ ID NO: 12878 - DNA, 148 bp, Zea Mays
gtggaagtccttgtgctccagttgatgctagtctctttccagccattaggtttgatctgcacaagtgttggcacaccatcggcctgccagtagtgaccacgccggtcagtttggccatctcgtcgtggccaagacaacccagcaagag

SEQ ID NO: 12879 - DNA, 2843 bp, Zea Mays
cctcctctgatcgccttccctccccgagaccttcgaggggatgaatcgctagcgtcaggatcgtagaaatatagcctagaacatatactacacataggaggtcaaaatccaccaatccatatagtgctctgcgtgcattagaagcggcagaagcacaatgggcaggtacagcgacgggaaggacagcggcgagaccggcggcggcagctacccgctggtggcggtgtgcatcgacaaggacaagaacagccagaacgccctcaagtacgccaccgagacgctcgcccacaggggccagaccatcgtcctcgtgcacgtcaacaccaaaggcacctcgggtggggtggcggacgccgccgggtacaagcagccgacggacccgcagatgaaggacctcttcctcccattccgctgcttctgcacgcgcaaagacatccactgcaaggacgtggtgctggacgaccacgacgtggccaagtccgtcgtcgagttcgccgcgcacggcgccgtagagaagctcgtcgtcggcgctagcgctaggggcggcttcgtcaggttcaaggcggaaatctgcaacaccatctccaagtccgcgcccgacttctgcaccgtgtacgtcgtctccaagggcggcaaggtgacgtcggtgcggcaggccgtccggcaggcgccggcagtgtcgccgctccggaccatgatccatgggcccaagccggaaccagagccggtgcacgcgcagaaatggacgcctccgcctccgcctccagcggttcaagacaaccacatcatgtcgccgttcgcgaggacgacggggcacagcgccgggtcggcgcggaaggcgttcccggacttctcgctgccggagtcgtcggacatatcgttcatcgggtccgccccccgcaggagcacggagcggtacccgccgcggctgtccagcgggtcggacggcgtggaccagcagcagcagcacagcttcgaggcgtcgcgcacgcccagccggtggggcgactcgttcggcaacgacagcacgtcgcactcccagaccagcacctcctcctggtgctcgcagcctccggacgagatggaggcggagatgaagcggctgcggctggagctgaagcagaccatggacatgtacagcacggcgtgcaaggaggcgctgagcgcgaagcagaaggcgctggagctgcagcgctggaagatggacgaggagcagcggtcgcaggagacgcggctgacggaggagtcggccatggcgctcatcgagcaggagaaggccaaggcgagggcggccatcgaggcggccgaggcgtcgcagcggctggcggacctggaggcgcagaagcggatcagcgcggagatgaaggcgctcaaggaggccgaggagcggctccggtccatggccgccggggcgcgcgagtcggcggtccggtaccgcaggtacaccatcgaggagatcgagatcggcaccgaccgcttcaacgaggcccgcaaggtgggcgagggcgggtacggccccgtgtacaagggccacctggaccacacgccggtggccatcaaggtgctccgccccgacgcggcgcaggggcggtcgcagttccagcaggaggtggaggtgctgagctgcatccgccaccccaacatggtgctcctcctgggcgcctgccccgagtacggctgcctcgtgtacgagtacatggccaacggcagcctggacgactgcctgttccaccgcggcggcggcgggccggtgctcccgtggcagcaccggttccgcatcgcggcggagatcgcgacgggcctcctgttcctgcaccaggccaagccggagccgctggtgcaccgcgacctcaagccgggcaacatcctcctggaccgcaactacgtgagcaagatcagcgacgtcgggctggcgcgcctggtgccggcgtcggtggcggacaacgtgacgcagtgccacatgacgtcggcggcgggcaccttctgctacatcgacccggagtaccagcagacgggcatgctgggggtgaagtcggacgtgtactcgctgggcgtgatgctgctgcagctggtcacggcgcgttcccccatggggctgacgcaccacgtcgggcgcgccctggagcgcggcaccttcgccgacctcctcgacccggccgtccacgactggccaatggacgaggcgcaccgcttcgccgaggtctccctccgctgctgcgagctccggcgcaaggaccgccccgacctcgccaccgtcgtgctccccgagctcaaccgcctgcgcgcgctcggcgaggacagcatggactcctgcacgaccatgagcggccgcggcggcatgcacagctcctcctccgccttccacggcaacccctattcgcagccacgacacgacgcggcgagcgacccgacgcggccgcaccacgtctcgaacgcgagccagtcagccatggctccatggaggtccaactacaactgagagatcgcgagcgcatctgagacaccagcccgtcgccgccatggagcagtgcatgcagcaacggtctcttggtctgctgaatggactgcgagtgctgttaaccaatgcagagctggcagaagcagagcgtgccatggcaatgccaatggtgcagtgcatagtttgttgtggcagtaaagttgtgaccgtgcagtgtgtagtttcttcaaaccaaaacaagaaagaaagaaaaaaaaagaacatgtgaatttgtgtaaacgcagactgaagaatgtcaaagaccaaagatcggtactgacggttcctcccgaaagtcgttctgaaattcgcgtcgcaagatgtgtactgatcatgatgctggact

SEQ ID NO: 12880 - DNA, 747 bp, Zea Mays
gtggaaaactcgacatcttattggctcagggcaaggagtatgtcttcgttgctaactcagacaacttgggtgctatagtcgacatcaagatcctgaaccatctgatcaataaccagaatgaatactgcatggaggttactccaaaaacattggctgatgttaaaggcggtactctcatctcttacgaaggaagagttcagcttttggagattgcccaagtacctgatgagcatttcttgcccaacaggtgggtgaaccttaaagctgtcaagagactagtagaggctgaggcacttaagatggaaattattccaaaccccaaggaagttgatggtgtgaaagtccttcaacttgaaactgcagctggtgcagctattcgtttctttgacaaagcgattggaattaatgttccccgctcaagatttctcccggtgaaggctacatctgatttattgcttgtgcagtctgatctttacaccttggttgatggctttgtcatccgcaatccatccagagcgaatccagctaacccttcgattgagcttggacctgagttcaagaaggttgccaatttccttgctcggttcaagtccatccccagcatcgtcgagcttgacagcttgaaggtttctggtgatgtctggtttggttctggaattacgctcaagggcaaggtgacaatcaccgccaagtctggagtgaagttggaggttccagatggagctgtatttgaaaacaaggatgcca

SEQ ID NO: 12881 - DNA, 1287 bp, Zea Mays
tttcttggctttacaaaatcgacaaagcaaattatttcggttggaagtcatttatcatggctcgtgaaaatgcgctacggattttccaagagaatgaaaacttgaggattgacttagaaaataagaggagagaactgaacttacgagctaaggagcttgaaaaaatgtcagctgagaatgctaacgacaggaagacactcgatgatcagaagcagaagacaaagtatgataatagtgaacttgagctagctagcatagagcaacagagggctgatgcagatgttctgaagctattggctgaccaagagagggaaaaggaagatgtacttgctagaatgcttcagctggaaaaagagctgcatgagaagcaacagcttgagctcgaagtagaacggttgaatggtacactccaagtgatgaaacatctagagggagacgatgacgggggagatatccatgaaaagatggagaagctgagtgaaagatttgagcgggaaaagaagcgcctggaggatttgagtggtgatctggtgacaaaagagcgtgaaagtaatgatgagctacaacaagcccgaaaagaattgataaagggtttggaggaagagctaaatggacggacagctgttgggatcaaaagaatgggggaactcgatgaaaagcctttcctaaatgcatgtaagagaaaatatgggaacaatgaataccaggtcaaagcagcagagctggtcacaaattggcaggaggaactaaagaatccatcctggtatccttttaagatgattcatgttgacggagaggacaaggaaattctggttgacgatgatacgaaactgaagtttctgtggattgagtttggcgatgacgtgtgtaatgcggtgaagacggcattgatggagataaacgagtataacccaagtgggaggtatgttgtgcccgagctgtggaacttcaggaaaggcaggaaggcgacgatgaaggaggtgctcaagtacctgttcagtcagatggacacgacgaccaagcgcaggaggggctgagtaggtgcccttggccatgccgtgaagcccagtcgtgtgctgctcgatcccgtagtggcagtctgtcttgtactgtgtagtgacatctgacgtaataatgttcaggcttgggtatggtttgagctaacgagccatatagtgtgcttggctaggctcgtttacgagctctttagctcgcgagtcaggtgagaacagaaaaaacaatatgtatataataattaatttctagttaattttaaactaatttaac

SEQ ID NO: 12882 - DNA, 1007 bp, Zea Mays
aatgcagcccaggagtggagaaggagggcgtggcactggtacccgattccggttccgggtaggggaggaaggtaagcgaagaagcatccggactctctcgctcgagggtagggcagggcagggcagggcaggcggcgatccgaatccaatcgccggagggaggaagccaccggtggccgcagtgagggcggcggaggtagaggcaaagggatgacgcgcgggaagcagaagatcgacgcgcagcggcgtaacgcggagcgaaaccagaaatccaaggggtctcagctcgaggcccgcgccgtcggcctcaagatcgtctgctccatctgcaaggtacaattggcaaatgaaaaacagctgaccgatcactatggatcaaagcatccaaaggagaaacctccgagcacatcgagcaccgaataaccatggctggtcgtgacgcagaaatatagatcctgcttggctggtattgtgttgtcgtgctgccaatgtgtctccaaactgtatgtggtcaccatggcattgggatgatgcgaaaaaattatgagcgtatccaatgtttgtgtggcttacaagatggtttgtgcccgtgcgttcgctccctaaacggcttcgcccgtgccgcttgaatggtgccgtgcttccgaatgaatgaaatgaaatgacgccccgtttggatcactagaattgaattctattctaataatagtaatttaggcatatatcaaattaagctaattcacttttatacaaacgccccgtgaaggaaattggccggtcgatcccaaacaaggaaggctcctgctcctctgactcggatgttatgccattagccggatgtaattttcttcttaatcctcgaaaatcctagaggtaatttaaattttcaaactagcctccttatataaatgtctcttagttttgtactccttgcgctctaaattaactgcacgtctcgcataacatactagcccttatataatattaatgtttaccaaataaacatt

SEQ ID NO: 12883 - DNA, 834 bp, Zea Mays
caataatcttgtagtgtgaactgcagtcttaagaatgaagcacaaacctcaaaggaattgtccagaagtgtcccgcttatctgcattagctggaaaatataaggtgtttctggtgataggggtggttgagagggcaggatatacactttacaacacggtgctctccttcgatccactgggaaaatacctagggaagcaccgcaaggtcatgcctactgcactagaacgtgtattctgggggtttggagatggatctacaatacctgtctacgatactccgattggaaaaatgggtgctctcatttgctgggaaaacagaatgccacttctcaggacggccatgtatgccaaaggtattgagatatattgtgctcccacggttgattgcatgccaacttggctgtcttctatgacacatatcgcccttgaagggggatgctttgtgctgtcagcgtgccagttctgtcgtagaaagaactaccctccccctcccgagtacacattttgtggcctagaggaagagccatccccggaatccgttgtttgttctggagggagtgtcatcatctcaccattgggaacagtgttggcgggtcccaactacgaaagtgaggcccttctcactgctgacctggaccttggagagattgttcgagccaagtttgattttgacgtggtgggccactactcgcgacctgaggtgctgagtttagtggtgaagagcgatccaaagcccgccgtctctttcatctcagccgctgagtgcagatacgagagatctgggatcgtgacagttcgcgctgtgtgtctgtcggtcacctcgtgaatcggact

SEQ ID NO: 12884 - DNA, 1904 bp, Zea Mays
atgaataaagacatccttgtagcagccgatgaccacgaaggtggtctctgcctgcccaaatcaagcgctcgcctgactcaggagtcaggagtcgggtacaacaaggcgtcatcactatccttttctgctgaatccagaagacaaatacactactgccgtgcccccctcccttctctctctcttcgccgcagcgtcagccgacggcaaaaccctagatctctctccctcttaaaccctctcaacaagtgcgggaggatgtcagagccgtccaaggtaatccacatccgcaacgtcgggcacgagattgccgagtctgatctccttcagctgctgcagccgttcggcatggtctccaagatcgtcatgttgcgtgccaagaaccaagctcttctgcagatggaagacctccatgcttccgtgagcgcgctgcaatattacacttctgttcaacctagcataaggggaaggaatgtatacatgcagttctcatctcaccaagagcttaccactgaccagagctctcatggaaggaattctgatcaggggtccgaacccaaccgaatacttttagttactatccaccatatgatctatcctataacagtggagattctacatcaagtattcaaagcttatggatttgtggagaagattgtcacatttcaaaagtcagctggttttcaagctcttattcagtatcactcgcgccaagaagctgtggaagcatttggttctttgcatggaaggaacatatacgatggttgctgccaactagatattcaatattcaaatctcagtgaactgcaagtccactacaacaacgaccgatctagagatttcacaaatccatcgttgcctacagaacaacgtcctagggcctctcagcaaggttatcttgacccagctaatctctatgccttccaacaagctggagcttcatatgcacagatggggagggttgcaatgattgcggctgcatttggtggaactttacctcatggagtgactggtaccaatgaacggtgcacactcatcgtcagtaatctgaatactgataaaattgatgaggataagcttttcaatctgttttccttgtatggaaacatagtacgaatcaagatactgcgtaacaaaccagatcatgcacttgttgagatggctgatgggttgcaggcagagctagctgtgcattatttgaaggggtctatactatttgggaagaaactggaagttaactactcaaagtatcctaacatcacacctgctcctgacgcccacgactacttaaactcaagcataaaccggttcaacagcaacgtggtcaagaactaccgacattgctgctctccaacgaagatgatccacatttctgccctccctcaagatatctctgaggaagcaatcctgaaccatgtgtctgagcacggcactgttctcaacacgaagctattcgaggtgaatggcaagaggcaggctctcattttgttcaagagcgaagaggaggctaccgaggccctcgtgtcaaagcatgccagcacgctcgagggtaacacgatccggatctctttctcccagatgcagagtatataagccacctcaagggaaagcccctgccgtcctcactcgccccacttcgagctctatttaggaagcatttcagactaagatgtgaatcctgtgcaccattctccaagactgatgctgtctgagctgtacctcccctgaccttgttttttttttcacgcaacactggactttcaccaaaaggtttgtgtttctttccaaatcctgttggttaggatatcatttactccttaatcttcatgtcctgacattctaagttggaaggcctgttaattgcgtgtgaattatattatccttttgcctgtttggcataaaaaaac

SEQ ID NO: 12885 - DNA, 1030 bp, Zea Mays
ccagatcatgtcagcaattcagcatatatcgcaggctcgaatcaaaaagataatgcaagcagatgaggatgttggaaagattgcactagcagttcctgttttagtttcgaggtctcttgaattgtttttacaagatttaattgaccgtacttatgaaattactcttcaaagtggagcaaagacactgaattccttccacctgaagcaatgtgtgaagaggtacagttcttttgatttcctaactgaagttgtcagcaaggtaccagatcttggtggcgctgattcctgtggagatgaaagaggattacctagaagaagaaagtcaaatggcagtgacccagagaatgatgaatcaagatctagtaaaatggccataagaaatgcaaacatcagccccagaggacgtgggaggggtcgaggcagaggacgaggtcggccaccaaccaagagaaaggaggttggttatgtacaatttgaagatgagagcagcatgtttgctgaacaaggtgagcccttgccaggagaggaaacagttcaagagatcaatggcaacgagaccatgcctcaaagcacgcaacctccagtagaggctccgccaacagcccttgcacaagctacaacaagttctaaggcggaagaagcgaacagtgatcatcagtcagattggcctatgccagatgccattggaagcatcggtgtcgtgccatctggttttggacatctgacagtgcaggttgaagatgaggactacgacaatgaggattagtcagggtcatcttctcattgtatgcactaacaggactgttctggtgttgtaaaatgtaaatatagtttgaaatagttgccgcagtttacctgtgattgtctgtcgttttatgcggttatgtagtcctgtgtaactttcgttctccaataattgcttggtagttgcttttttacatgattcaagtgttttgtgacatttaacacagtatttgagcagggattgcctattttaagtatttttgtcttatttcaccgcagtctttga

SEQ ID NO: 12886 - DNA, 2802 bp, Zea Mays
ctcccagtccctgtacctccgtataaaccctagtacctcttatccgttcgtcactccccaagcgtcacaccgaatcaccacagtcgagctcgagcaggaacaagccgtgagcgcctgcccccggtgctcaatatctattccacacctcatggcgccggcgctgagcaggaccctggggccgtcgtcggtggccgcgctgcgcccgagcccgtcgtgccggggtctgttacgggccgcgctcgcgccgcagggcaggggcgcctccgcgaggtgcgcggtaggggtgagatgggaggcagccaggcggaggaggatggccggggtgaggtgcgacgccgccgtcgctgagaagcctgccggcgaggaggagacggccggcgagaagtacgagtaccaggctgaggttacccgcttgatggacttaattgtacacagtttatacagccacaaggaagtatttttacgtgagcttgtaagtaacgcgagtgatgcactggataagctgagattcctcagcgtaactgatccttctgtgttggctgatggcggtgagttggagataaggattaaacccgacctagaggcggggacaatcactatcacagatactggcattggaatgactaaagatgagctcaaagactgtcttggaaccattgcacaaagtggcacctcaaagtttttgaaggctctaaaggagaacaaagaccttggtgcagataatggactcattggtcaattcggtgttgggttctattccgctttccttgttgcagagagggttgtggtgtctactaaaagtccaaaggcagataagcagtatgtgtgggaagcagaggctgacagcagctcgtatgttatcaaggaagaaaatgatcctgagaaaatgctttcacgtggaacagaaattactctttatttgagagatgatgacaaatatgagtttgctgaccctaccaggattcaaggcttagttaagaactactcgcagtttgtctcattccccatatatacatggcaggaaaaatcaagaacagttgaggttgaagaggaggaagaatcaaaaggtgaagaggctactgaagaatcaaaaagtgaagaggctactgagggtgaaaagcagaaaaagaagaaaaccataactgagaagtactgggactgggaattggctaatgaaacgaagcccatatggatgaggaatccaaaggaagttgagaaaactgagtacaatgaattctacaagaagacatttaatgagtttctggatccgcttgcttacactcacttcaccactgagggagaggtggaatttcggagtgttctctatgtcccagggatggcgcctcttagtaatgaggagataatgaatccaaagaccaaaaacatccgattgtatgtcaaaagagtgttcatatcagatgattttgatggcgagctgtttcccagatacttgagctttgtgaaaggtgtagttgactcaaatgatctccctctcaatgtttctcgtgagatccttcaagaaagtagaattgtcagaattatgcgtaagagacttgttaggaagacatttgacatgattcaagagattgccgagaaggatggcaaagaggactacaacaaattctgggagagctttggcaagttcatgaagcttggttgcatcgaggacacaggaaaccacaagcgtcttgcaccattgctgagattctactcttccaaaaacgagacagatttaataagtctggaccagtatgtagaaaacatgcctgaaaaccagaaggcgatctattatatcgctactgatagtctccagagcgcgaagactgctcctttcttggaaaagctggttcagaaagatattgaggttctttacctcattgagccaattgatgaggttgccattcagaatttacagacatacaaagagaagaagtttgtagatattagcaaagaggatttggaattgggtgatgaagatgaggacaaggagaaagaaagcaagcaggagtatactcttctatgcgactggataaagcagcagcttggcgataaagtcgccaaggtccagatctcgaagcgactcagctcttctccatgtgttcttgtttctggtaaatttggctggtcagccaacatggaaaggctcatgaaggcacagacccttggtgacacatcaagcctggagttcatgagaggtagacgaatttttgagatcaaccctgaccatcctatcatcaaggacctgaacgctgcttgcaaaaacgagcctgaaagtactgaagccaagagggcggcagagttgctatacgaggctgcgctgatctccagtgggtatactcctgacagtccagcggagctgggaggcaagatctacgagatgatgaccatggccctcggcgggagatgggggaggttggagacagaggaggctgaagtcatcgccagcatcgacgacgcggactcgtctgaaggtgccacgaccacgacagaggtagtcgagccctctgaggtcaggacagagagcgacccgtggaaggattagatagttctgtatgcaaggattatgccctggtgtggtgtatgagcactggatgtaacgaaagtacgaaccagagccaggatagaggaatgcagcgtttgataagaacactggtgttaaaagtgtagatctctggtttgggttgtgctgataaatttttgtaggctataaccatccaatgaaaaatgccctctgcgctttcgtgcattctttctagctccggtctttgcaaattcgttcgtaattataagtcatacttcggc

SEQ ID NO: 12887 - DNA, 724 bp, Zea Mays
ggtagccgccgcagtgggcaagctctcgagaactaacttatcactgtcacctgatgagagctggttacctgtcgctagcatctttatctgcattctacatattcagctagaagcaagcatcaggagtggtgatatcgagagtttcaagttcatccaaagagcttggaacctcgtctttcctagagctgctaaagagaaggatgcccaccatggaaacaagagagactcaatcggaatgggcgacagacacaataggaggataccgacggcgcatgaatccagggagaggcttcgcaattcagatatcttcaagaggaaacttgatgatcccaacgatgagaagcaaaagaagtcagattggaactgaggctcaaaaggctctttttctcctgcattttcctgaaactacaaaaaatggtatttggggtggggtgaggggtgcatttgtagggagcccacaggtgaaactgaaatggagatgtggctgtctgcggtttcaaatgggtctgaatcgtcagatttttcttctggttccaaacagtagatcttaggtatagctagatttttacattttagtgcgcacaaataacttgtcagccaaagctaatgggacatatcacatatggcgactttgaggcttgtgaagctccgttgtgtactcgtaagaatgaaatcattttgctgtctactcgtatgaatgaaaacatgtttgtttttagtttca

SEQ ID NO: 12888 - DNA, 1042 bp, Zea Mays
atcgcgaaggtcgtttggtcccttgcccatccaatccgagcattcccagtgcgcgaaccaactgttcgtttgcttttcagtcttcgtcctctcttttgcggcccagggccagttgtcgcccgcccgcgtcgtcgtctccgccggccggtcggcctcccaaaccctagcgagccgagcgagagagaaactagacgccatgttcgggtacaggaaggcggacccggacctcgaggccggcgggtcctcgctgctgtacccggggatgacggagagtcccgaactgcggtgggcgttcgtccgcaagatctacgtcatcctcacggtccagctcgccatgacggcagccgtctcggccttcgtcgtcaaggtgcccgccgtctccaattttttcgtctcctccaacgccgggatcgcgctctacatcttcctcatcgtcctgcccttcatcgtgctgtgccctctgcactactaccaccagaagcatccgatcaatctgctgctgctcggcctcttcaccgtcgccatcagcttcgccgtcggcatgacatgcgctttcactagcggaaaaatcattttggaggctgccattcttacagcggtggtggtgaacagcttaactgcttacactttctgggctgcgaagaggggccatgacttcaactttctcggccccttcctaattgctgctatcatggtgctcatggtgttttcactaatccagatctttttcccactgggcaagatctctgtgatgatatatggtggattggcatctcttatcttctgtggctatatcatctatgacacagacaatatcatcaagcgccacacatatgatcaatacatatgggcagctgtttcactctacctcgacgtcatcaacttgttcctgtctctgctgcagctgctgagggcagccgatagctgagctcattaatggagtgtttggtttgaggaatgatatagtccatcatcttctcactcacttttttgtttggtttgtggaatgaagtagcagctaacgccatgaagcagctagagc

SEQ ID NO: 12889 - DNA, 1260 bp, Zea Mays
atgtctggcagtagccctgcaaccgttgcgtttagaaagtgctgccaatttagaaagagctcgcttgcaaagaagctccacccagacacaaataaaggtgatgcggatgcagaacgcaagtttcaagaggttcaacgagcttatgagactttaaaggatgaacaaaaaagatcattatatgatcaggttggccctgatcagtatgagaaaactgcttctggcggaggcggaactggcttcgagggtggttttggaaatccatttgaggatatttttggtggtggcggtggcggtggtggaatgaatgatttctttaggaacattttcggggatagggactttggaggacgagatgttaaggttgcactcgaactatcatttgtggaagcagttcaagggtgcagcaaaacggtcaccttccaaacgtctgtaacatgtgaaatctgtggtggagccggtgtgcctcctggaaccacacctgaaacatgtctatcttgcaggggttcaggatttatattcatgcaaaccgggccattcaggatgcaatcaacctgcacaaaatgtggtggttctgggaaaactgtgaaggaattctgcaaggcatgcagaggaaacaaagttgtgcctggaaggaaatcagtccgccttgacatactgcctggttcggataatgaggacaccataaaggtggttcgatcaggtggagaagacccagatggccgtccaggttcgtgaggatcctgttttccgaagagagaaaggtgatattcatgttgatgctgtcctgaatgtgactcaggcaattttgggagggacagttcaagtcccaactctcagtggagacgttgttctaaagatcaagcccggtactcaacctggtcagaaggtagttctgagaggaaaagggatcaagacaagaaactcaccgtaccacggagatcaatatgtccatttcaatgtcaacatccccgaaaatttgacgtctagacagcgggagctgatcgaggaattcgcgaaggaggagcaaggcgaagacgagaaggacgccaaggcagcagctggagcatcggggggatagccggttttaggagccacagtagtgccttttagctggtatttataccgtgaccgtagacctgtctcaaattcgcagcggaaagatttatagataggtctttgtttcggattttgtagctggaataaatgaataatacgtctagaactgattttctgtctttttcgtaaaaaataaaaacaaat

SEQ ID NO: 12890 - DNA, 2915 bp, Zea Mays
tctaagctccacatgtgtgtttctctggtctttatgcgactggtgatgctgttggtgccccagtgcgtccaagggctccagctccaaaatggttgaaatgccccaccggtgcatcttttggtttcggtggtaaacttgtttctttccatccggtggcacccacccaaggtgcacaaacatctacatctgaggtgcatgtgcacaatttggtgattgagcaaagtctggtgagccgatcaactgaatttgaagctgctattcagaatggtgacaaaagttcgctgcgtgctctgtgtgaaaaaaaatcacaagaatctttatctgacgaggagagagaaacctggggcttcttaagggttatgtttgaggacggggattttgcaaggacaaaattgcttgctcatcttggcttcgaaccacctcaggcaccgcctgcaagttcaactgatgaattgagccaaacattggcagatacacttaatattgatcatgctgcagtaaccgataatgcggatgcccagtttcttattgataatggggatgattttttcaacaatcctcgaccttcagaggctagcttggctgaagaatcagtttctacaaatggtcaacagatagaacaggaagtttctggagattctgtgccatcagatccatcaattgacaaaagcattcaacatgcgttggtggttggagactacaaaggggcagttaaccagtgtcttgcttctaatcgtatggctgatgctttggttatagcccatgccggtggttctgctctctgggaaagcacaagaaaccattatctcaagaacagtatctcgccctacttaaaggttgtctctgctatggtgggcaatgatttaatgagttttgtgagtacctggccactaagttcatggaaggaaactcttgctctgctttgcacatttgcacagaaagaggagtggcatattttgtgtgacacacttgcgtctaggcttctgaatgtcggtgatacactagctgcgaccctctgttatatttgtgctggaaatattgacaaagctgttgaaatatggtcccgcaccttgaaatctgaagatggtgggaagacttatgttgatcttctccaggatttgatggaaaaaaccattacgcttgcccttgctacgggccagaagagatttagcgcgtcactgtctaagcttattgagaactacgctgaattgctggctagtcaaggtcttcttaaaactgcaatggagtatttaaaactgttgggatcagatgaacactcgcatgagctggcaattttgagagatcgaattgcatgttctacagaagagaatgataatgttagttctgtttctgaaagcacgggcactccttccccctatgtcacaaatcaaccttataccaccccagaccattctcagaatgtttaccagcaggtacctcaaccatacaatgtgccaagcaatacatattcagaagcttacccacaacaaggtacaggagcctatggatacaacaatgcatatcaacctcagcaaccagccaatatgtttgttccacctagcacacctcccaacactcagcaacagccaggcccttcacatgtaccagtgcctcagcaaacagtaaagacatttactcctgcgaacccagctggtctaaaaaacccgggacaatatcagcaacctaataccttaggttcccagctttacacgggcgctacgaatcaaccgtattcttctggaccatctgctccttatccaagcggacctccaacaacatttcatcagcctgtagcacctgttcaatatcagagtgctgctccaccagtatcttcttttggtccaaccacccctgtaccaggaacagtccctaaccagatgtttccccattctgctgctactaactcgacttccaggtttatgccatcgaacaatcaaagctttgctccaaggccaggtttaagtcctgtgcagccctcaagtccaacacaggtgcaggcacagccagctcctcctgcacctcccgcgactgtgcagacagctgatacgacaaaagtgtctgctgagctgagacctgttattggtacactaaccagactattcgacgagacgaccaaagccttgggaggatcacaagctactcaagcaaaaaaacgtgaaattgaggacaattcgaggaaaataggggcattattttcaaaactaaatagtggtgacatatctccaaacgtttcatcaaaactcattcagctgtgcagtgcgattgatgctagcgattttgtcaccgcgatgcacctccaggtactcttaacgacaagcgactgggacgagtgcaacttctggcttgcggcattgaagcggatgatcaagacaaggcagaatttcagaatgtaaaccttgtgtggccttctcctgcacccagttatgtacacaccttttcccgctgcttgccagaaatgatagcgtttgcggttcagaggattctccagcacagcggttgttatcatgcagcttttgctctgggcctttgattctgcctgcgagttggtgaaatcgccctgatacttccgtgctcttatatacatttcgataatagttttggtttttctgacatctactgtaaggtgacctgttgctgggttgttggttatctgaatattaattgtaagaggccacttagtctgttatagctggtggatcgcctttatcaaacaatattttttttttttgcactgagaattctgtcagttcggacattcgaagaactctagatggttaatacgagtgacagtggcttgtttttttattggtactgtcaaaaagaaatcaataaacctgtggatttttgaggtccgtattgcctgttggacgtgccgcttgtgctcttcgcagccgttgacttccggctaggatgcc

SEQ ID NO: 12891 - DNA, 1630 bp, Zea Mays
gtagcctttctctatgacacgtgccccttcccccctcttaagctaagggacccttgggcagcccggcatcttctccaccctctgcccctctcgatttcttcttcccatctcccaatccatcgcaacccaaaccctactccaggcagatctccgtctccgccgccgctgccggcgtgagcacagcatcagatccgctgtgatggcgttccgccgcatcctatccaccgcggtgcgccgccgctcggccgtggccgccgcggcggccgggaacgcgcgcgaggcctccacggccgtcgctgcggcgccaggtgtgctcgcccccgatgcgaccgcggtgcgcgctcccgtgatgccgtatgaccgcatcgccgacgccgtcaacgccaggctccggcggctcgagcacccagacccgcgcttcctccgctacgccagccccgtgccgtcccacgcggaccacatggccatccttgcggcgccagagacccgggtcaccacactgcccaacggcctgcgcatcgccacggagtcttccctcgccgcgcgcacggctacggtcggcgtgtggatcgatgcgggcagcaggtacgagaacgaggaggcggtcggcgtcgcgcattttgtcgagcacatgctgttcaagggcacggggaagcgcagcgccgcgcagctggagctggagatcgaggacatgggtggccaccttaatgcgtacacgtcgcgggagcagacgacctactacgccaaggtgcttgacaaggacgtgccccgtgcgatggaggtcctctcggacatcctccagaactctaatctcgaccaggcccgcattgaacgtgagcgcgaagtgatcctacgagagatgggggaggttgagggacagtctgaggaagttatatttgatcatctccatgcaactgcattccaatatacatctcttggcagaccaatcttgggttctgcagagaatgtcaagtcaatcaccaaagaggaccttgagaactacattgcaactcattatacagctcctagaatggttatcacagctgcaggcaatgtgaaacatgaagacattgttgagcaggcaaagaagttgttcaataagctatcaactgaccctacaacaacaaacatgttggtcgctaagcaaccagcctctttcacgggttctgaggttcgaatcattgacgatgacatgccccttgctcaatttgctgttgctttcaatggagcatcatgggtagatcctgattctgttgcactgatggttatgcaatcaatgcttggttcatggaacaagagtgctggtggaggaaagcacatgggttcggagcttgtacagaaagcagcaatcaatgacattgctgagagtgtaatgtcattcaacatgaattacaaggacactggtctttttggtgtctatgctgttgctaaggctgattgcttggatgatttggcttttgcaattatgcatgagatgagcaaattgtcataccgggttacagaggaagatgttatccgtgcacgtaatcagctgaagtcctcaatccaactccaccttgatggttcaactgctgttgtcgaggacattggccgccagcacctactttttttcgttcctctcctgttccag

SEQ ID NO: 12892 - DNA, 563 bp, Zea Mays
catacagaaatcctgggccggctcctttacgcagcgaaagtagtggcagaaaaggaaggtgtagcgagtgggtaccgtgttgtcatcaacaatggtgctgaaggatgccaatctgtctatcatctgcacctgcatgtacttggtggaaggcagatgaagtggccccctggttaaattacgaagggtgacatgtttgatttcctgtacccctctgtgagttgagtttgctgcttgtatgactgttgttgcaaagggagaaagagtggttggtgtactagtatctgcccctgtgatgatggcccctttgagcactcatctctggaagtactgagcttatgcagcattttgctaagggaaaaaaaaacttgtgcagtagattctctgagatattaaacaggttttagaattatcatggcaaacaattagccgtgcacatatttcaggtggctcttatgtttttttttaccgtgctagaagactgataaagcgagagaaaccgtgcagtatacatgatgggaaatgcaacaactctgaatcctgcaagaacaatgattggttgccgc

SEQ ID NO: 12893 - DNA, 3393 bp, Zea Mays
gagctcgctaataccatgagacagcagtctatcatagattccgagcagatgaggcagaacatatctactaatgcaaatgctattggcaattttctagaagtgatgttttcagaagctgaacaagttctaaatgatgttctgaaatctacttcagatctcaaggaactattagccttttctgcagaactacaaaacactggattgagaaggaatcttgcttctgttcaagcaatgtcaaagcaatcaattgatttctttgaagatataaggatacatgtgtctcagctcatgacacttatggagcagaatcaaatggaaaggtcctccaagcttgttaaatttgagaatgagtttaaggaaacttgtgttaaagacgagcaagctgctctgaataagattgctgcaattttatcagagttgaccgccaagaaaactacaatggtttcatcatatatgggacagcttaatgagaggtatagtgaagatcagaagaacctgaaactggagatatccaacctacaacaggtttcagataatggcaaaaatgagtctgtggcttgtgttggagtgatagagagtcagttccaggaggatatgtcatcacatactaaatcaaatgatcaaatggaaggcatcttaaaacaatactcggagaaaggtagtcattttgtatcttactggtcacatatacaatcatctttgcatgatcttgttaagagctcaatcatggagactgacgattttattgaggaaagcagaaacaaaaatgaaaatatattccaggaagggcttctgttttcttcacagaatgatgcagagtttcatggcattacatctgacgtgctgactgtttcaaagaattccctcttactggatcatgaaacttgcaagatggtagagactaacactaccattttctcggatcatctggaactgctgaatgaaaagcacagcgaaggcgtggaatctacaagaaacatgatgagtgattgtcttgaaaaggattacatggctaatagtccggttcgaaaccatccacgggaactactgaccagtgcaaacagcttggaatcaattgacaaactaagagcttctctgccagatctggtggcaaagttcaggctcgagaacaagttgaatgaaatggataaggggaagcaatactcggatcaaaggacacgtgtacatggtaagttcaaaaccataataagtgctattgagcgcagagttctggaggagcaacttggctgggccagactggagcggcaaaagatcctcgctttgtctgcggaggctgacgatgcaatctggcatctggccacgctcgcacggaggaggatgcaagaaagggacgaggccaggaaccaggcgaggatgctgctcgcggacctccaggcaaggaacgcccggatgaaggcggcggttcccggagcatcgtgctccagagtcgcgcggcctgacgcgttcgccgccaccggctacgagcacatccaggcccaggcccaggcccaggcccaggcactcgctcctgccgcgttcgggccgcgggggcagcgtgcccgtgcgggaactggctactactgcgttgcgtcgtccagcggcttcggccacaggagcatcgactcgtctctggacacctgcgccgttcagccgtcgctgcttggcttcgcttcctcgagctcgagccaggagcatttcgaccctgacatgttcttggtggacgtcgcagaatcgccgcaggatgtcgttccggttccggccaccgcagactcaagccaggggagaagctccggctccggctccggcacttatggtcatagtttggcgagcaaaaggccttgcagtgaaaggaagtaataaatcatcagctcaagctgcagcacgtcctgccacgggccatggccatgctgcctaaatcctaggccggtgccatgttagtgcttgctcggtaaaacttataagattattgatgtgttgtggatttgaatggcgcctagtgtcttttactgtgtttggtttaaggtcaacatgggatgaggcgcccctcgattttttagcatcacgccgccaccaaaaactactctggtgtttacctcgttcgtacgtgactctcattcaaacactattgaaactatttaattaactatcaattaactaaggaaaaatcaaccaattagttaagaaaggaaactaacaaacaactatcaattagttaaaaaagggaactaattggaaaaaaacaaataaacctagctgcattatgcaacaggcttactagcattgaataattgtggccgttgttgtatatcgcttatcatggtgtcatgaaattatgtaacctggaaattttgtttttttggcataaaaatcactgtattcagaacaccagtgctctgtccaagacaaagaagcaagagtgctgaaatgagaggataatgagcatgctgacttggctgccttggcttccacccacacactcgataggggaaaagcgagcccttccacggttccaccacccactcgatagtggaaaagtgagctcgagcgtgtccagcagctatggataactgacgatgggggtaacaagcttcacagaactctccctcgagctcagcgctaccctgaacaactgaagccgaaatggcgagcctgcagaacctggtctgctccgtatccaaacaactggctgtgccaaattgcgcggcgactaccaaactgaacagggctcctccctcagctgtggcggcgagctcgatccaaggatctttggacgacaccaaggtcacgaagagacggctagctttgcttggtgctggagcgttagccactggcctactgaggacaagctctgctgcgttcgctgaagaggtgccgaagaattacaagtcgtacgtggacgcgaaagacgggtactcgtacctttatccagctgaatggagggatttcgacttcttgggtcatgattctgcgttcaaagaccgcaacctggcccttcagtgtgttcgtgtggggttcattcctaccgagaaaacagacatccgcgacctaggaccgatggatgaggccatcttcaacctggtaaacaacgtctacgctgccccgaaccaaataccgtcgatttacgacatgcaagagcgcaccgtggacggcaagaactactggacgtttgagtacgatctggaggctccgggctacagcgtttctgcgtttgcgacggtcgccattggaaacgttcggcttaccgcctcactgatcatgagctggacttcccgcggatggcgctttctgcagaacacgttgatggacgtgccctgctccttcgacatatagatcctgttcgtgcggtcctttgtttcttttttttcttttctcttttttctccacaaccttgcg

SEQ ID NO: 12894 - DNA, 1622 bp, Zea Mays
tgctcgcttggtgccacatttggtggaaaggttttgctcctgggtttgtgaatgttacattttggagaaccccagaagctgcggaatcacacgcaaaaatggcacatagtacaggcttggtacaggctatcctatttgaagttgtggacagggataacatcgggggatctgcctatggcggacagaggtccatatgttgtaccccagatcttgctaaactagagggctgcaagcaaggggaagtaatcaggaggccatcctctgatgatccagattggcccttcgtgctagacacacacttcagtgctaatcacctttcagtgaagttagaagatgagccagtgcgcattacaaagacaggcatgtacaacttgttcttcatatcctgtgatccaaaactgagaggccttactatgagtggcaagactatctggaagaatcctggtgggtatctaccgggacgaatggcgcctttgatgaaattttatgttctcatgtcgctggcgtatctgttggtaatgattgtttggtttagccagtacgtaaggttctggagggatatattgccaatacagaattggatcactctaatcattgcacttggtctgtttgagatgacactatggtactttgagtacttgaacttcaacagcagtggtgtgaggccagttggaatcacaacttgggtggtcactgttggagctatcagaaaaacagtttcacgtctactcatcctttctatctcaatgggttatggtgttgttcgtccaactttgggaggtctcacttccaaggtgttgctactcggacttacatatttcctggcgtctgagttgctggacattgcagaaaatgttggaacaattaatgatatatcaggcaaagcaaggcttttcctggtccttcctgatgcatttttggatgcttttctcatactctggattttcacttctctttcccgcacactagagaagctacaggcaaggaggagttctgtgaaattggatatatacagaaagttcacaaatgcattggctgtttctgtgatagcttcagttgcctggattggttatgaggtctatttcaaagcgacagaccccttcagtgagaggtggcagagcgcatggatcataactgccttctgggatgtccttgcgtttgtgttgcttcttgtgatttgttatctgtgggcaccttcccaaagctcgcaaagatatgcatattctggtgaagctgctgacgatgacgatgaggaatctcaatctctgacgaaaggagatggtgaagtagggatggtaaaaattgacaaggacagaaatgctggtgtcagcagtgctttcggcttagaagatgaggctgaggaggacaagcgggaatagccatttcttgttcctgatgtcccctaggtcccagaaacaatcgatattttggagcagcaatattgcaagaatacttctttttcaagttacatgtggttgctgtagaagtgcttggtattgtaaacatgcgaactctatttaaaagaaaaggattaggaattctaatccaaaggcaaaaactaacgtgcaattaagctttacatacaaccgtgctgcaattaaactatcaaaagtcatgttttt

SEQ ID NO: 12895 - DNA, 951 bp, Zea Mays
tcccctctctttttttttgttacctaattcttcctagctactactactcacgcgcgcgtccttgcatgaactcatgacgagtctgcttaagactctagagcggtaccagaggcacatctatgcttcagctgatgctgcagtgccatctagcgatgagatgcagaataactatcaagaatatgtgaagctgaaagcacgagttgaggttttacaacactcgcaaaggaatcttcttggtgaagaactggctccacttagcccaagtgaacttgaccagcttgagagtcaagtagacaagaccttgaagcaaataagatcaagaaagactcaggtgttacttgatgaactttgcgacttaaagagaaaggaacaaatgctgcaagacgctaacagggttctgaaaaggaagctgcacgagtttgaggcagaggctgcttctcccccacaattggcgtggcaaggcggaggcggcatgttgtcccatgaccctccacagccagaacacttcttcgtggctctggagagcaacgcgcctctgcaacctacataccatactatggacatgaaccagcagccagagccagcgccgggcggctgctaccctcctgcgtggatggcttagccagcgctttggttccattgccttgacaagtgccgtgtccttcagagatcgctacgagtcctgctgctgcttttgcgaaccccccctttgctgcctgccatgcttaccgaactgttcaaataagaaataaccacatggtcctatataggttgctgttgtctttatcttctgttgatcacgtcctgctcagatgctttaaacgctatgcaaaatggcttagcgatgcatgctggaatgggctgaactgcttgtgttttgggagtataaatcgcttgggcgcttggcaataagtattattggcatgcctccctctgtttttataaatacaa

SEQ ID NO: 12896 - DNA, 108 bp, Zea Mays
caagaacaagatagagggtgcaaatctgcggctcgcagcggggggaaccatcggagacaggtgacgcggatcgcggcgcgcgctattgctgcctgccggctgccgcct

SEQ ID NO: 12897 - DNA, 1008 bp, Zea Mays
atgagctgcaactatggactttggcaggaaagcgaggaagaggtaactgatgtcgagcaggcagaaaattggttttccttaacttcagctcagcgcatatgtgacatgtttcttgcactagataaggatacaaacagtacactgagcaaacaagaactcaaggaatatgcagatggcacattgactgagattttcattgaaagagtttttgatgagcatgtccgccggagcaaagttggaggtggaaacagtcgcgagatggacttcgaaagctttcttgattttgttttggctctagaaaacaaagatacccctgaaggcttgacatatttatttagatgccttgatcttaatggaagggggttccttacaactgcagacatccacactctatttagagatgtacaccagaaatggattgagggcgggaactacgagctttgcatcgaagatgtgagggatgaaatctgggacatggtgaagcccgcagatcctctcaggatctcgctatcagatcttctttcttgcaagcaaggcgggactatcgccagcatgcttgtagatgtgcgtggcttctgggcccatgacaacagggagaaccttctccaggaagaggaagagcaagtggaagagacatgagttctgttctccagctgccaagtaactgtatccagatccagtgcatcaaaaccgcaacatcctcgggaactgcatgcaccgcggtatcattcactgtaacttagctagtgtattagattcgtcgccacctgtttcccctgaagcttattgtaaagtgtgccatattggtcttttgaggctagcgtggcttggccatgttgacatctgaacactatcccgagggcctgattgaatgctcacagcctctgctgcctgtatgtacatgtaaattgtgccaagcgcgcaatcctgactactctatatgtaaatacattgtgttcagctcgtacatgattgttacgtggtcttgaaagtccgcctcaatttcca

SEQ ID NO: 12898 - DNA, 1384 bp, Zea Mays
ccccgctgctgctggagaaaagagaagggtgggtgggtgggagaagcgaacaaaaactcaagtagctagagagagaaagcaaaggcagcaggctcagctagctccgtgtgagtgagtgagtgaggtatagagagagagagagagtgaggaagggaagccattgttgcagttgcacaggaaagaaagaaggaaggaaggaacgagcgggagtggaaaagttggtggaggaggaggaggaggatgatggaggagagagcgggcgagccgtcggaggtggaggagcagggctgcgcagcgaggccagccaaaagtagattcggcgccgtgggcccgccgtcctccagctgaggaggaaaggcagctatcggcgaggaagggtggtggactggtggtgctagcggtggtggtggtggtggtggtggaggatcccctctcacgtcaagcgctgtgtggaaagcataaaggcgggaggaggaggagagggcgaaggcgcagagcttccccgccgcacaaagcgaaaaggcttcagaaagaagaaagcttccgccttgggagggagagcgaggcatcctgcgtgtgagcgtgcgataaatagcggctccaggtccaggctgagggagagcgcgtctctggtgctctcgcaaccaccgtgcgcttgctttcctcctgctctactccgttgcacacttgtactaggcctggaggtcctgtagctcgcctggtgctgtgtcggagacggtggcaatggcattgcaggagcaggaggcggacggcgacgagggcggggaggaagacgacgaaggcgaggatgagcggatgacgggatacggtgtgggggagctgatatctgcttgtcccgaggcgtgctgtccgcttgcggcggtgtaggagtaagatattggcgcaataggctcaatcatttttttttttgcttctctctttctctttttcccttttcttccttgtttgatgtggcgtgcttgtttttttttttgttgcctttttttgtttctgattgatgagaccaatgttgattatatgatgaagagttgattggtaagaacgctaaggggcctctaagatggacaatataaggtataaaggctcgttaacatagatttatatacgcgctaggtttgagaggcttaacctcgtggcgttttatcgaacacgccttgttgattcggcaaggaacacgggtgggacgctgctgtttgctgatgtggtgttggtcggccaagaaatgtgatgaacacgggtaagacgccgctgtagcattgactgaaacacagacgaacatgtcgaggacatgctactattttgttacgatcttagtatactgtatacccgtttttctgtatccaattcgacgttacaatacaag

SEQ ID NO: 12899 - DNA, 76 bp, Zea Mays
agagaagattgatactcaccaaatgaaagaatacaccgctagaatctgagacagttaaagcatggttaaaattaga

SEQ ID NO: 12900 - DNA, 1764 bp, Zea Mays
ggttcccactctcgtctccagaagaagcgccgcgatgggttccccgccgctgacgccgtaccgccgatgggccactccactgcactccagcagaagcttgaggccaccacacagttcaggaagctgcgctccatagtgggacaagaggcgagagggcacccgtccagatcattgccccaccagttgaggccgacgttctccaagcccaagcacaggtagatgagcacggccatgaacgccaggccagcgtcgagcgcgccagagagcaggtagttgtggcgctcccaccagtgacgccggtacctgtagaccacgtaccccgacaggaacccggcaatgatccacgtggtgtagttgacggcggtggccggcggcatcatgccggtggagccgatgagcacgggcatgttgacgagcaggatccagctctggctcgggaacacccggtgcgcgagccacacgaggaggggcgcgacggcgccgcccaggaagaaccagttgaccgccgagtaggtgccgaggtcgccgaagatcctgcgcgggccgatgaggccccagatgacggacgcgtcgtagaacacgtggtccatggggcacgtccaggggctgtcggcggggagcagctccgtgctgcagatgttggggacgctgtccatgagccaccacgccgtcccgatgtacacgagcgccgcgatcagcgtccccaccacctgcgccatgaacatggtcctcggcgggatcttcatgtagtggcccagcttgaagtcttgcaggaaggccagcgcctgcgtcatgctgatgtagccgtacaccttgaagcacatgttggcgacgggacggcccgggtacagtgctaatataagagatcgtcggggtgggtacctggttcgtcgtcgctgtgatgatccctatcgggagggtgaagaagaaggcgatggcgcaggcgagcaggacgccccaccagggcagctggagctgctcgatgtagtactcgcaggcgaatatggtgacggcgacgttggcgacgaggatgcagatgaaccaccactcggggacctgcctgtacctcctcatcagcctcgtgtgcacgtccaccttcttctcttggaacgctgacctgctcagctgccagatctcgctcccgtggaagaggaagacgtgcacaaccgtggcggtgagggacgcgaagccgaccccgtaggtgacggcgaagaaggtgctgaggtagagcgggccgttgcgctcgtatgcctcggtgtcgaaccggaagttggagtccacgatgctggagatgttgtacgtctgcccggcggcggtgaagagcccgtcggagaagatggggaagctgcgcgccccgtacaggccgagccagtagtacgcggcgggcgtgatgacgtacatgatgaggacgaagccggcggccacgttggcggtggcgaaccaggggctggcgagcgggcttccgaggtaggaggagatggtggaccagtcgagccccaccgcgcccacgcccagcccgctcagccccgaccccagctgctgcgccaccacggagcgcgggaacgcccagcagagccacgacagggaggtgagcatctggaacaggtagcccgggaagacgtagtaggcgaagctgcagacgaatgccaccaggaagaactggttccgcgtcatgcctcccttcacgcgccgctccttctcgtggagcgccctggtgatccagcacacacgtgcggagcggaggccagtgtgtttgtgtcaact

SEQ ID NO: 12901 - DNA, 139 bp, Zea Mays
gtcctggaactcctggagaaccgcctcgacgccttcttatttacctgagcatagattgcaccaaaggcaaccttcaccaaacagatgctcagggtcttcgatctcgtagaactcgaagagttcgatcacttggtcgcca

SEQ ID NO: 12902 - DNA, 2186 bp, Zea Mays
cagcttgctgcggattcgcttgcagttagagaccgacgtgtttgagggcgtttacatctttaagctcaaagagaaaggattatgaaaatggcgcacttgatcactaattgcagctttcagacattctcgagttctcctaattactgccgcaatattgggcaactacagaactcaaaatcttcaaatctgtccctcaaatcttgttccaggagacaaaagaagtcatatgttacctgtgctagcgctgccgtacaaggacagacacaaacacctcttactggtagccagcaagcttatgagcattcatcctccaaacctaaaaaggtaatggttattggtggagatggatactgtgggtgggcaacagcacttcatctctcaaacaaaggttatgaggttgcgattgttgataatcttgtccgccgtgcttttgataaccaactcggtcttgattcccttacccccataacctccatccagaatcgtgtccgtagatggaagtctctcactgctaagacaatccagctctttatcggtgacatatgtgattttgaattcctctcagaagccttcaagtcttttgagccggatgccgctgtccactttggcgagcaaagatccgcgccatactctatgattgatcgttcgcgggcagtctacacacagcataacaatgtcattgggacacttaatgtcttgtttgccataaaggaatacagtgaagagtgccatcttgttaagctaggaactatgggtgagtatggaacaccaaacattgacatcgaagaggggtttatcactattactcacaatggaagaacagacaccttgccttatccaaaacaagccagctctttctatcatctgagcaaagtgcatgattcccacaacatagcatttacatgcaaggcttggggtataagggccactgatcttaaccaaggtgtggtctatggtgtcagaacagatgaaactgcaatgcacgaagagctatctaacagatttgattacgatggggtctttgggaccgcactaaataggttctgtgttcaggctgctgttgggcatccacttacagtttatggaaaaggtggtcagacccggggatatctggacatcagagacactgtacagtgcgtggagctagcaatagccaacccagccaaacctggcgagttcagagtcttcaaccagttcaccgagcagttctctgtcaatgagctagccaaactggtgactgcggcaggagcgaagcttgggctagaagtggagaccaaatcgatacccaacccacgagtcgaggctgaggagcactactacaacgccaagcacacgaagcttattgagctcggcctggtgccccacctgctctcggactccctgctcgactcgcttctcaattttgccattcaatacaaggatcgggtcgacacggcacagatcatgcccagtgtgtcgtggaagaagatgggtgccaagccacggacagtctctgtttagagggtgattcaacttcccctgggttataatatcaaccatggcattgacattattgacatatgtaatgtaataattatgcacgttagtatgatttgctaggtagtgaggtgtttattacgatattaaattatattgttgcccgtgcaactcaagagttcatgtcagttgattctgctgctcactcgagccgccttgaggtcttacaatgctcctgagggttaagctgtcacctgtcacatgttgccatttcgctgatcgaactctggtggaacagatatagatcaagatcttgcaagaattgttattagttttttcggataatggaaattgtattccagcttttttgcattgtcatgcagacagccaacacgaaaacaaaacactaatcagaacatatcaccaacatcaaagaagagagaaacactggttttaaacaatatgaatttaaggagcttcaattcttgcattagatcgccatccatggcctgcgaatatgggcaaatggggaaatagtgtttctagctttagcaaacaatgaaccatgtcacacccggatttaaggacaaatttaggcgcgaatcaaatgtgtgttagaatcaaatctcacacatatgatgacccatgttacagaaacgaatgccacatctttaatatataatagagttttgtacaaaatagtaaaataa

SEQ ID NO: 12903 - DNA, 78 bp, Zea Mays
tgcgcgtagtcgtatatcgataactagtatttccgtatgaacttgtacaacgcctcgccgctaggtatttaattcgct

SEQ ID NO: 12904 - DNA, 69 bp, Zea Mays
ttccctcaggataccgggagcccacacgagttctatcgggtaaagccaatgattagaggcattgggggc

SEQ ID NO: 12905 - DNA, 661 bp, Zea Mays
acgacggcccggacccaggaggcccagatcctggtatgcgcttacctgcccctcctctctctgtctctctcgtggttctactgaacgagcactcgcctgcgctcttctctctctcgtggcgacgactgggtgactgccggcgccccaggcctgaggctccatcttcgggcccttcactggctacgagcaccacctggtgtactgggtccgatccatctgagtctgatcttttgtttctcgggttcctggcagaggattatggattggctggggcagaagcgcgcggagatgctgatgcaggtgctgctggtggcgtctgctgtggcggcgttcctggtgggctacgtgcgcgcggacttccagctcatgctgctcgtctacgccggcggcgtcgtgctcacagcgctcgtcaccgtccccaactggcccttcttcaaccgtaacccgcttaagtggctcgacgctgccgaggccgagcgccacccgcgcccccaggtcagcgccggtgcggcagcagggggaaagaagaagtccgggaagaacaagtaatcgatctttcggagcgatatgtgttctttgtcgatttgactcaaacctatttaaagttttatttcgcagaactaatcaatgataaaagagctagaggtgttcgacaaaaaaa

SEQ ID NO: 12906 - DNA, 1649 bp, Zea Mays
catgcccagtcggttgcggaccagcacatccgctcgctcataatcgttgtcctctacatcgattccgacaactacacccactgtcgtgagtagatgctgctcactcttggcaacatcaacatgggaaataaggactttgtatacatcaggatcatcgagtccaaaatgtgttgttactcttatgttggagattgctccaagtttttggggcagatggaagagaaggcactcaaattttgacaaaagcatcccttttgctttgctcagccaagtagcaggtataagagagtacttcgcagccaatccagccttgacatctgagctgccttcaacagtagtgaagtcaaaagcatctgaaactttgatcatccagagtgaacatgaagattctgaacttggtgatgaattttatgatgcacttactagaggtgaatccttcgaagatggggatagtgatgatgatgatgatgccacaactccaaaggctagaaaagtaaagttgaagaatgtgtcatgggctattgcaggcttggctttaaagacaactaaagctttggttgagacaagtgaattggttacaaattctagtccagttactgttgaccccagccacttccatggcacccttcatagagcgaaaactcaaaatgatcaaaattcttggagtgcacctggtggggagaagtttatgatcagagggaagacttacttaacagattatcacaaggttgttggcggtgatccacttctagagctacttgcggtcgattggttcaaagttaatgaacgctttgattcagttgccttacatcccaaaagccttgtgcaatcagaagctgcaaagaaacttcctttcatattggttataaatttgcaggtgccagcgaaaccaaattataacttggttatgtactacgctgcagagagaccagtgaacaaagattctttgttgggtagattcattgatggaactgatgcataccgagatgccagatttaaacttataccaagcattgttgagggttattggatggttaagcgtgctgtaggaacaaaagcttgccttctgggcaaagcagtaacgtgcaattatcttcgccaggataactttctggagatagatgttgacatcggttcatcatccgttgcccggagcattattggtctagtattgggatatgtcacaagcatagttgttgatcttgctattcttattgaggccaaggaagagaaagagctccccgagtacattctgggcactgttcgtctgaaccgtgtgaatcccgacagtgctgtatcaatctaattacgtttctagccgatctatgcaaatttactcttatcctcttttattctgagagaaacagcgtggcattttgaaaatgtgaaatagcattactatttgctgatccccaatcgagggtaacatatgtaaattggcatgaggcatgactacgtgacgcctttcgtaaatagaataaatcaatggttatgtaatattaatatcccatatacgcgtgtcataatctatgtggcttaaaagtggcatcaagtcatctagtttcctgtgttaacttcttattccttaggtagtcagacattaacagtgtgtttggtttgaggaatgaagtgatccatctttttctcac

SEQ ID NO: 12907 - DNA, 410 bp, Zea Mays
ttgggtattctgtaatattatgcactcagtggctcaatagaatcactggctgaaggacttctttgcccaattttaggggatggggaaggcctacgatttgacaacagcagtggatgagttccctgccttcgagtcttcgacggccgaaaaggaattgtgtgaaccttgaacgagctggaacaccgccattgttactctctctacacgcgatgtagctaatcaagctgttatctcatttctacatctgtcgacgtttcatcttgtgggttgtgcataaacatgttgagaacatgtagcaaatatgatgaagttgcttgtttcatcatttggtcggaagcttaaagcagtaccgcagaaaaatgaaacaatctttttcagcagtaaataaagatgggaaaagggaagtttgc

SEQ ID NO: 12908 - DNA, 1713 bp, Zea Mays
cacacacttcatcgtggagatatggtggggaacaatactgttgcttccctcttctactattctttgctcatcatctgcgccgctgcttggcacgcggatgcgtcccaagcggatcgactgagagaattcatcaggtctaggaggaacagtcctagtgaggctgctgataagggcacgtttgaggttgccaacatagggcacagcgtagctagcagcctcctgagcacaagcagctactccgacagtgaacagagcgccctgaaggcagctgacaagatcactgcgctgccggggcaaccggacggcggcgtcgacttcgaccagtacgccgggtacgtgactgtcgacgagaagaatggccgggcactcttctactacttggtggaggcaccacaggatgcctcggcaaagccgctcctcctgtggcttaacggagggcccggatgctcatcgcttggctacggagcaatgcaagagctcggtccgttccgcgtaaacagcgacaacaaaacgctgagcagaaacaaggcggcttggaataacgtggctaatgtgatcttcttggagtcgccggcgggtgttggattctcctactccaacacatcctccgactacggcctcagcggagaccgaaggacagctgctgatgcgtacttgtttttggctaactggctggagcgctttcctgaatacaaaagccgtccgttctacatctccggggagagctacgccggacactacgtacccgaacttgctgccaccatcttaacccagaattcctacaacagcaggacggccataaacctccggggcatcttggttggaaatccacttctggattcgtatatgaacttgaagggtgcagttgcctactactggagccatgggttgatgtcggacgaggtctttgacaacataaccaggcactgcaagtatgacagttcagatggtgtggcatgcagtggcgctttggaggcggtagatcctggacagattgatccttacaacgtatatgctccgatctgtgttgatgcggccaacggagcatactaccccactggctacctacctggatatgatccatgcagcgattactacacctattcctacctcaatgacccagcagtgcagaatgctttccacgctaggacgacaagttggtcagcgtgcgcgaacttgaactggacggacgcaccgatttccatggtgccaacagtcgcagggctgattgagaagaagctgcctgtttggatttttagtggcgattttgattccgtgtgcccacttcctgctacgaggttttccatccatgatcttaacctgcacgtcaccactccatggcgcccgtggacagtaaacatggaggtcggaggatatgttcaacaataccagggaggattcacgtttgcctctgtcagaggagctggtcatatggttccgtcttcccaggctgatagagcattagtattattggactcctttctgaaaggggtgctcccaccatacgtacaggagcagtaataattcctaaatatgtagagtgtcttgtcaatggcaaactcaataaaaactatccgtttttgtattacttgaattgatgttggttttgcattagctggtttgtggttataattaaaaggtccatctttccccttagggaccgtttgtatccgctcgttttagagaaattgaaatctatacttaacagaggag

SEQ ID NO: 12909 - DNA, 159 bp, Zea Mays
agtataaataacgacggacacgcaagaccgatccctctatttgttcgcacgtctctcgtgtcacctcccccgtttgttaccccgagaaggcaagccgaggcggagccggaacgggaaggcgccgaagcgttcgcggtcgcggcttcgcgatttcgggtt

SEQ ID NO: 12910 - DNA, 122 bp, Zea Mays
ctggagttgaggaacggtggccggcgttgagggaggtagcgtccaatggccacactggtcggagctcgaggaagcacatggaggagctccattcggcttggggcggagctgctgcgctaggg

SEQ ID NO: 12911 - DNA, 3547 bp, Zea Mays
cggatagtagcgccggcaagtcgtcgtgctgtgctccctatactctgcaagcaatggatcgacgcagctggccttggaagaagaaatcatctgacaaatcatcaaatgcggatgtgctgcagaattttaatcatgcagaacaggaagataaagctccaaaatttgtgcaaatttcacctgaaacatatgcacatcttaccgagtcagaggaaaaagtaaaaaaattagaagaaaacgtgaaggtcttgaatgaaaaactctctgcagcgcaatctgagatcacaactaaagatgctcttgtgaagcagcatgcaaaagttgctgaagaagctgtatcaggttgggagaaagctgaagcagaggcctccgcgctcaagcttcagctagaaactgttacattatctaagctagccgctgaagaaagagctgcacatctggatggtgcattgaaagaatgcatgaagcaagtaagggctgttaaggaagaaggtgagcagaagctacatgatgtagtctttgcaaaaaccaaacagtgggagaagataaaggccgagttagaagcaaaattacttgaatttgaacaggaactcataagggctggtgctgagaatgatgcactcacaagagcacttcaagaacgggcagaactgttgatgaaaattgatgaggaaaaagctcaagcagaagctgagattgaaatcttaaagagcacaatccaatcaggcgaaagggaaataaattcacttaaatacgaattgcatgttgtctccaaagagcttgaaatccgcaatgaagaaaagaacatgagtgtgcgctcagctgatgtagcaactaaacagcaccaggaagatgtcaagaaaatatcaaaacttgaagctgaatgccaaagattacgtggccttgttcgaaagaagttacctggtcctgcagcactagctcaaatgaaaatggaggtggagagcttgggtagagagtatggagaccacagagtacgacgatctcctgcaaagaattctagtttccatcggcccatgtctcctatgtctcctgttcctgattacgcaatcgagaacatacagtacatgcagagagagaatgagtttctgactgctcgtttattaacaatggaagaagaaaccaagatgcttaaagaggcattgacaaagcgaaacagtgagctgcaatcttcaagaagcatgtatgctaagacagcaggaaagctccgaagctttgaagttcatatgttgactggaaaccaacataagagtccaactatgaacatggatattcattttgatggtgcactgagccaaaatggaagcaacccacctagcatgacttccatgtctgaagatggggttgatgatgaaggaagttgtacagaatcttgggccaacactctggtgtctgagctctctcagttcaaaaaagagaaggctgccaagagcagtgcgacagaaagctccaataggttggaactcatggatgacttcttagagatggagagattagcatgtctgtcttctgatgttaatggcaatggcagcactattgacaaaatgaagatagatgaagttggggctactttgtctgactttactgaaagagatggtgttaaagatttgcagtcagcttcaccaatgacagaaagtccatctaataaacagcgtttgtctgagaaatcttcgctttcgaaattccagtcaagaatatctttattactggattctgaatcagcagagaataatgctgaggtacttgatagtatcagaaacattctaaaggatattgaagatgaggcagattcggtgaacacaaatggaactcatcattcaggcaggaccttaagtttagatagcaaatgtgccatcgatcaagaacttaagaatgccatattgaagattcaagactttgttaagttacttgatcaagaagtctccaagtttcaaggccagtcatctgattataatgggctaagtgagaaaacacaacagttctctgcattggttgacaaagttctgtcaaacgatgatgtcctaaatgatattgtcatggcactgtctgttatcttgtcagaaactagccagattaagttgacactgttgagagacaacaacaatgaagcagaaagtaataacttagattgtgttgataaagtgactctacttgaaaataaggtgcagcctgagccagtaaaagacaatggttctggtctctgcccactgttgcctcattcatcttctgatcctgagtttgaggggcctactgatgctggatttgatgttaaggctgcagtgaaggtatgctcgccggaggaatatgaacaacttaaatctgagaggacaaatttggagggagagttagcaaagtgcaacaaaataatagaagaaacaaaggttagattaagtgatatggagaaaaacctggaaaacctcacatctaagttggctgacagtgagaaatcaaatagcttgagtgagacacagttgaagtgtatggctgaatcctacaagtcacttgaatcaaggaaacttgaattagaaaatgagatagaagtgctaaggtccaaaatagatgctttaacagctgaactctctgatgaaaggcaaagtcatcaggacgacttagttaaatacagagatctcgaggagaagatggaaaggtatgagatggagaggagttcaatgcttgtggatggggacccagacaccaagtcaaagcaggataaagagataggggctgcagcagagaaactggcagagtgccaggagaccatattgattcttggccgtcagctgcaagctatgcgtcctccagccgagtcactcggctcttcacctaatcggcaaggcacggagaactttctacaggacgtggtaggaacaaccgcaggagaatattcccagaagccttcaggccaacctgatacagaccaggatatgcttgggacaggaaatgtctctccggtcaatggatacaagacacacatgatcccttctgatgcagacggaagccctttcctttctccgaacagctccaagcgcccgaagcatcgatcgagatcctcttcgtcttcgtcattcaccaaccaccagttgccagacaaacagagccgaggattcagtcggttctttgcgaagaccaaagagtgaaacttctcccgattgggtgggatggtggaggacatgaatttctgtagagcttattgaggcaagccttcgtgtgcgttctctcaggtcaggtgatgctttgggttgctggaataatactcagcttgcagtcgagcgggtcgtgggccagagtgttgcggaatgtatgttatcagtctcttctgctagagcttttctgggttgctgtgtgtttgaaacctcactgtacatgtgcttacatgcatgaaggagcatggttgttggtttgtgtttaatcttcttgtgaattagcatgtgtattttccttgtactggtttcatgtacagttaacctgcgctaatttcaagggcattgatatacgtattatattgtgttgatcagtttatacagtgttcctt

SEQ ID NO: 12912 - DNA, 79 bp, Zea Mays
gtggactcttgggtgtggcggccttggttcgtcatcctccttgtcttgaacatttgcatctcccccttgatcattgtcg

SEQ ID NO: 12913 - DNA, 104 bp, Zea Mays
gagtagcagcatgacgctcagtaggatggtcaaccatgtgcactttatcttcgttgtccgagtcccacaacatcgcagggacagtgcctacgcctccacccagc

SEQ ID NO: 12914 - DNA, 295 bp, Zea Mays
ggcaccgcccggcccgcgtccgcgtccgcgtccgcgcggcggacacctgtaggaaggcgctcccgagcagcccgacccgagccggcggtgccgcgcccgggatagcacgaatgcaacaactccccaccgacatggctagctctctctctctctctctctctgagagaccgggtgtgtgcgtacctctggtgtgtgcgtgtgattgtgtgaaggagccgaagcgaatgagaaaactagaacgggaggaagagggagaagaagggggaaaagcgaggcgagatgagtcggaaataag

SEQ ID NO: 12915 - DNA, 490 bp, Zea Mays
cccctgctgcctccctggagctgcgtttggttcccggggcattccgatgcgaccgcactgagaattcttctcgagggagcaggcgaggaaggatcctgacaacttcttcaatttgagaatgctcacatgtcctgcaaccgagatggtggatggttcaagggtgctttactttgagcaggcattttggagatctccagaaaagccttttagacaaagattctacatggtaaagccctgtccgaaggagatgaaatgcgatgttgagttgagttcatatgcaattagggatgctgaagagtacaagaatttctgtgaccgtcaaaaggatcagaggccacaggcagaagaagtaattgcagtatgtcatttcgaacacaatcttacttttcagactgtttgtttctgaagtttcccccttcatttacttatgcctgttaatggctaaactctggagggacagctgcaaatgaaatgaaggaaatatttacaa

SEQ ID NO: 12916 - DNA, 806 bp, Zea Mays
ccgccgccagccgaaaccctacggccgccgccagcatcaagctccttgctccccgaccaaaccctacctgtacccgccgccgccgccgcagcagccatgccgcccaaattggacccctctcaggtggtggaggtcttcgtccgcgtgacgggaggcgaggtcggcgcggcgtcgtcgctggcccccaagatcggcccgctcggtctctccccgaagaagatcggtgaggacatcgccaaggagaccgccaaggactggaagggcctccgcgtcaccgtcaagctcaccgtgcagaaccggcaggccaaggtctccgtcgtcccctccgccgcggcgctcgtcatcaaggcgctcaaggaacccgagagggacaggaagaaggtcaagaacatcaagcacagcggcaacatcagcctcgacgacgtcatcgagatcgccaagaccatgcggaacaggtccatggccaaggagttggccgggaccgtcaaggagttgcagcaggagatcgatgatggtgaggtcgagatcccctcagcttaaaggctatacaactagaaatcatcggacactattaaagtggtgttttgctccaaatgcagttcctgcacctcaatcgcctattattgtctgctttagttccttcaagtcttgtgagagacctaatcagtaccttgtgccttataaaattacatcttccgattctctgtcttgtgatttggatggatgcgatcatcactggcgttcgtaccgtgtactcccttcgaacttatataattttagtaaggtttaaactgtccacaaaagaa

SEQ ID NO: 12917 - DNA, 641 bp, Zea Mays
cgggacctggagggtgcttttggcaaggatgctttgtttggatttggcctcacaacatattcgttgcttggactaggagtgcttggagggccactgtctcttccttggggtttgtacgtgctaatatgtcagagaacacccgagaaaccatgcttgaacgacgtgagcgatgttggaagttggaggagggcggccttgatagcttcagtatttcttgttgttttgacgctcattccgttgtgggatgaacttgcggaggaactaggtgtagggcttgtttcttcgttctgagatgcggtgcttaccgatagaattaggccgtgatgtagttcagttttgtgttgaaatgtagcttcccacggtggaattgttgtaaaggtatgtggaatttccggattaggtgagcaatgatatcgcttatgcgagtgtaatgaaattgtgccaagtatagacgctaacgattaccaattacatacatgtatgctcacttaaccatacagttttgtgttgtaaactagaatgtatggatttataaaaatgagaataggcatgtcaagtccaggacttgaaatctggctaggcaggttatgctgaatcagacgcggcacttgataaagaaatattttcacagtttactctag

SEQ ID NO: 12918 - DNA, 1275 bp, Zea Mays
acgctgcagatgggccgaatcagatggcccaaccatgcctcgaagcacacatatgggccacaccgcatcgtgtgcgtccatccacttttgagtgcctgctgaccgcatgatcgaacctggaaaccctcgagtcgtatataggtagtccgctgccccaaagtgctttctcccgcagagccgccgacaacgctctctaccgtccgagaccccaagcaccagcgcggcggcgggggcggcggcgaccatggctgtcggaaagaacaagaggatctccaagggaaagaagggtggcaagaaaaagaccgtcgaccctttctctaagaaggattggtatgacatcaaggcaccgtcggtgttcagtgtgcgcaacatcgggaagactctcgtatccaggacacagggtaccaggagtctttgaggtttgcctagctgatcttcagggcgacgaggatcaagcttacaggaaaatcaggctccgtgctgaagatgtgcagggcaggaatgtgctcacaaacttttggggcatgaattttaccactgataaactcagatccctagtgaagaagtggcagacattaatcgaagcccatgttgatgtcaagacaaccgacaactacatgttgcgtttgttctgcatcggcttcaccaagaggcgcccaaaccaagtcaagagaacctgctatgctcaggcatcccagatccgtcagatccgccgtaagatggttgagattatgatcaaccaggcttctacatgtgacctgaaagaacttgtttcgaagttcattccagaagttattggtaaggagattgagaagtctacctccagcatcttcccacttcaaaacgtcttcatccgcaaggtgaagatactcaaggcccccaagttcgatcttgggaaactcatggaggttcatggcgactacaaagaggatgttggtgtgaagcttgagaggcctgtcgagggagatgaggctgggcaggaggttgctgctgccgagtagtttgtttgctacttctgtatctaggcgagtctggacatgaggttgcttatgacgtgaacttatagagttgtcttggctacgtgttttcatctggccctaagattttgtcttgaaacaagtttaaaattaagattactcgtggcgatcttctgtgttcgagtactgatgtactaagttcctttgcatcctcatttttgtttggtcatcgataatttactttctcattcatatgagatgctgttctctgcttatttattgttagctgacactggcg

SEQ ID NO: 12919 - DNA, 999 bp, Zea Mays
aatgttcttcttccctggttagtactagctagtagtcatcgtggtcgtccctctctctctccccttccctccactactatatataccaaacaaattcgttcggaggggagaccggcaggccatggctcgacgccgcccttgagtcctgcccccaagatgacgatgatccccctcgccggcttcaccgccctatctgccgccggcctcctgctcatcttctcctccttcctgctgcaaactcaaggaggagccagaagcagcgaggaggagcggtacgtgccggtgcgcagggtggtgtaccggtccatgacaccggcggcggcgagtgcggcgacgacggcagaggcagcggcagcggcggcatcgtacgagccgttcgaggtgtgcgaggggtgccggtgctgcgcgccgtcgtcgtcgtcgtccaacggcagcagcagctgcgtggacacgagctgctgctacgccatcgactgcgacctccccggcaagcccttcggcacctgcgccttcaccccgcaaacctgcggctgcggcagcaactgcacccagccctcgtcctgatgatgactcatctttcctgcaacttggctacttcttctggatcatccatcgtcttacgttacgttacgacctgatgacagaggatgacatgattagctagcacgcagattagatgactcacgtgtactcgatcatgatggatagattatccagttaattcccagatagagagttctgcatgaagataataatacaatgaataataatgtgtgttcgtttcagaggttgcgattgctgctgttgttcgtttcagagaattgtgactgcagttggttccattttcagagtcggcggctgctgttggcttgactcttgcgacacaccaaacttgtactgtcagggtcggcggcctaacctgttgtcgtcgtatacctactgtacgttagcttgagaagcttgtttgcttggggaatgcaaaacctactccagttgaat

SEQ ID NO: 12920 - DNA, 1109 bp, Zea Mays
gctctgcatgccggcctttagccacttgccgcccctgagtctgcctcccaacgtaattcgctgtcacacacacccaacgctctcccctgagcctgcctcccgatgccacctcccttgtttaccgacccaacgcgtggagttttcaggggattatggaatgcttaacaacaagttttccaagaaatgttggaaaagagtacatctgttcaagcaagttggtgtccggaaaccaatggatccccaaaaggatttgctgctacgtctcttgttcgacaaactccagtcgatgccacaagttcactgatgtggcatgccccatgagcccagttattcgaaaaaggttacgctggagatgctttgctgcaagtttgaacttagaagatggccctgcaccctctgactcgacgtcatcttcatcagagcagactactgatgctgatggaactactaatggtgatgtatctgaaaatctgctttctcgaaagccaagctctgatgagttaaaggctcttttggctgattcggaacgaagtaggcttttgagaagactgagtgaagcaaatcaatataaccgattcctcaagagacagttgcaaataaaggatgatgcagtcgtaaaattcaaaggtgaacttgctgttttggaactagaaatgcaggctctggttggcctagctgaagaggttgctaattttgatgttccgttagggtctaggaagataaacggaaaatatattcaatctcatcttctctccagattagaagctgtccatgataagattatggaacaggtaaagagtgttgacgctttaaagacccaagaaattcctgtctactggattggcatggctgagaatgtgcagatcatgggttcattcgacggatggtcacagggcgaggcgatgtccatggagtattcaggtgactacggaagattctctgcaactctgaagctaagacctggaaggtacgagatcaagtttttggttgatggggaatggagattgtcgcctgaatatcccactgctggagatggactgacgcagaacaacattcttgttgtggagagctcccatggacctcagctacctcgtgcaccattagcctga

SEQ ID NO: 12921 - DNA, 974 bp, Zea Mays
caggggatgcggtttgccgctcctcactgacggctgcgttgattattgcggcgaaagtgctgaaggatctgaaatatgctgacactcatgaatgggtgaaggttgagggcgattcagcaaccgtggggattactgaccatgcccaggatcatctgggtgatgttgtctacgtggagctgccagaagttggcgtcagtgtatcccaggggaagaacttcggtgctgtcgagagcgtgaaggcgaccagtgatatcaattcaccagtgtccggagaggtggttgaggtgaaccggaagctaagcgaggagcctgggttggtgaacgcaagcccgtacgagaaggggtggattatcaaggtcaagctcagcgattcaggcgagctcagttcgctcatggatggtgacaagtactcgaaattctgcgaggaagaagacggtcattgaagaaatcagagggtcttctgaacaccaaggacctctgtctcaagctctatcactgctttctggtctggacacctgctgtgacaaatttaaattggcaaggttcattgcatggaataaattagttaggatttgccctattctaccagggcttgggaaatccgagcttgtgttgtgagtggcgtggtcaagtttgattatgtctttttagttgtaatctcgtgatttccttctttttttaaaaaaaaatatttatctttttgattccgtgctagtatgcaaatttcttggtccttttgcgaatggttcggcgttcattactgtgcatagtgaacagacagggggctcatgcgtttatacagaaagattgcaccatctgtttcgctaaaaaggtatctccattgtcgaaaattttgcaagaaatatctgtttaatgaatcttatgacaatccaatccaacgatggaacatcttttgtaccgagaattcctacaaccttgttgtcgatagttcaacattggtaggaatttgcgca

SEQ ID NO: 12922 - DNA, 1376 bp, Zea Mays
aaggcccagtttggcaattggagccctaaagcctgcagagtccccccctctcccagtccggtactccccaagtccccatcgggcatcggcgctgccacgccacggccgacgcttgagacgctccccgccgcctgccaggccgccaccgcgcgtgacttcgcctcatcctctccggagatggacttccaggtcgtcgtcctcgccggaggcacctccgagaaactctcgcccctcgtttccaaggacgttcccaaggcgttgctcccggtcgccaatcgccccgtactctcttacgcgctggacctccttgaggccagcgacctcaaggacctcatcgtggtggttgaggggcaggaggcagcgcagcttgtcgacgcttgggtatccagtgcgtacctggatcggcttcgagtggaggtagttgtggtttctgaagaccttggaagtgctggtgcattacgagctatttcaaagcgactgatggcaaacgatattttggtagttagcggtgacctggtaacagatgtgttgcctggggctgttgctgctactcatagaagaaatggtgctgctgttactgctttactatgttctgttcctgtcagtggtccttcagacacttcttcttctagtgggaaagataaagctaaaaagccaaatcgtttgaacatagtaggactggacaggagtaaacaattcttgttacatattgtgtcaggaactgatgttgaaaaagatattcaagttcataaaagaaaaatacaggctgttggtcagatggaaattcgaagtgacctaatggatgcacatctttatgcttttaagaggacaatattacaggacgtactggaacaaaaggaagcataccgtagcattagacttgaagtcctcccgtatttagttaggagtcaattgagatcaactccatcaggtggcagtggaacatcagttgacgaaattgagagtagtgcctttcagtccagtggtaatttgcagtgtttgtcgcagcatcgggtcattgcaccatctgctttcaagcaggatgtattatcaagatcaagtggtggacataggtgctgtgcttatattgctagtaaaagcaaatactgtcaccgcttgaactcaatccagtcatattgtgatatcaatcgagatgttataggggaagttagccacctgtctggttattcgttttctgcacaaaacaatattatccacccatcctctgttcttggatcaaagactacaataggaccacactgtattcttgctgagggttcacagcttggtgacaagtgtagtgtgaagcgatctgtgattggtcgtcattgccgaattggttccaatgtaaagcaaaactaggaattggcatgttg

SEQ ID NO: 12923 - DNA, 1448 bp, Zea Mays
tataaattcatacatttctacggtttttatttatatttaaacataaaatataaatcataaaaacatacgcattatgttgactagatggtagatgtatgtttgaagccgataactatagtttaaatttctatttgtaataacttttagtttttttaccgtttaagcgacgacatgcgttcagaaagccatcgtccttacagacgagacacgagaggcaggagccagcgaccggcaacagttttctcggaaggcagcctcttcctcgtcgccgccgacgtcacccgccgcggctgtcggggatgccggtcagggtggtcgataccgccacgccttcctcgcagccctccccagggcaagaagcaaatactggacacccatctcctcctagatgttcactcttaagtgctggaagatcttttgctggaactcagaatgtttcaagtctgcagaaggatgaagcatggaaagtgaatgtccgcatccatggttgcgatcttgaacagggttatctatgtggaacgatggaagcgcttaatgttccattagcagatacacctgtagtgacattctgggagggggagatagtggatgctaaaaattacacctttttcactggcaagtgggaggcatcaccagaggatgatataagacattggtccaagttcccatcatttatgcctcttctgagtcagattgagacagacggtggcaagtctctggactttagcaactatccttacatatttatgagatggaaagaacagtattttgtcaatgttggagttgactgtgggttaaccatcgctggtttctactacgtctgcttttcttgtagcgatggctccatcagtggattttattatgatccaaatagcagtccatttcagaagctcgaattgaagtgtaccaacgagaaaagttctggattcaccttttcatcctatgagctgcagtgacagggccagatgcatatagtgtgtactgaactcatactcgcctaatgctgctgtattgaaagaaacgagtggtggtttatgcaacacttcgttttctcgcaagagcaagaccaagcaaactgtcactttgtaatctgcagaagcatcttatcttttctaaaatgtacctttcgtattatggttgtgttcatggtatggtgcgtccaaattcagttggatagggaatgtgagggctagatgttgatccagagaaatgctatataccttttccacaattgttctctgccattggggatttctatttcaacatgtctatgatatacacattgaacgggtctgacgtagtggtgagagccgcctctccatatttacgggagaaaatgcttttgcctcggtttatccaccccacagccttcagcactaggtacaaagccgtggagacctttgccttcagcttcctgacatcgttaggattagctctggccggcacat

SEQ ID NO: 12924 - DNA, 727 bp, Zea Mays
tctagcttcgaatgtcttgcccctacacttcccatcagagtgccggaaacactgcctgaacatataaaattcgaccatggttatacctctaagagtcctgcaattattaattttcttgagatcatggcagaatttactcctgagcagcaacatgctttctgccagtttgtgaccggtgctcctcggcttccacctgggggtttggctgctctaaatcctaagttgaccattgttaggaagcactcttctgtggcaaataataattcaaatgcaactggagcgacagagtctgcagatgatgatttgcctagtgtcatgacttgcgccaactatcttaaactaccaccatactccaccaaggctatcatgctaaagaaactgctttatgcgatcaacgaaggccaagggtcatttgatctttcgtgaatctcaacactaacataggtattggtccacctagaaatctgcgtcattgttacccagagttagtttctacctcattcatgtatgacataggttaaactcagctctccggagtcccaccgaaggtttggagcccgtacctttgggtgtggatgtctatactctcttttcttcttggttgtatattcttgcggatctttatagtgaataatagtaataaattgttttgcgcttcttactatgctaatcatcagtgccccacccgaagcgtcagtcgtacaaattttgctcgatggtttcgctg

SEQ ID NO: 12925 - DNA, 750 bp, Zea Mays
aaaaaagaggacaaaagctgaaccacctatttactacatgccaactaaaccaattattgacgatccagccattgttgaacagaacaaggaaaaggtattcgaagaatggaaatctatgcgcagggatgagctgactcggttccaaaagcaagttgaggagcaatatctctcaaatgtggagaggcagctggagaggatccagaatgcccggaacgctcgaaaggcgaacgggcatgctaacatgcaagaaatggacaaggagctggacacacacagggcggagcatggtccgaagactcggcgagttcctgaggagggcggtaatgatgacgacgaagacgcagaggacatggctgcggaagacgaggtgatggatgaagttctgggcatcaacgatgggatcaacgaggacccatccaagccgtccgaagaagctactactgaaggtggtgagcctgcacccgaggaagcacaataggattctttgttcacacaagctaggcacatagccgtacgtaccattccgtatgcttagttgccgtattgttgggaactgtttgtgcgtgtatttctgttagacgttccccgctggtttaggctgtgttttatattgctgttttgtctttttgaatgttgagaccatacaactgtcgatcattatctcataattgttgtaaaaatactataattgataccttgatttggacgtcggtggcgttaaacgtttcgggttctgttcttcactacccg

SEQ ID NO: 12926 - DNA, 863 bp, Zea Mays
ccctaacctcggagggacacggattgcaaaacaagggcggtattccgttactgtccgacacggcgacacctcagccctcaggtagccccgtagccgcctagcagggccgtgctcgagaaaattaggagaccaacagcacgaagggggaaaaaaggagagcagaaatccccaatccctcctcacttcgacccttgctcggaatctccccgcagcgtccggctgaatccattcgattcactcatggtaggcttcgtcttcttctgctgattcgctggatcgtctccaccgacgcggctgcgcccacacctgccgtcacagccatggagccgcgcatcggcaacaggttccgcgtcggccgcaagctggggagcggctcctttggggagatctacctcggcaccaacgtgcagaccaacgaggaggtcgcaattaaactggaaaatgttaagacgaagcatcctcaattgctttatgagtcaaaattatacagaatacttcaaggaggaactgggattccaaatgttaagtggtttggcgttgagggtgattacaatgttttggttatggacttactgggaccgagtcttgaagatctttttagcttttgcaacaggaagttgtccctcaaaactgttttgatgcttgctgatcaaatgatcaatcgagttgagttttttcattccaagtcattcttgcatagagatatcaagcctgacaattttctcatgggtctcgggaaaagagcaaaccaggtttatgttatcgattttggacttgcaaagaagtacagagatacatcaacacaccagcacattccatacaggtaagcatgctgtgtgtgtgaaatttgaatgaaattgctg

SEQ ID NO: 12927 - DNA, 475 bp, Zea Mays
atttaacatccgaatccctgccccttcgcccttcccctccggccgcagccccttccctgccgctccggcctcctccgtcgggaccgccgacgacgcgccgcgcggaagcctgcggggatattgggtaagcagttgtgatcctgttctcttgctcggatgccgggttactatgacatcgatgacatcctcatggaggatgagcctatttcagttgttttccaagtaactgcaaatggtgttggcctgctagatcctggtgctgaaagtaactgtgtagagaagggcgccaaggtggacctcccattttggcttgcgcatgggctgctgtctctggaacaagctgtgtcaataaacccacctccatgcttcacacagaaaacttggaaggagatccaagctgatgcggcctgtgtggatttgagggttcgttgcccgtacttttatgagctaggatgcaagattgttccttggtgag

SEQ ID NO: 12928 - DNA, 95 bp, Zea Mays
tttctttgtagccaggagcccaggagagtctgactatcattcagcggacaagaacggaccagcatgggttcccatgctaatggcagcacctgtgc

SEQ ID NO: 12929 - DNA, 910 bp, Zea Mays
gcctctaaccacaccaccaacaacggagacaagctccaagacaattaagaagcttgccaaccctaatgcacctcttggttacacattgtgcttcctcaacttagcttttgatggatatactaactcgacccaagatttaataaagtcaaggtacccaaaaacaaacccatgggatataatgcttggcatgaacctctgggggaccatatataatgctgtaattatgtttgttgcgccattactattcagtaactggccatatgcaaatggttttgaggcattgagattttgccaggagaacccagaggtggcctgggacattttcctattctgcctatgtggcgccgtggggcagaacttcatcttcttaaccatcagccggtttggctctcttactaacacaacaatcactaccacccgtaaattcatgagcattgtggtttcatccgtcatcagtggcaatccattatctttgaagcaatggggtagtgttgtgatggtcttcttaggcctctctatccaaatatatctcaaatggaagagaaagaaaggcagagagcacaaggagtaagcttgattcttcaaccttttctgatttgtaacttcaattggacagatctcttgtgaggttgaccaggataacgttaatgcagtctgtttgaaattaggaacttttacatggattattatgagtgataccaagtgtgaggctgagctattggtaacagctctaatttatgttctagagggaggattcatgtgtttcacttaaatgttgatctcgtggatttgtcttatgctactagaagaaaatacccacctaaacaatataaggaatatacgaatagtccttaactcaggagcctaactcggtgaacatagcagtttttttcttacttgtggagcataa

SEQ ID NO: 12930 - DNA, 320 bp, Zea Mays
aaccaagataaaaaaatccacgcttttagttgtttttctccaaggttgacattgctgctggaggctggcattcaactgcactaactatagatggagaggtgtatgcttgggggagaggagagcacgggaggcttggatttggagatgataagagtagtcacatggtgcccctaaaggttgagcttctagctggagaggatattgttcaggtatcatgtggaggaacacattcagttgcgctagctcgagatggccgaatgttttctagctcgacgtataaaatgaagatcctggccacttgaccattttacggcctttgc

SEQ ID NO: 12931 - DNA, 1011 bp, Zea Mays
gtgctgcctgtctccattgtcgttatggagcattggccgatattttcctgagaagcacggagctaatgaaggatgctcgagggattgcatcactgagtggtatcgttcctcctctggttccattcgctcagacgttcgcggcagtcatcactgcagccctcacaggaaccctctactacgtcgccacaactccgaaagaccctacgtatgtggtgacaccagcgatgcgttcgcgcacagggcgtgagaacctcaagaaactatttgcagcttggtacgagaggaggcaaatgaggaagatatactcgccgcttctggaaggaatcttggctttctaccttggcttcgaatggatccagaccgacaatatcctggcacctatgatcacccacggcatatactccaccgttgttcttggccatgggctctggaagatccacgaccaccggagaaggctacggcagcggattcagaaggtcaggagtgaagggagtagctctgcagacgacacattgtaactgcagcatatgtagatcggcgtggtctactgctggatagctagctgctgattgcacgcacgtactgggtgatcgatcgatctaccgatcagtcagaagaccagaggcgtacgtctcacaagttttgatctacttaattaatatcaacaaggtaggtataagattgggcaaaaatatatatataatgcatgtagtcatgtaatgtagatacaatgtgtacatatatggataaatatatgcaggctgtaatcaatataggaagtatatagtgtacgattgcgacatccaagtatgttataatcctagtatcacgtatgcatgcaaggaatataccagccacatcctttctttctcgtccctctcccacacttgcaatgttacatctattcggaacatccatgcacgagaaggctcgatctatggtctaatagttcgatttagtttgtgagtcttagaaagaacatatatgttcaccctatttaagctcttgctg

SEQ ID NO: 12932 - DNA, 468 bp, Zea Mays
aaaggagagaaaaaaaacggaagcatcaagtctgaaactgaaaataagggcgaatagcggtttctctccctcccttgccttcgtctccgcctcccgtctttcctcaagaagtcgattcccttccccaagaacccaagcccccaccatgacaagctcctcctctccttcccgaaaggcgctgagcaagatcgcttgcaatcggctgcagaaggaactcgccgagtggcaactcagcccccctgctggattcaagcacaaggtctccgataacctacaaaggtgggtaattgaggtcactggagcggcgggcaccctttacgccggcgagacctaccagttgcaggttgacttccctgagcattatcctatggaggcacctcaggtcatttttctcaatccagcgccaatgcatccacacatctacagcaacgggcacatctgcttaggggttttgtattcggccctcta

SEQ ID NO: 12933 - DNA, 355 bp, Zea Mays
accaattgattttcttcacccgtccacctcgtcttgcgctcctctgtctcggcgacgactgtgctaccgccgccgccgccgcaagacttcgtcgggcactttgccggcgacgatttcccaccagctatttctactcggatccgatctatttacaagcccaacaggatcagaggaggtgatggcgaggagtgacagctgcctggcgcgcgtgggtgccggaattgctatcggtggcgcggtcggcggagccgtcggtgcttgctatggaacttttgaggcgttcagatacaaggaaaataaaaaactggaataggtcggtagtctggtcctggaagactcaaaagcatagtggaag

SEQ ID NO: 12934 - DNA, 1374 bp, Zea Mays
tgcaacaaggctcacctgaaaattgaccgtggtcagtttgttctagttgaaagcagcggaccttaggggttttggtggatcagtggaccagaacgcagtccttgaatttattgatgctgggcttgatatgatcctggcggcagattcctctgcctctgatcttattcgtggcattgcgacagagtgtggggttgattttgatgaggatccagaggcaatggttattgaccacattaactatgccgctatggatgttgaaggcgatcacaccttgattgttggtgatgatcttattcagtcagatgtcatactggggtctaaaaagattgaggctcctgtattatttcgtggaattggacacacggctaatccatcaaacagtttggttctgaaagtcctatctgcctctccatcagcatactcagctaacccaaagactaagttatcgttgcctccatcgcttactgggtcagctatatcactggtttcggttatgcaggcaagaaataatgctcgggtgctgctatctggatcacttgatctttttagcaaccggttcctgaagtctggtgttcaaaaggctggtagcaaaacgagatacgagagagctggaaatgagcaatttgtgacagagacaagcaaatgggtcttccatgagagggggcaccttaaggctgttaatgttaagcaccacaaggttggggagaccaatgaaccaggcatgtaccgcattaacgatgacctggaatactctgttgagatctatgaatggtctggaacaagctggaagccatatgttgctgatgatgtgcaactccagtttttcatgatgagtccttatgttctgaaaactatgtcgaatgacaacaagggtttatactcaacatccttcaaagttcctgatgtctacggagttttccagttcaaagttgagtaccagaggctgggatatactggtttgtcttttacaaagcagattccagtgcgcccttacaggcataacgagtatgagaggttcataacatcagcgtacccatactacactgcctcattttcaacggactcacgggagcgcacaagtttctggaggctgctgatgcgacctagatctgtggccaagtgttacccggtgcaattttatggaatcatatatttgtagtaggccaacttagctagaattagacgaccgtgaccgcaatcatgggaaatttactcgtgctagtaggatgttcgatctgccccacaaattttttttgttcggatccttctgatcagcacttgtgaaaacgtttacagtctgtagcattgaaaggatgacgaagcatgtagtgattttgaaactactgctcttgctcagttcttcctcgttgcacg

SEQ ID NO: 12935 - DNA, 2109 bp, Zea Mays
atcctcgcacacggcaggcacgtgaccgacacccccagcgcacgaactccaaaatagcgagccgaagggggccacgaccacgagtcctccacctccctctccgccgcgtcgcacgcgcttgacgcgcgccgagagccgaatcggagccacgaggcagccgccccgggcggatcgatcctagggccagggcatgggcggaggggacgccgacgccggcggcgagcccgcggacgcgcaggccacgctccacatccggtgcaccaacggctccaagttcaccgtgcggaccgacctgggcgccaccgtcggggcgtttaaggcgatcgtcgcccacagctgcgacgtgccggcgccgcagcagcggctgatctacaagggccggatcttgaaggacgagcaaaccctagccagctacggtgtggagacagaccatacaatccacatggtacgtggtgctgtgctatcaccaacatctactgcacctgcagccaaccaagaacctaccactgctgctcctgccagttccccggcaacaggattgggtggcttgttgcaaagtctgggtactacaggcgctgctgctaacagtgaggggttgtttggatctgccccccctggattagaccaaatgcagcaacagctagctgaaaatccgaacttgatgagggaaatgatgaatatgccactcatgcagaatttgatgaacaatcctgaactcatacgcagtataataatgaacaatcctcaaatgcgcgagctcattgaccgcaatccggatcttgctcatgtcctcaatgatccaagcattatgcgccagacttttgaagcagttcggaatcctgaactcatgagggagatgatgcggaacacagacagagccatgagcaacatcgagtcttctccagaaggattcaacatgctccgtcgcatgtatgaaactgtccaagagccttttctgaatgcaacaacaatgggtagcgagggtgatcgaaattcgaatccattctctgctcttctaggaaatcaggggtctaaccaagcaagagactcagctgcaaatggaacaactagagcttcagaccccacatcagggtctccagctccaaatactaatccacttccgaatccttggggctcaaatgctggctctgcccaaggagcagcaaggtcctctcctgctagcaatgttaggagtactacagcaagtggcctaggagggttgggttcagcagatttgggaagtacgcatggtgccagtggtggtggctctgatgctaccttgttgactcaagttttgcaaaacccaactatgatgcagatgatgcagaacattatgtctaatcctcagtccatgaatcagctgcttaatatgaatccaaatgtacgtaacatgatggaatccaatactcaaatgagagaaatgattgagaatccagaatttcttcgccagttaacatctcctgaaacattgcagcaattaatttcgttccagcagtctttgatgtcacaacttggccaacaacaagctggacaggagcggacacaatcaggctctggtgcaggcaatgtcaacctcaacaccttgatgaacatgttcagcgggcttggtgctggtggtggcctaggtgttccaaatgctcctaatgcaccgccagaagaactgtacgccacacaattagctcagctccaagaaatgggtttctttgacacacaagagaacatccgagccttggccgctaccgctggaaatgttcatgctgcagtggagcgacttcttggaaatatgggctaatagaatatgatgatcataactgtactcagatattgtgatttttagttggcattgtgagatcatgtctggctcattggttttacacccgagggtgagaggcggcgtctagattttgtgttcaaggatgaataaagagtgtaccgggggaacctttcatatacatatgtgtacatggacaatgtcgtattctgtacaagagggagagggaatatgtagtgcagaccatgagaactaaaaaaactgtatttcgattgctcaagaaaatatatgagatgcatccataactcagagatgtattttgttgcaatagttgggat

SEQ ID NO: 12936 - DNA, 1158 bp, Zea Mays
gcccgtttttagttttttatatgaacgcaaaaaaggagttagaggcgagcgtgtgcatcaagatcacggcgctctgcccgatcgcgctgctggagaaggcgagcgacctgctgcgttggcagaagaagcacccgtcgttcagcctgccgtggaagacgcactccttcccggtgctgtctgactcgagcccgctccacctgaccgcgtcggagccggcggcgctgacggcggaggaggagagggagctgcagctggcgcactcgcggctgctggcggtgtgcgcgcggtgcgcggagcacggcatcccgctgctggtggacgcggagtacgcgacggtgcagccggccatcgactacttcacgctggtgggcgcgctggcgttcaacgacgccggcgcggcggacggcgggcgacccatcgtgcacggcaccatccaggcgtacctccgcgacgcgcgggaccggctggaggccatggtgcgcggcgcggagcgggagcgcgtgcgcctggggctcaaggtcgtgcgcggcgcgtacctgacccgcgaggcccggctcgcggccgcgctcggcgtgccgtcgcccgtgcacggcagcatccaggagacccacgactgctacaacggctgcgccgccttcctcctcgaccgcgtgcgccgcgggtccgcctccgtcatgctcgccacccacaacgtggagtcaggccaactcgcggcggcgcgtgcccaggagctggggatccccaagggagaccgcaacctgcaattcgcgcagctgatgggcatggcggacgggctgtcgctgagcctccgcaacgccgggttccaggtcagcaagtacctgccgtacgggccggtggagcagatcatcccctacctcatcaggcgcgccgaggagaacaggggcctcctctccgcctcctccttcgacaggcagctgctccggaaggagttggtgaggagggtcaaggccatggtggcgggacgtgagtgaagtgcttgtcgagcctgtgtgtgtggaggtcgaccgtgaagctgggactgggacaaggacgagctaaaggctagaagctgtaaatacacccttcaacggtcttcacattgatgtatccggggctttcttgaataataatcgaatgaatgaaatagtgttcgcggta

SEQ ID NO: 12937 - DNA, 940 bp, Zea Mays
atttttaagtatgtatgactgctttcttttagtttaacattttggactacaattgcatcaccacactcaccgcaccaccgaccactgcctccgtacgcgtccctctggcggaaaatcggtcctagtgccgagctcgttttgtttggatcttctgtatatctattaaggaggcttctccatctcctcggagcagcaaggctgtgcagcaatggagaacgataacagcaacactcaatttgcaccattgagagagactccgtttgccctccgtggtgctcttggtagttcaagctcatatcttgagcaagccaggggctacacatcttcccctgtagcagctctgcgcccaaagatgtctacacctggaaatcgactcctgcatacgagctgccccctgtcatctgctgtagcgaaccgcccgctgtcgccccatcttcctctgaagaagccacagttcagcgctactttctctatctcgcaccgtatcttcggtgtcgcgctgggagttgccatcatatccgtccccctcgccaccaagttcagcctgatgtttggcgtttgagagcgatttgctgcatcttatgaggaactgcatttccccgttcctgtgactgtttcatcgttcgtctgggttaccttgcaacacaactttaggtgcagttggaataacatctttgtcatgctgacagacttctgtaatacagtaataagtaaaactataaaatatcagtgcaaggaggtttgccccattatggatgtacatggtcatgaggtctgcagcctgcaggtttggctgggaaatagttgattatcatcacaacatattaactgcatggtgcgtatcttcgctacgtgcccttaagctcgtctggaaaatttgtgaaaattgttaaacgtaacgtttctcaaaatatacgtatgagctatgttttctaggcat

SEQ ID NO: 12938 - DNA, 1825 bp, Zea Mays
ggagcttcccccgatagatgtgccctccgataccctggatttcgtccgtggcgagtggctaccgcttgtgctccttttgtgacagctgaatctttgtggttcgaaggcgattgacttgggttcactgacgcggtgacgcccaatgagctcccacgtctccacatcgcggggtcttcatcccccaggcaagcttgggacgttggactcacccggtgcgtggcagccgccagcacctatggctcagcccgaagcaggccgcggtgatgaccaggaggtcaggctgttgtcggttgcttggaatcaggattgtggatgctttgctgccggtaccagtaacggattcaggatctttaattgcgagcctttcaaggagactttcaggagggatctcaagagcggcgggttcgcgattgtcgagatgctgttccgttgcaacgtccttgctcttgtaggtggtggctccaatgtgctgtacccgccgaacaagattgacaccctgtcaaatcccaatggactttgctgcctctctcatcattccaatacttcagtgttggcctgccctgggttgcaccaggggcatgttcgcgtggagcatttcgggctgcagatggtgaagacaatcccagctcacgattcacacatctcttgcatgtcactgacaatggatggtctcctgctggcaacagcgagcacgaagggcactttgattagaatattcaacacaatggatggcactcgtctacaagaggtacgcagagggcttgacaaagcagaaatatacagcattgcattgtcgcccaatgtgcagtggttggcagtgtccagcgacaaagggactgttcatattttctccctgagagtcagagttgctggagtggattcaagcaatgagcaacgcgctcttgaaggtccacggatggatcaccagaactcttccagttctattgatcctcttattcaggcgaacactggatccaatgctagttcatcactgtcttttatgagagggatcctgccgaagtatttcagttcagagtggtcatttgctcagttccatttaccagaagtcactcgttacatagtagcctttggtgcccagaatactgtgatgatggttggcctggatggcaggtgcagctttgaccaagcgaatggagggcagatgttgcagagggaacatttccggtttctcaagtccgacagcccacctttcaggactgcagccgcttgacctgcagcacaaggatcatccatcccaccatgtaaatgtcgaaggtccactgtacatatcgccttctcgccggcgaagttataggcagccggaataaggagagctggctgttggatcgaagcctacaggattccaacgttcggatcggcgccccgtccaaattgcaggcatttctttgccgttccctcttctatcttcaaacgagaacacacacccattgctggtacagaacatgacataaaagattcagtaacgtgatatttgaccgtgtggctttgtggtgcctgcaaggccgtgtagcgaatctcagacctgttcttgccggtggcttgttgatgctgatgactgttacgcactacctcaatgttctttctgcatgttgtgcgattgcgttgctgattgcatgaagggccttcttatatgcttactctttttttttgttcctgttagcaataatgatcctttaagattgtcttcgcgggctttcttatttacttatttttcaacgagatttgggaaagggtgggaaaagcacttcgtccacctccagcggttgcgtccacggacgcccgagctcgccggcacgcacggtcc

SEQ ID NO: 12939 - DNA, 110 bp, Zea Mays
ttgaagcagcatcaacaggtgaagctgcctggcttagagctgctctggaggagatgaaaggggagcttgctcatctaaagggtgaacatgtttgtgcatcaagaatactt

SEQ ID NO: 12940 - DNA, 747 bp, Zea Mays
cggccccgtagacaaagagatacgcgacgcgtgatggatgcgcgtccagatccagcggcctcagtcaccatcaccacccgcaccacacacgagcatacgcgacgactgacaaggcgaggggagcactcggcggcgatgggcggcggcggcgcacatggcggcaccacctacaagggctacaccatcccgcacaacaagcgctggcacaccgtcgccggcaagggcctctgcgccgtgatgtggttctgggttttctacagggctaagcaggatggtgctacgctcttgggtttgcgtcatccttgggatggacatgatgaccactctcatggtcatggacacgggcatgaggcatcatcatcgtcatcttcacattaagttccttactggctgcggacgatgcttggcatgttccaacagctaaagtttgattaatatgctgtggaaaagaatctggtgcacgttgatgttctttatgatctgttgttcagtacattgctctgcttcgttgctacgttaagaatatatatatactaacatcagaaaaatgtatgtattttatgggcttaatagattcagaactgggaagatgaatgggcagctatgctggtgttttcctttttggtcgatgttgggcgaagttttgccagcacgcttggcagcgaagtactaatcgataacccggaaattctgatacgccacaagcacttccgaggtcgacctcatctggtcctaagctacaggaca

SEQ ID NO: 12941 - DNA, 983 bp, Zea Mays
ccggaagtgacagagagtacataattgctcgccggatatggaaactggggggcgcctattattgtgtcacaaagggtataccatgctcgtccattccacggcgcaacaaacctcgaagagttgatctgtattattcaagctggtgcatccgtgcagtggaatccaggagagggaacggagggtcgacagcttgtgaggtgctcttgttccaccacgaggacatgggcatcccgtacgagatcgcaaagctcggtatccggcaagggatgtggggatgcgtgaagagaatcgagcctgggctccgggcctatcagcaagccagggctgcaggggagccggtgtcacggagtgccctgatggcccagatcaacaccaaagtcggcgacagctttgtccggtcgctggagtccgacagcgacgggtccgaaaccgtggaagcggaagagaagcctgcgaggaaccgtgtggcgaggttccttgtgcttggaggggcagttgctctggcctgtactcttgaccaagggctcctgacgaaggctctcatcttcggcgtcgcgcggaaattcgtcgggcagaggaaggcactgtagcatctctggcatttatttctcagcgtcgtccgcttggcccgtggtccgcactaaccggacctgtcctttcactgtcgtagagtggaggatagaggtggttcagtgtctgcctaattggggcaaatgccattgaccattgtggctgaaagagaacagagctgatgaaaaacattttggtgtacagatatgctgccggctgttggatagcgaggaatggggaatagagcaaacaatgtacttctcgtttggagaacggaactcctacgatatatataaatgtgtttcatctaatcttgtatctcagacaagaacagatcagatgactgtgcagatgagaacaagcatttttctatgtagcttactgcggctacggcttctacaatattttgtttc

SEQ ID NO: 12942 - DNA, 1851 bp, Zea Mays
cttttttggtccttcggtgaaaaaatagggaagctgaaccttgttcttctgccatcatctagcatgcggcttacctttgtttgtgatgatggttatccagagcaactagctctcttgagcaatggctttgaattttctgaagttatgattgaagaaatatcagctgataattctggacgctctttcctaatcagaatttcagaatctaaagtgttttactactggtgtgctgagaagtcgaaggaacatggaatggaacttcttgcaaagatgaaaaaccttttggacgggaggccaacactctctgatctcactggcatctctaattcacgacttgatgcttttgccactcatttacatgcttatcttcttgcatcaagtatcggtgatgttacatcattgggctcacttaatgacttcctgagtacttcaagatcacatgatcaatatttacagctccagtcagatttttccaaaacttccaggttccgtgcctcggctgctagtgcaattaagccaagctctgtctatcaagccagcctaagtccgagatctggcacttttaaagatggggtaccaagggcttcatgtgcaagggttgttgggagggacaagctgaagcgtcgtgtggaatggttaggcccgttaactgctccgcttgatacgaatcctttgacaatcaaccctgattctgccagtgagaagtgtgatgcagattgttcaaagaacaatgttagctcagttccgttggacctgcctctttcgtttcccctgttgccttctatttactcccttggcactcgtccggttcctgaggtttctttggagaaacagtttaagccttactattgctggtgcccaccatgcccatcatcgctgcaatacactgtcacccatttgcatctgccagctacacctgtagatccgttgcccctaccacctttgagttcactgctagcaagtgagcagccaccttcttcaacagtttctgtaaagctggatacaactgatctcccttcccttaatcttccgtccatactgcattcaccacttattcccctacatggtccacaagtgccaacattcacaccattgatgtccgatcccattgtgcatgtcccagtcattgatgtttgttcggcgggtcaggcctatctagtgagttgtgggccgtctataacttcagcagttcccctgctcccgagcttgaagcctctgctgccagaagcagagtcgttagtcgagagaagcgcaagggaaacactgatgaggctcatagcttcgacaccacctgcaagcaatcctctacctggaagtatatcctgggcgaataacaatgtgaagaagcatgttgatgtgtgtcccaatgaaaaagcatccggtacgtcttgtgttgctgctgtgtttggaagtgggattgcacacgctgaggatgaagttccaagcggaggtgattcacaagagccgtttgccgaatacgatggtaccagcaatgaatgtgatgtacatcattggcagaaattctagcttggctgcatcagcatggtaaatagggttttgaggattcgggggtttgatgtcctgtacgcagcagcagccttaaaagtttctgtgcccagccagcatctctatttggtttgcaaatgtaattactagtttgtactgtcttgtttttggcaaacttgctgcgagcctcgtgcttagtttggtttatttatttatgaactttaggcctgttcgaagcacccagtttgtaagaaaatggattatataaactgaagtgattccaaatatatcagtttatgtctcagtttataaaaattggattaccagtttctaaaaaaccaagaa

SEQ ID NO: 12943 - DNA, 1769 bp, Zea Mays
ccttcccctttacatttgagcacttaattgttatttgtggccttcactattctttctatggttgctattcggtgatcaatcttaaatttggagtaaccaaactcattcacagtactataggcccaaagtgttgactacctgggcggcagcccggcggctaaccgtagctccgctgtacagctgctagtcctaaactcctagcagctagcattgcagttgaacccattttatttgaaaaaaaagaatagaactaatttgaaccgattggcccaggtgtcagagagcccatgtataccttttggcccattccttcctcattcggctataagatgagcacctcggctgccgttaccgccttcctcccataacaaagccacgttagccgagagctcctctgctcctctcgtgtctggccgaacaggcagagcgaccagtctccagagcgctccccatggcgtcaggagctgcggcggcccctgtcgttcagactgtggtgctgaaggttgccatccactgccatggctgcaagaagaaggtccggaaggtgctcaggggcatcgaaggcgtgcaggacgtgacggtggacgcctcgcagcacaaggtgactgtgacgggcaccgtggacgccgacacgctcatcaagaggctgtacaagtccggcaagaagggagtgccctggcagtgtcacccgcccgccaagaacagcgagcccgcgccggaggccccgccggctccgcagcctgccggcgacggcggcaaggatgctgctgctgctgctgctgtggccgcggcggacaagaagtcggaggaggcggtgaaggagccgcagggcgagagctccgaggaggagaagaagaagccggagcaggaggacggggccgcagagaagaagcagcccgaagcagagtcgtcaaaggaggtggagaaagtggaggcgaagacggacggcggtgacagcgagggagctgagacgaagcaggccaagggcgcagcagagccggcaaaggaagcccctgccgctgccggcgctgccaatgacgaggacgaggcaaagaagagcgacaaggccaaggacgccggcacggcggagcctgccgccgtgacgacggagaggtcccttcctttggcgccggcgccaaagcacgcgtacgagcatgagtaccggccgccctactacgtcgcgcccgcgcagccggtgctgagctaccacgcggcgcagcgcagctcgagcgtgtcgcacttcgcgccgcaggcgcagccggcgtactccacgcaacaggcgcacccgcatcaagcgtactactccgcgcagccgcagccggggaagcagtggtcgccgtcgtacctgtacatgccgtacccgcacgccgcggcgccggagccttactaccagcaggactactacggcccgcccgggatgcacgcgtcgcctatgcacgactcgtcgtaccgcatcttcgacgacgagaaccccaactcctgcagcgtcatgtgagaggagagcggatcggcgcggcccgggccgccgtggccagcagcagcagcagcagcaggtagttggggggaggcggcgccgctagctaccgcaatagagaaccctctctctctctgtggttgtaagtagagtagcctgttgctggcctcttccacttagtatagaggtcaaacctctctccatgcacgacagagctttttcttcgtttccttttaatatcttttttactgtttctaatgataatgagatacgcacgcgcgtttacctgtaaaaa

SEQ ID NO: 12944 - DNA, 176 bp, Zea Mays
ggcacaggatcgaatgtcacatctttactatataatcggagttctgtacaaagtaaataaataattacattatatggagacaacggtccagcaacccaaagttgactgggagacgacgacctagacctctcacgaactcgccacagcatcctccatgcgcctcatcctgcggtacc

SEQ ID NO: 12945 - DNA, 814 bp, Zea Mays
atagataatcttatataaaaataggtttatatatcctggtgctcttgccatggctggtgcatcgctcctctccccatcctgcacgctcctccgcctgattcccagcgcgtcgcacttcaagagattcgatcgggttcgccggttcgcgcccgccgccatggcgacttcctcaggaccaaaggaggcgccagcgaataaccctgggctccagaccgaggtcgaccccgccaccaaaggctacttcttgcaacaaacgatgttacgtgtgaaggacccaaaagtgagccttgacttctactcacgtgtgatgggcatgtcgttgctgaaaaggttggattttgaagagatgaaattcagtttgtattttctaggttacgaggatgtgaccttagcccctgatgatcatatcaagcggactgaatggacttttaggcaaaaagctactcttgagctcacccacaactggggcacggaaaatgaccctgaattcaaaggttaccataatgggaactcagaccctcgtggttttggtcatataggagtaactgtggatgatgtccacaaggcatgtgaacgctttgaacgtcttggggttgagtttgtgaagaaacctgatgatggaaaaatcaaaggcatcgctttcatcaaagatcctgatggttactggatcgaaatatttgaccagacgattgggacggtaacttcttcagcatcatgatgaacagtagtggttccttatatgagcgagagacacttcatcgagaccaatttcatttgatctttatgacaagaacttttcaccaatagattgaca

SEQ ID NO: 12946 - DNA, 88 bp, Zea Mays
gaagtatcaaaatatgatttacaaaaatgcttagccctgctcggatcttgtggatagaggttgtcttttgcattaaggcctagctcag

SEQ ID NO: 12947 - DNA, 5208 bp, Zea Mays
aatcgccttcaatttcctactactagagagagacggcctcccttcctctcgcttcgcttacacttctcccctccccccaacccaaacccaacacaattcccccgtgttgcctacacgcactggccacgaccaaaccctaggcgccgccgcctccggggccctcagggctgtcatacggggaaggaggaggatatcggtgaggagagaaggggatttatgtcccagcgaggtgacaggggcgaggggcacgccaggagacccggccggtccagcagcttcggcggccaccgcggaggcggagtcggcggcgcgggcaagggcggcgcgggatcctcaggccagcctcctctttctaccaaccgcagctttaggaagcccggcaatggccacggcgggcagcagagggtggtgaaccagcccgacacaaccggtttccaacctgcccccgcgcctgccccccaccaaactcctgcgcgaccgccacctgcacctcagaatgcggctgtgcatgttcccatatccgcaccatggccgcaacctcaaggtccacaagtgtcatcttcatcagctgccagcgacaggccggctaatccgccattacctaaagctactcatgctgctccaagggctccaccaaaaagctctaacccaccccttcctcagggaggatcgaaaggggaaccaccaaaggggtttaactttcagtttggtagtataaatatgaatgggctgccgcaatttcctgccaggacaagctcagctcctccaaacttggatgaacaaaaacgtaatcaggtgcttgtggaggaacttaaggttacacctacccctgtgcaaccaactccaaaacagcagctgttgcagcagcatccgcatccgctgcagaagcaacagcatcagctgccgcagctgtcgcatcagccacagcagccacagcagcagtcaacaagaaaggaaactgttggttccagccaacctaactccatcaatccccatactacatcacaactgaaaagagatgtgcacccatctccgtcggtccccaatgttacatctgttagacctaccgttcaacaaatgcctggtgttcagatgccgatccccttccaccaccagccggcacaagtttccttgcagtttggtggccatggtgcacagctgcagccacaagttgtgcccagctcatttcaaatgtcaatgggattgacaggcagtagtacaccgcaagtcccacagcagctgtatgccccgactctgcagcatcatcaattgcaacagcaagcaatgatgcatcctggccagggtatgggttatgttccttcagttgctcaccaattcccacagttgggcagcattcctatgaacattgcatcgcaatatcctcagcaacagccaaacaaacctgctgctgcacgtaaggctattgtaaaaattactcatccagacacacatgaagagttgaagcttgataagaggatggactcttctgggcagagagctgcaccgagtattgcacaacaatctcagcctggtgttaattatgctcctcatttgggcttctttcatcagccaccgaattcctacaaccagtcaggaatgtattactctactacagctagtgtgaaccaggttgctactggatcatcgggtcctagatataattatcctgtcactcagtctgcgcaagcgatgacatatatcagtccatctgcagcgcctccggtatctggtcagtcacaatatacagttaagccgcaccctatggggttgctgtctgaaaaatcaggtactcatgtcacaataagtgctccaccagcaaaatctgatccacctaagttacatgctgctggggatgctgcgtcaagtctgaaaaaggataatgaagttgtttctgggatcactgttttaaataaaccaacccttgagagggagagtaacgatcctttagtcacagtgaagcattccactgtgataagcccgtccttgccaattcatggtgaaaaaccacaaactttggtgacatcgtcgcctgttgctaattcagtctcacctgtgactggagctgatgggaaaagcaaagaacccattcaaaggtctggatcatttaaagatagtaagaaaaatgtcactaaaaaggatgtcaggaattcatatgaaccaccaaatccaacttcatttgttgaggataaggttcaaactgtaaaggttggagatggcgatctccaggaaactaaaaagctgaacaatgagttggatttgaccaactcatcttcagctccaacggttccactggcagttagtacagagaatgccgacagcacagcagtaaccactgctgatgttcctgggacagatacaagctcaagaagaccatcttctgagggtactggtgagcctggagtggaaagcttcactgtttccgctgttgaatgtgacgaaagcaagaggactcacaaagttgtgaaagatcctagcaaggataatatttcttctgatgctaccaaacatgaattgcctaaggaatgtgcagtggactctactgaacaagcatcagcagtgacttctaacactgatgattcatatgcagcacctctagtaactaatcaggagcagttgctgaaagggtctgcttctgagaaacaagctgtgatgaataactcatccatgaattccgatacttcagcacatttttttgatggcaatgatgtgggcgtgacaacttctggaacttcagagcctactgctcaaacttccaatgatgaaggtgactcagatattagtccagaaacagacctagctgtttataatgtccctctaggttcatctgagctacaactgaaatctgagagtagggcaaatgatcaacagcctgctgcaccaacagtatcagttcgaccggtatccagggaaaagcctagtacaaagtccacagctgggaagaagaagaagaaaaaggaaatgcttgctaaggctgatgctgctgggtcttcagatctttataatgcatacaaaggaccagaagagaagtctgaagttgttggtaccgtggagggtgctgataattcttcaacagttgatacaactcatgtactgtctgacgaattagaaaaggatcctagtacatctgcagatgattgtaagaaaaaagttgagcttgatgattgggaagatgctgcagacatgtctactccaaagcagccatcagattctgggaaccaggctagcatcacccaagtgttggattcagacgtaactgaagcaaacagcaggaagaaatactcacgggattttctgttaactttgcaacatcactataccggtcttccttttggatttcagatgaatgaagctgtcaatgctataatgaataatttggcaggaaagtcttatgttgctgaccgggaacctcaccctagtcctggaaggggtttggaccgcccaacttctcgtgaccgccgtggtgctgccatggctgacgacaggtggactagggcgggtgttcctctcagtcctggtcgtgatgttcacatggacctgccaaatggaccatcagttatcaactaccgtggcggcccaggaggtaatcatggtgttttaaggaatccacgcagtcaatcatcaaatcagtatggcggtgggcttcttgcaggacccatgcagtccgttggaccgcaggtacctcgcagcggctctgatgctgatagatggcagcaaaagggtctcatgccttctcctggcacacctgtacaagcaatgcacaaagcagagaggaagtatgttattgggaaagtttctgatgaggaagaggcgaaacagaggcagttgaaagctattcttaacaagctgactccacagaacttcgaaaaactttttgaacaagttaaggaagtcaacattgacagtgtagcaacacttactggggtcatttcacagatatttgacaaagctttgatggaaccaactttctgtgaaatgtatgctaatttttgcttccatctggctggtgccttgcctgacttcagtgaagacaatgaaaaaatcacattcaaaagattacttttgaataaatgccaagaggagtttgagaggggtgaaagagaagaagctgaagctgataaaacagaagaggaaggcgagattaaacagaccaaagaagaaagggaggaaaagaggatccgtgctcgaaggcgcatgctgggaaacattaggttaattggagagttgtacaaaaagaggatgttgacggaaaggattatgcatgaatgcattaaaaaattgtttggaaatcatgatgatcctgatgaggagaacattgaagcattatgcaaattgatgagtacaattggtgatatgattgatcatgtaaaggcaaaggagcacatggatgcctattttagtatgatgcagataatgtcaacaaatcagaagttgtcttctcgtgtaaggtttatgttgagagattcaatcgacctcaggagaaataaatggcagcaaaggcgtaaagtcgaaggtcccaagaagattgaggaggttcacagagatgcagcacaagaaagacatgcccagtcgagtaggttgggacgtggtccagctgttagttctgttccaagaagagcacatcctatggattatggccctcgtggaccatctgcatcagcatcctcaagttcccaacaagggagcattcgaggaatgcctccacattcgcgtggttcacaagacatccgacatgacgaaaggcaccagtttgacaatagaactgttcttccgcagcgggtagtcaaagatgaagccatcactcttgggccacaaggtggccttgctaggggtatgtctataagagggcagccaccagtatcaaatactgaaattccttctgttattgaccaccggaggatagtatctagttctaatggctataactctgcggctgattggacatcatcatctggaagagaagattctaattcaagacttccagatcgaacctctggccgaattcctgcttctagtcaatctgctgtaacttcgcagaggcctgccagccaggaaggccgttcaagaagtaaatcatattctgaggatgagttgagagaaaaatctgttttgaccattcgagaatattacagatggcatattgtatttgcgtatggagggtacacatttagaaacagctgaggaagtgttacactgttactgctctcagag

SEQ ID NO: 12948 - DNA, 1697 bp, Zea Mays
ctagttgcctctttttttattcttatctttaaatcgattgtaagtttactattttttctgtcttcttttctccctcttccacctaagtatttagcacgtttatagcctcctaccatcccaatccaaacggtacaaagtcaacgatcacatacatggcggtggaaaattctgtacatacgtttccttgggtgcaacagttgcgcattgatcgacgactagtacctcctccgtgatagacgcgagcaacctatatgcacatggagccatccttacacgctaaattggagcaacttcacgtattttctataaataacatgctaaattaataaatttagcaatgtaataacataagtagtaaccataatttatttctctctctaataatttattatagtacgtccttcgttttttatttgtttcaaaatcaactaaagagcgacaaatattttaaaacgtataaataaataattgggaacttggactatttttaaccgacctagcatattttaactgtttcttttctctatctcttatcattttctcacctgaaaaagttcgcagcttcaccgaacgaaaatgtcctgtcgttccctttccaaccccgtctccgtctccgcccgccacaacaatatcgcattgacagatcgttcatcgtagcctcctccagtcgtctcccgggatcttctccggctataaatttccgccccaattccccaatccagatgcgcaaacatcgaatcgtctcgctcgtggctgccctgctcatactgcttgccctcgccgtatcgtccacccgcaacgcacaggaggattccatggccgacaacaccgggacgttggcgggcggcatcaaggacgtgccggggaacgagaacgaccttcacctccaggaactcgcccgcttcgccgtcgatgagcacaacaagaaggccaatgctcttctggggttcgagaagcttgtgaaggccaagacacaagtggttgctggcacgatgtactatctcactattgaagtgaaggatggcgaagtgaagaagctctacgaagctaaggtctgggagaagccatgggagaacttcaaggagctgcaggaattcaagcctgttgaagagggtgctagcgcctaaggatctctccttctccatgtgcgagcctgaagctcaaagcaaagttgcagaataaggagccacctcccaacatgctagaccatgctcccttgtgtaatttcataagactacaacccttttagggcttgttcgtttgtgtctgtgtctaagggaattgaaggtgattaaatttccttctatacaaatagaggggctttaatccactccaatacttttcaatccacgcctaaccgaacaagcccttaatatgatatcttagattgccgtacctgtgtaatatcatgaataaaatttgctattatggattctaaggtttatgaactaccatggcagaattctcacattacttggctcaagtcttcggcttggaagtttacatgcagattttttggtcacatgacgatcccatccaatctcagcttggtcaattcagattataccttgtaaaccaagcaagcgcctgagtgcatagtcagctcaccagatgaccagagagaatatgtttgcgatcacttcgaagctgtttgagtgccgtatacttcaggatagtcaaaagtttcgcgttcgaat

SEQ ID NO: 12949 - DNA, 2274 bp, Zea Mays
atctagaatcaagacagcatctcttttatgttgagctaacacatcaaattctggccgtcgtcatgggcccacagtggcaagaagtgtagtacttgaggctgttaatgtggatcctgggagcagtgaactcccagcttttgttgcgcagattctccaaagtgtgcttggaacaatcaatgcacaatctacgggtacaccaacatcttctgacaccggatctttagatccttcacaatcttccatcccaaatactataagagttgaactcgaccagcaacaagctcctctgctttttcagtctgaacccgcacatgagtcatctcaaccaaatgtcatccctgatgctttgacaactatgtctcagtacattaactttatgagggactcatttaggagggagggctttagtcttaatggacaaacagagggtaatgtggaaaacagaactgcagagcctgaatcagcttctgtgcttgggcttcataatgcatcattgctagctgaaaatatgcactctactaggcaaattattgttgaacaggctggtgcattgctgtctcaactctcaactcagctgggagatctagagaatgtaactgattctgcaatacgaagggacattcaaagtagtgcagttcgcacgggttctctatttcagaaccttggttctttgcttctggaacttgggcgcaccacaatgctcctgcgtataaatccgtcatcttcagaagcggttgtaaactctggaccagctctttatatatctccatcagggccaaatcctcttatggttcaacctgttccatttccaggaaggtctgtccaaatgggtactttgttttctagtctgggttcacaaggatctgttctacatccgagagatgttgatatccatgtccgcacaagtgggtccgtgcctggagccagtactaacccaagtgattcagctggtgcgcaagcgcatcaaaatgtgaataggccaggagatgcttcgcatgcaaatattggtgaagcgttttcaggggttgcaggtggcactcctttttcagttgagtccggagttagactattgccacttagaacagtggttgccatgcctgctggcatcagtcgtgctccatcagggtcgtctagtggtgggcttggtattatctatccatttctcactagggttcgacaaagggcaaacactaatggtaatgatgaaaggaatggtcaatctccaaatgaatcggctcgtagtagcacccatcttaatcagcaatcaattccgcagtcatctcaaactcatgaagcaggtaatctgagatctccagttgatgtcaatgttggagatggctctgagacctcacctgggcagcagaatggtctggtcactctctctcagataatggacttttttggatcaatgctcccaggcgaaaatgttcgaggaaatacttcaagccagcaaccaccaatggcttccaccgagcagggagagggtagaaatcttgcaacaccagaagtgtcaggagccagtgaggaggccctacgctttgctggcatggtcagacaaattatgccatttatctcccaagttgaaacacagaatcaaagtgccccaccagacagcagcagcacacctgcacaggctgcatctgggagtgcagacagagctagggatgtcccaaatgattctacgagttcccgtcaacataaccgcgaccaaattgatgagcctaattctaaaaggcaaagaactagtgactgattggaatctacttgtgagctgagaatcttgccagttcttgatttaccccagcggatgatcaaaataaggacttgagacaaatggtggcagtattgagacaaaaatggattagctgtggtatatacttggcactgagggcactagacgaggcacctatgccttttttttttgagggggcgcatcttataagctgttatttttttagtgcaacgagcatacatgctgctggcatccaatccccaatatgtacaagttttaattcaggttgtgatcatttacgcaacgaatcaaagcctccgctctggtcattgccgtagcatacggaggactgacgcaatcaatcatattgttacgagaatgtatagcttaagattgtatgtttttttttaccatcgcttaagacaatcagagcatatagttcatgcttattatagtatgatccaaataggactagtagtattgttcatgcttatcattagcattgcttaagagcttgtttgggagtaagagaattaaaaaga

SEQ ID NO: 12950 - DNA, 167 bp, Zea Mays
gattagggttccgagttttgtgctacggttgttatctaaaatcatgggataagctcggaaattagtttgtaaagggtccagtcccctcctctataaatagagaggtatatggcagatttgtaatcatcaacaatcgaatcaatacaacttttattcgcattttatcc
